United States Patent Application Publication US 2023/0026259 A1 - sequence listing, part 29

SEQ ID NO: 112472 - DNA, 2438 bp, Homo sapiens
  Payload ID: 2010
  Gene Symbol: BANP
  Gene Name: BTG3 associated nuclear protein
  Uniprot ID: Q8N9N5
  ENST ID: ENST00000393207
  CDS Start-End: 222-1781
ctttctcagcctccttagtagctgggattacaggcatgtgccaccataccctgctaattttcgtatttttagtagagatggggttttgccacattggccaggctgacaggtgatccacccgccttggccttccaaagtgctgggatgacagatgtgaccaaaagccagccccactgtgagttgaactctttcgtgttgaccggccactctccgtgctctggatgatgtcggaacacgacctggccgatgtggttcagattgcagtggaagacctgagccctgaccacccagttgttttggagaatcatgtagtgacagatgaagacgaacctgctttgaaacgccagcgactagaaatcaattgccaggatccatctataaagacaatctgcttgcggttggatagcattgaagccaaattgcaagccctggaggctacttgtaaatccttagaagaaaagctggatctggtcacgaacaagcagcacagccccatccaggtccccatggtggccggctcccctctcggggcaacccagacgtgcaacaaagtgcgatgcgtcgtcccccagactacagtaatactcaacaatgatcggcagaacgccattgtagccaagatggaagaccccttgagcaacagggcaccggattccctggaaaatgtcattagcaacgctgtgcctgggcgtcggcagaacaccattgtggtgaaggtgccgggccaagaagacagccaccacgaggacggggagagcggctcggaggccagcgactctgtgtccagctgtgggcaggcgggcagtcagagcatcgggagcaacgtcacgctcatcaccctgaactcggaagaggactaccccaatggcacctggctgggcgacgagaacaaccccgagatgcgggtacgctgcgccatcatcccctccgacatgctgcacatcagcaccaactgccgcacggccgagaagatggcgctcacgctgctggactacctcttccaccgcgaggtgcaggctgtgtccaacctctcggggcagggcaagcacgggaagaagcagctggacccgctcaccatctacggcatccggtgtcaccttttctataaatttggcatcacagaatccgactggtaccgaatcaagcagagcatcgactccaagtgccgcacggcgtggcggcgcaagcagcggggccagagcctggcggtcaagagcttctcgcggagaacgcccaactcgtcctcctactgcccttcagagccgatgatgagcaccccacctcctgccagcgagctcccgcagccacagccgcagccgcaggccctgcactacgcgctggccaacgcacagcaggtgcagatccaccagatcggagaagacggacaggtgcaagtaggacacctccacatcgcccaggtgccgcagggggagcaagtccagatcacgcaggacagcgagggcaacctccagatccatcacgtggggcaggacggtcagcttctagaggccacccgcatcccctgcctcctggccccatccgtcttcaaagccagcagtggccaggtgctgcagggtgcacagctgatcgccgtggcctcctcggaccccgcggcggcgggcgtggatgggtcgccactccagggcagcgacatccaggttcagtacgtgcagctggcgccagtgagtgaccacacggccggggcacagacggccgaagccctgcagcccacgctacagccggagatgcagctcgagcacggggccatccagattcagtgagcggtgcccatggcaccaggagcccctcgccggctccgcctacggcccggcccccacgcgccctgctctcacggcctcggcacaggcagcggctgcacgtgttctgctgaagtgcgtctgaaggccgctgcctccgcggggaacagcatcctatcaactgaaagagcagccgccgccgcccccagccggagacccctttcgtttgagtcctgctgttggtgtcggagcacgaggggaggcacggtgcggagagcgtcgcatatgcgcgggaaatcaagaactatgatatttttctgtttaaacagctttttttaatttgctatggtgtttataacaaaaaagaaaatttgaaaaaaaaaatcccaggggagtagcaggagccctttgctgtgtgctctgtccagtgtcatgagacgggagccctttgctgtgtgctctgtccagtgtcatgagacgggagccctttgctgtgtgctctgtccagtgtcatgagacgggagccctttgctgtgtgctctgtccagtgtcatgaggcaggtgtttgcaaagccagctctcggttccgatggggtattgctgacctacttttctaggggaaatgctcttaaacactgtaattatgcatttctaatgaaataaaatgtatttatgaccaca

SEQ ID NO: 112473 - DNA, 2283 bp, Homo sapiens
  Payload ID: 2010
  Gene Symbol: BANP
  Gene Name: BTG3 associated nuclear protein
  Uniprot ID: Q8N9N5
  ENST ID: ENST00000393208
  CDS Start-End: 151-1626
agagcggcggcttctctcgcgaggacggacgccattatcgcatctccccgacaaacaccacgagaattccgcagcccacacggtgaccaaaagccagccccactgtgagttgaactctttcgtgttgaccggccactctccgtgctctggatgatgtcggaacacgacctggccgatgtggttcagattgcagtggaagacctgagccctgaccacccagttgttttggagaatcatgtagtgacagatgaagacgaacctgctttgaaacgccagcgactagaaatcaattgccaggatccatctataaagtcattcctgtattccatcaaccagacaatctgcttgcggttggatagcattgaagccaaattgcaagccctggaggctacttgtaaatccttagaagaaaagctggatctggtcacgaacaagcagcacagccccatccaggtccccatggtggccggctcccctctcggggcaacccagacgtgcaacaaagtgcgatgcgctgtgcctgggcgtcggcagaacaccattgtggtgaaggtgccgggccaagaagacagccaccacgaggacggggagagcggctcggaggccagcgactctgtgtccagctgtgggcaggcgggcagtcagagcatcgggagcaacgtcacgctcatcaccctgaactcggaagaggactaccccaatggcacctggctgggcgacgagaacaaccccgagatgcgggtacgctgcgccatcatcccctccgacatgctgcacatcagcaccaactgccgcacggccgagaagatggcgctcacgctgctggactacctcttccaccgcgaggtgcaggctgtgtccaacctctcggggcagggcaagcacgggaagaagcagctggacccgctcaccatctacggcatccggtgtcaccttttctataaatttggcatcacagaatccgactggtaccgaatcaagcagagcatcgactccaagtgccgcacggcgtggcggcgcaagcagcggggccagagcctggcggtcaagagcttctcgcggagaacgcccaactcgtcctcctactgcccttcagagccgatgatgagcaccccacctcctgccagcgagctcccgcagccacagccgcagccgcaggccctgcactacgcgctggccaacgcacagcaggtgcagatccaccagatcggagaagacggacaggtgcaagtaatcccacagggacacctccacatcgcccaggtgccgcagggggagcaagtccagatcacgcaggacagcgagggcaacctccagatccatcacgtggggcaggacggtcagcttctagaggccacccgcatcccctgcctcctggccccatccgtcttcaaagccagcagtggccaggtgctgcagggtgcacagctgatcgccgtggcctcctcggaccccgcggcggcgggcgtggatgggtcgccactccagggcagcgacatccaggttcagtacgtgcagctggcgccagtgagtgaccacacggccggggcacagacggccgaagccctgcagcccacgctacagccggagatgcagctcgagcacggggccatccagattcagtgagcggtgcccatggcaccaggagcccctcgccggctccgcctacggcccggcccccacgcgccctgctctcacggcctcggcacaggcagcggctgcacgtgttctgctgaagtgcgtctgaaggccgctgcctccgcggggaacagcatcctatcaactgaaagagcagccgccgccgcccccagccggagacccctttcgtttgagtcctgctgttggtgtcggagcacgaggggaggcacggtgcggagagcgtcgcatatgcgcgggaaatcaagaactatgatatttttctgtttaaacagctttttttaatttgctatggtgtttataacaaaaaagaaaatttgaaaaaaaaaatcccaggggagtagcaggagccctttgctgtgtgctctgtccagtgtcatgagacgggagccctttgctgtgtgctctgtccagtgtcatgagacgggagccctttgctgtgtgctctgtccagtgtcatgagacgggagccctttgctgtgtgctctgtccagtgtcatgaggcaggtgtttgcaaagccagctctcggttccgatggggtattgctgacctacttttctaggggaaatgctcttaaacactgtaattatgcatttctaatgaaataaaatgtatttatgaccaca

SEQ ID NO: 112474 - DNA, 586 bp, Homo sapiens
  Payload ID: 2010
  Gene Symbol: BANP
  Gene Name: BTG3 associated nuclear protein
  ENST ID: ENST00000412691
  CDS Start-End: 233-586
ttctctcgcgaggacggacgccattatcgcatctccccgacaaacaccacgagaattccgcagcccacacggatgcagaaagtagatgacattccatccacactgtgtgagcaaattggagagattgccttgatagaggactgatgtttttcactgatgagatggtgaccaaaagccagccccactgtgagttgaactctttcgtgttgaccggccactctccgtgctctggatgatgtcggaacacgacctggccgatgtggttcagattgcagtggaagacctgagccctgaccacccagttgttttggagaatcatgtagtgacagatgaagacgaacctgctttgaaacgccagcgactagaaatcaattgccaggatccatctataaagtcattcctgtattccatcaaccagacaatctgcttgcggttggatagcattgaagccaaattgcaagccctggaggctacttgtaaatccttagaagaaaagctggatctggtcacgaacaagcagcacagccccatccaggtccccatggtggccggctcccctctcggggcaacccagacgtgcaacaaa

SEQ ID NO: 112475 - DNA, 560 bp, Homo sapiens
  Payload ID: 2010
  Gene Symbol: BANP
  Gene Name: BTG3 associated nuclear protein
  ENST ID: ENST00000436970
  CDS Start-End: 192-560
agtattcttggggagaaagataacagggaagtgaggagggttcagctgtggaagtgctgggatggctgatccgagtgaccatggcctagacggggtttaaaccctggactgaagaaagtgccggtgaccaaaagccagccccactgtgagttgaactctttcgtgttgaccggccactctccgtgctctggatgatgtcggaacacgacctggccgatgtggttcagattgcagtggaagacctgagccctgaccacccagttgttttggagaatcatgtagtgacagatgaagacgaacctgctttgaaacgccagcgactagaaatcaattgccaggatccatctataaagtcattcctgtattccatcaaccagacaatctgcttgcggttggatagcattgaagccaaattgcaagccctggaggctacttgtaaatccttagaagaaaagctggatctggtcacgaacaagcagcacagccccatccaggtccccatggtggccggctcccctctcggggcaacccagacgtgcaacaaagtgcgatgcgtcgtc

SEQ ID NO: 112476 - DNA, 455 bp, Homo sapiens
  Payload ID: 2010
  Gene Symbol: BANP
  Gene Name: BTG3 associated nuclear protein
  ENST ID: ENST00000436274
  CDS Start-End: 171-455
catctgtaaagtgaggtaggccccttcaagacatgtaaggagtatctatggctgtggaatgcatctttttagactggccgctctgcatggatctgatcacgggtgaccaaaagccagccccactgtgagttgaactctttcgtgttgaccggccactctccgtgctctggatgatgtcggaacacgacctggccgatgtggttcagattgcagtggaagacctgagccctgaccacccagttgttttggagaatcatgtagtgacagatgaagacgaacctgctttgaaacgccagcgactagaaatcaattgccaggatccatctataaagtcattcctgtattccatcaaccagacaatctgcttgcggttggatagcattgaagccaaattgcaagccctggaggctacttgtaaatccttagaagaaaagctggatctggtcacgaacaag

SEQ ID NO: 112477 - DNA, 644 bp, Homo sapiens
  Payload ID: 2010
  Gene Symbol: BANP
  Gene Name: BTG3 associated nuclear protein
  ENST ID: ENST00000423252
  CDS Start-End: 561-644
atcactttttttttttttgagacagagtctcgctctgtcgccaggctggagtgcagtggcgcgatctcggctcactgcaacctctgactcgcgggctcaagcgattctcctgcctcagcctcccgagtagttgggattacaaggcgcccgccaccacgcccggcataattttgtatttttagtagagacagggtttcgccatgttggccaggctggtcgcgaaccctttacctcaggtgttccgcccgccttggcctcccacagggctgagattacaggcgtgatccaccgtgcccggccgccatcacttatttatattatgtgttacctataggacttatctaagaccataatcactgccgcgtgtgctaagtcccgcgcgcgtgcactcaggcccctctggatagacactggggacccctgaccacttatgtcagggaaaacgccaccaagcgctccggaacctcagggcaggacccgccgcagcagcaggtgaccaaaagccagccccactgtgagttgaactctttcgtgttgaccggccactctccgtgctctggatgatgtcggaacacgacctggccgatgtggttcagattgcagtggaagacctgagccctgaccacccagttgttttggagaat

SEQ ID NO: 112478 - DNA, 566 bp, Homo sapiens
  Payload ID: 2010
  Gene Symbol: BANP
  Gene Name: BTG3 associated nuclear protein
  ENST ID: ENST00000456902
  CDS Start-End: 210-566
atttccactggccccttaagagaggcaggagtttaacctggactctctggacccggggctgtttgtggaagggcctcggcatgtccttgggtttagtctggctgcacgtggtgggctccagaataccctgttttgaaccaggtgaccaaaagccagccccactgtgagttgaactctttcgtgttgaccggccactctccgtgctctggatgatgtcggaacacgacctggccgatgtggttcagattgcagtggaagacctgagccctgaccacccagttgttttggagaatcatgtagtgacagatgaagacgaacctgctttgaaacgccagcgactagaaatcaattgccaggatccatctataaagtcattcctgtattccatcaaccagacaatctgcttgcggttggatagcattgaagccaaattgcaagccctggaggctacttgtaaatccttagaagaaaagctggatctggtcacgaacaagcagcacagccccatccaggtccccatggtggccggctcccctctcggggcaacccagacgtgcaacaaagtg

SEQ ID NO: 112479 - DNA, 736 bp, Homo sapiens
  Payload ID: 2010
  Gene Symbol: BANP
  Gene Name: BTG3 associated nuclear protein
  ENST ID: ENST00000439677
  CDS Start-End: 153-736
gcagagcggcggcttctctcgcgaggacggacgccattatcgcatctccccgacaaacaccacgagaattccgcagcccacacggtgaccaaaagccagccccactgtgagttgaactctttcgtgttgaccggccactctccgtgctctggatgatgtcggaacacgacctggccgatgtggttcagattgcagtggaagacctgagccctgaccacccaggtacagagctgtgggacattgttttggagaatcatgtagtgacagatgaagacgaacctgctttgaaacgccagcgactagaaatcaattgccaggatccatctataaagtcattcctgtattccatcaaccagacaatctgcttgcggttggatagcattgaagccaaattgcaagccctggaggctacttgtaaatccttagaagaaaagctggatctggtcacgaacaagcagcacagccccatccaggtccccatggtggccggctcccctctcggggcaacccagacgtgcaacaaagtgcgatgcgctgtgcctgggcgtcggcagaacaccattgtggtgaaggtgccgggccaagaagacagccaccacgaggacggggagagcggctcggaggccagcgactctgtgtccagctgtgggcaggcgggcagtcagagcatcgggagcaacgtcacgctcatcaccctgaactcggaagaggactaccccaatggcacctggctggg

SEQ ID NO: 112480 - DNA, 558 bp, Homo sapiens
  Payload ID: 2010
  Gene Symbol: BANP
  Gene Name: BTG3 associated nuclear protein
  ENST ID: ENST00000454563
  CDS Start-End: 389-558
agagcggcggcttctctcgcgaggacggacgccattatcgcatctccccgacaaacaccacgagaattccgcagcccacacggtgaccaaaagccagccccactgtgagttgaactctttcgtgttgaccggccactctccgtgctctggatgatgtcggaacacgacctggccgatgtggttcagattgcagtggaagacctgagccctgaccacccaggtacagagctgtgggacagccttgtgtgatgaccggtttccagtgagagtagagcctttgactgaggtcctgagaacctttgactaaccacaggcacttgtaggcatggagttttaaaagtttcattaagtgagaattcatctgcaaaggcttaggtggagatggttgatgcgctccctgcctgtgaggagtcatgaggccgaaggcatagccgtgtgctgtactcaagggacacccgcacctcagcccctgagtagctgggactatccagttgttttggagaatcatgtagtgacagatgaagacgaacctgctttgaaacgccagcgactagaaat

SEQ ID NO: 112481 - DNA, 640 bp, Homo sapiens
  Payload ID: 2010
  Gene Symbol: BANP
  Gene Name: BTG3 associated nuclear protein
  ENST ID: ENST00000466197
  CDS Start-End: 100-486
caaacaccacgagaattccgcagcccacacggtgaccaaaagccagccccactgtgagttgaactctttcgtgttgaccggccactctccgtgctctggatgatgtcggaacacgacctggccgatgtggttcagattgcagtggaagacctgagccctgaccacccagttgttttggagaatcatgtagtgacagatgaagacgaacctgctttgaaacgccagcgactagaaatcaattgccaggatccatctataaagtcattcctgtattccatcaaccagacaatctgcttgcggttggatagcattgaagccaaattgcaagccctggaggctacttgtaaatccttagaagaaaagctggatctggtcacgaacaagcagcacagccccatccaggtccccatggtggccggctcccctctcggggcaacccagacgtgcaacaaagtgcgatgccttccacaacaaagcggaccttagatatcccttgtgaccagaaagtgctaaggcttaaaaacgcatgattgaaaactgtggcgtcgtcccccagactacagtaatactcaacaatgatcggcagaacgccattgtagccaagatggaagaccccttgagcaacagggcaccggattcc

SEQ ID NO: 112482 - DNA, 1551 bp, Homo sapiens
  Payload ID: 2010
  Gene Symbol: BANP
  Gene Name: BTG3 associated nuclear protein
  Uniprot ID: Q8N9N5
  ENST ID: ENST00000479780
  CDS Start-End: 151-1551
agagcggcggcttctctcgcgaggacggacgccattatcgcatctccccgacaaacaccacgagaattccgcagcccacacggtgaccaaaagccagccccactgtgagttgaactctttcgtgttgaccggccactctccgtgctctggatgatgtcggaacacgacctggccgatgtggttcagattgcagtggaagacctgagccctgaccacccagttgttttggagaatcatgtagtgacagatgaagacgaacctgctttgaaacgccagcgactagaaatcaattgccaggatccatctataaagtcattcctgtattccatcaaccagacaatctgcttgcggttggatagcattgaagccaaattgcaagccctggaggctacttgtaaatccttagaagaaaagctggatctggtcacgaacaagcagcacagccccatccaggtccccatggtggccggctcccctctcggggcaacccagacgtgcaacaaagtgcgatgcgctgtgcctgggcgtcggcagaacaccattgtggtgaaggtgccgggccaagaagacagccaccacgaggacggggagagcggctcggaggccagcgactctgtgtccagctgtgggcaggcgggcagtcagagcatcgggagcaacgtcacgctcatcaccctgaactcggaagaggactaccccaatggcacctggctgggcgacgagaacaaccccgagatgcgggtacgctgcgccatcatcccctccgacatgctgcacatcagcaccaactgccgcacggccgagaagatggcgctcacgctgctggactacctcttccaccgcgaggtgcaggctgtgtccaacctctcggggcagggcaagcacgggaagaagcagctggacccgctcaccatctacggcatccggtgtcaccttttctataaatttggcatcacagaatccgactggtaccgaatcaagcagagcatcgactccaagtgccgcacggcgtggcggcgcaagcagcggggccagagcctggcggtcaagagcttctcgcggagaacgcccaactcgtcctcctactgcccttcagagccgatgatgagcaccccacctcctgccagcgagctcccgcagccacagccgcagccgcaggccctgcactacgcgctggccaacgcacagcaggtgcagatccaccagatcggagaagacggacaggtgcaagtaggacacctccacatcgcccaggtgccgcagggggagcaagtccagatcacgcaggacagcgagggcaacctccagatccatcacgtggggcaggacggtcaggtgctgcagggtgcacagctgatcgccgtggcctcctcggaccccgcggcggcgggcgtggatgggtcgccactccagggcagcgacatccaggttcagtacgtgcagctggcgccagtgagtgaccacacggccggggcacagacggccgaagccctgcagcccacgctacagccggagatgcagctcgagcacggggccatccagattcagtga

SEQ ID NO: 112483 - DNA, 627 bp, Homo sapiens
  Payload ID: 2010
  Gene Symbol: BANP
  Gene Name: BTG3 associated nuclear protein
  ENST ID: ENST00000459966
  CDS Start-End: 150-272
gagcggcggcttctctcgcgaggacggacgccattatcgcatctccccgacaaacaccacgagaattccgcagcccacacggtgaccaaaagccagccccactgtgagttgaactctttcgtgttgaccggccactctccgtgctctggatgatgtcggaacacgacctggccgatgtggttcagattgcagtggaagacctgagccctgaccacccaggtacagagctgtgggacagtagttgttttggagaatcatgtagtgacagatgaagacgaacctgctttgaaacgccagcgactagaaatcaattgccaggatccatctataaagtcattcctgtattccatcaaccagacaatctgcttgcggttggatagcattgaagccaaattgcaagccctggaggctacttgtaaatccttagaagaaaagctggatctggtcacgaacaagcagcacagccccatccaggtccccatggtggccggctcccctctcggggcaacccagacgtgcaacaaagtgcgatgcgctgtgcctgggcgtcggcagaacaccattgtggtgaaggtgccgggccaagaagacagccaccacgaggacggggagagcggctcggaggcc

SEQ ID NO: 112484 - DNA, 608 bp, Homo sapiens
  Payload ID: 2010
  Gene Symbol: BANP
  Gene Name: BTG3 associated nuclear protein
  ENST ID: ENST00000485772
  CDS Start-End: 104-226
ccgacaaacaccacgagaattccgcagcccacacggtgaccaaaagccagccccactgtgagttgaactctttcgtgttgaccggccactctccgtgctctggatgatgtcggaacacgacctggccgatgtggttcagattgcagtggaagacctgagccctgaccacccaggtacagagctgtgggacagtagttgttttggagaatcatgtagtgacagatgaagacgaacctgctttgaaacgccagcgactagaaatcaattgccaggatccatctataaagtcattcctgtattccatcaaccagacaatctgcttgcggttggatagcattgaagccaaattgcaagccctggaggctacttgtaaatccttagaagaaaagctggatctggtcacgaacaagcagcacagccccatccaggtccccatggtggccggctcccctctcggggcaacccagacgtgcaacaaagtgcgatgggcgctaccgttttggaatgataccaacacttacgtggttacgaacgttagatctgtcccataggaatgagttgggatggagtgactgaaaatgtcaagccagttctcatgcaagtgtgcc

SEQ ID NO: 112485 - DNA, 2372 bp, Homo sapiens
  Payload ID: 2010
  Gene Symbol: BANP
  Gene Name: BTG3 associated nuclear protein
  Uniprot ID: Q8N9N5
  ENST ID: ENST00000538234
  CDS Start-End: 192-1718
agtattcttggggagaaagataacagggaagtgaggagggttcagctgtggaagtgctgggatggctgatccgagtgaccatggcctagacggggtttaaaccctggactgaagaaagtgccggtgaccaaaagccagccccactgtgagttgaactctttcgtgttgaccggccactctccgtgctctggatgatgtcggaacacgacctggccgatgtggttcagattgcagtggaagacctgagccctgaccacccagttgttttggagaatcatgtagtgacagatgaagacgaacctgctttgaaacgccagcgactagaaatcaattgccaggatccatctataaagtcattcctgtattccatcaaccagacaatctgcttgcggttggatagcattgaagccaaattgcaagccctggaggctacttgtaaatccttagaagaaaagctggatctggtcacgaacaagcagcacagccccatccaggtccccatggtggccggctcccctctcggggcaacccagacgtgcaacaaagtgcgatgcgtcgtcccccagactacagtaatactcaacaatgatcggcagaacgccattgtagccaagatggaagaccccttgagcaacagggcaccggattccctggaaaatgtcattagcaacgctgtgcctgggcgtcggcagaacaccattgtggtgaaggtgccgggccaagaagacagccaccacgaggacggggagagcggctcggaggccagcgactctgtgtccagctgtgggcaggcgggcagtcagagcatcgggagcaacgtcacgctcatcaccctgaactcggaagaggactaccccaatggcacctggctgggcgacgagaacaaccccgagatgcgggtacgctgcgccatcatcccctccgacatgctgcacatcagcaccaactgccgcacggccgagaagatggcgctcacgctgctggactacctcttccaccgcgaggtgcaggctgtgtccaacctctcggggcagggcaagcacgggaagaagcagctggacccgctcaccatctacggcatccggtgtcaccttttctataaatttggcatcacagaatccgactggtaccgaatcaagcagagcatcgactccaagtgccgcacggcgtggcggcgcaagcagcggggccagagcctggcggtcaagagcttctcgcggagaacgcccaactcgtcctcctactgcccttcagagccgatgatgagcaccccacctcctgccagcgagctcccgcagccacagccgcagccgcaggccctgcactacgcgctggccaacgcacagcaggtgcagatccaccagatcggagaagacggacaggtgcaagtaatcccacagggacacctccacatcgcccaggtgccgcagggggagcaagtccagatcacgcaggacagcgagggcaacctccagatccatcacgtggggcaggacggtcaggtgctgcagggtgcacagctgatcgccgtggcctcctcggaccccgcggcggcgggcgtggatgggtcgccactccagggcagcgacatccaggttcagtacgtgcagctggcgccagtgagtgaccacacggccggggcacagacggccgaagccctgcagcccacgctacagccggagatgcagctcgagcacggggccatccagattcagtgagcggtgcccatggcaccaggagcccctcgccggctccgcctacggcccggcccccacgcgccctgctctcacggcctcggcacaggcagcggctgcacgtgttctgctgaagtgcgtctgaaggccgctgcctccgcggggaacagcatcctatcaactgaaagagcagccgccgccgcccccagccggagacccctttcgtttgagtcctgctgttggtgtcggagcacgaggggaggcacggtgcggagagcgtcgcatatgcgcgggaaatcaagaactatgatatttttctgtttaaacagctttttttaatttgctatggtgtttataacaaaaaagaaaatttgaaaaaaaaaatcccaggggagtagcaggagccctttgctgtgtgctctgtccagtgtcatgagacgggagccctttgctgtgtgctctgtccagtgtcatgagacgggagccctttgctgtgtgctctgtccagtgtcatgagacgggagccctttgctgtgtgctctgtccagtgtcatgaggcaggtgtttgcaaagccagctctcggttccgatggggtattgctgacctacttttctaggggaaatgctcttaaacactgtaattatgcatttctaatgaaataaaatgtatttatgacc

SEQ ID NO: 112486 - DNA, 2144 bp, Homo sapiens
  Payload ID: 2010
  Gene Symbol: BANP
  Gene Name: BTG3 associated nuclear protein
  Uniprot ID: Q8N9N5
  ENST ID: ENST00000626016
  CDS Start-End: 106-1599
ccccgacaaacaccacgagaattccgcagcccacacggtgaccaaaagccagccccactgtgagttgaactctttcgtgttgaccggccactctccgtgctctggatgatgtcggaacacgacctggccgatgtggttcagattgcagtggaagacctgagccctgaccacccaggtacagagctgtgggacattgttttggagaatcatgtagtgacagatgaagacgaacctgctttgaaacgccagcgactagaaatcaattgccaggatccatctataaagtcattcctgtattccatcaaccagacaatctgcttgcggttggatagcattgaagccaaattgcaagccctggaggctacttgtaaatccttagaagaaaagctggatctggtcacgaacaagcagcacagccccatccaggtccccatggtggccggctcccctctcggggcaacccagacgtgcaacaaagtgcgatgcgctgtgcctgggcgtcggcagaacaccattgtggtgaaggtgccgggccaagaagacagccaccacgaggacggggagagcggctcggaggccagcgactctgtgtccagctgtgggcaggcgggcagtcagagcatcgggagcaacgtcacgctcatcaccctgaactcggaagaggactaccccaatggcacctggctgggcgacgagaacaaccccgagatgcgggtacgctgcgccatcatcccctccgacatgctgcacatcagcaccaactgccgcacggccgagaagatggcgctcacgctgctggactacctcttccaccgcgaggtgcaggctgtgtccaacctctcggggcagggcaagcacgggaagaagcagctggacccgctcaccatctacggcatccggtgtcaccttttctataaatttggcatcacagaatccgactggtaccgaatcaagcagagcatcgactccaagtgccgcacggcgtggcggcgcaagcagcggggccagagcctggcggtcaagagcttctcgcggagaacgcccaactcgtcctcctactgcccttcagagccgatgatgagcaccccacctcctgccagcgagctcccgcagccacagccgcagccgcaggccctgcactacgcgctggccaacgcacagcaggtgcagatccaccagatcggagaagacggacaggtgcaagtaatcccacagggacacctccacatcgcccaggtgccgcagggggagcaagtccagatcacgcaggacagcgagggcaacctccagatccatcacgtggggcaggacggtcagcttctagaggccacccgcatcccctgcctcctggccccatccgtcttcaaagccagcagtggccaggtgctgcagggtgcacagctgatcgccgtggcctcctcggaccccgcggcggcgggcgtggatgggtcgccactccagggcagcgacatccaggttcagtacgtgcagctggcgccagtgagtgaccacacggccggggcacagacggccgaagccctgcagcccacgctacagccggagatgcagctcgagcacggggccatccagattcagtgagcggtgcccatggcaccaggagcccctcgccggctccgcctacggcccggcccccacgcgccctgctctcacggcctcggcacaggcagcggctgcacgtgttctgctgaagtgcgtctgaaggccgctgcctccgcggggaacagcatcctatcaactgaaagagcagccgccgccgcccccagccggagacccctttcgtttgagtcctgctgttggtgtcggagcacgaggggaggcacggtgcggagagcgtcgcatatgcgcgggaaatcaagaactatgatatttttctgtttaaacagctttttttaatttgctatggtgtttataacaaaaaagaaaatttgaaaaaaaaaatcccaggggagtagcaggagccctttgctgtgtgctctgtccagtgtcatgagacgggagccctttgctgtgtgctctgtccagtgtcatgagacgggagccctttgctgtgtgctctgtccagtgtcatgagacgggagccctttgctgtgtgctctgtccagtgtcatgaggcaggtgtttgc

SEQ ID NO: 112487 - DNA, 3507 bp, Homo sapiens
  Payload ID: 2011
  Gene Symbol: BUB1
  Gene Name: BUB1 mitotic checkpoint serine/threonine kinase
  Uniprot ID: O43683
  ENST ID: ENST00000302759
  CDS Start-End: 120-3377
atgggcaggcgccctgaaacgttcggcgagccgactgcggctgcgcggggtattcgaatcggcggcggcttctagtttgcggttcaggtttggccgctgccggccagcgtcctctggccatggacaccccggaaaatgtccttcagatgcttgaagcccacatgcagagctacaagggcaatgaccctcttggtgaatgggaaagatacatacagtgggtagaagagaattttcctgagaataaagaatacttgataactttactagaacatttaatgaaggaatttttagataagaagaaataccacaatgacccaagattcatcagttattgtttaaaatttgctgagtacaacagtgacctccatcaattttttgagtttctgtacaaccatgggattggaaccctgtcatcccctctgtacattgcctgggcggggcatctggaagcccaaggagagctgcagcatgccagtgctgtccttcagagaggaattcaaaaccaggctgaacccagagagttcctgcaacaacaatacaggttatttcagacacgcctcactgaaacccatttgccagctcaagctagaacctcagaacctctgcataatgttcaggttttaaatcaaatgataacatcaaaatcaaatccaggaaataacatggcctgcatttctaagaatcagggttcagagctttctggagtgatatcttcagcttgtgataaagagtcaaatatggaacgaagagtgatcacgatttctaaatcagaatattctgtgcactcatctttggcatccaaagttgatgttgagcaggttgttatgtattgcaaggagaagcttattcgtggggaatcagaattttcctttgaagaattgagagcccagaaatacaatcaacggagaaagcatgagcaatgggtaaatgaagacagacattatatgaaaaggaaagaagcaaatgcttttgaagaacagctattaaaacagaaaatggatgaacttcataagaagttgcatcaggtggtggagacatcccatgaggatctgcccgcttcccaggaaaggtccgaggttaatccagcacgtatggggccaagtgtaggctcccagcaggaactgagagcgccatgtcttccagtaacctatcagcagacaccagtgaacatggaaaagaacccaagagaggcacctcctgttgttcctcctttggcaaatgctatttctgcagctttggtgtccccagccaccagccagagcattgctcctcctgttcctttgaaagcccagacagtaacagactccatgtttgcagtggccagcaaagatgctggatgtgtgaataagagtactcatgaattcaagccacagagtggagcagagatcaaagaagggtgtgaaacacataaggttgccaacacaagttcttttcacacaactccaaacacatcactgggaatggttcaggcaacgccatccaaagtgcagccatcacccaccgtgcacacaaaagaagcattaggtttcatcatgaatatgtttcaggctcctacacttcctgatatttctgatgacaaagatgaatggcaatctctagatcaaaatgaagatgcatttgaagcccagtttcaaaaaaatgtaaggtcatctggggcttggggagtcaataagatcatctcttctttgtcatctgcttttcatgtgtttgaagatggaaacaaagaaaattatggattaccacagcctaaaaataaacccacaggagccaggacctttggagaacgctctgtcagcagacttccttcaaaaccaaaggaggaagtgcctcatgctgaagagtttttggatgactcaactgtatggggtattcgctgcaacaaaaccctggcacccagtcctaagagcccaggagacttcacatctgctgcacaacttgcgtctacaccattccacaagcttccagtggagtcagtgcacattttagaagataaagaaaatgtggtagcaaaacagtgtacccaggcgactttggattcttgtgaggaaaacatggtggtgccttcaagggatggaaaattcagtccaattcaagagaaaagcccaaaacaggccttgtcgtctcacatgtattcagcatccttacttcgtctgagccagcctgctgcaggtggggtacttacctgtgaggcagagttgggcgttgaggcttgcagactcacagacactgacgctgccattgcagaagatccaccagatgctattgctgggctccaagcagaatggatgcagatgagttcacttgggactgttgatgctccaaacttcattgttgggaacccatgggatgataagctgattttcaaacttttatctgggctttctaaaccagtgagttcctatccaaatacttttgaatggcaatgtaaacttccagccatcaagcccaagactgaatttcaattgggttctaagctggtctatgtccatcaccttcttggagaaggagcctttgcccaggtgtacgaagctacccagggagatctgaatgatgctaaaaataaacagaaatttgttttaaaggtccaaaagcctgccaacccctgggaattctacattgggacccagttgatggaaagactaaagccatctatgcagcacatgtttatgaagttctattctgcccacttattccagaatggcagtgtattagtaggagagctctacagctatggaacattattaaatgccattaacctctataaaaatacccctgaaaaagtgatgcctcaaggtcttgtcatctcttttgctatgagaatgctttacatgattgagcaagtgcatgactgtgaaatcattcatggagacattaaaccagacaatttcatacttggaaacggatttttggaacaggatgatgaagatgatttatctgctggcttggcactgattgacctgggtcagagtatagatatgaaactttttccaaaaggaactatattcacagcaaagtgtgaaacatctggttttcagtgtgttgagatgctcagcaacaaaccatggaactaccagatcgattactttggggttgctgcaacagtatattgcatgctctttggcacttacatgaaagtgaaaaatgaaggaggagagtgtaagcctgaaggtctttttagaaggcttcctcatttggatatgtggaatgaattttttcatgttatgttgaatattccagattgtcatcatcttccatctttggatttgttaaggcaaaagctgaagaaagtatttcaacaacactatactaacaagattagggccctacgtaataggctaattgtactgctcttagaatgtaagcgttcacgaaaataaaatttggatatagacagtccttaaaaatcacactgtaaatatgaatctgctcactttaaacctgtttttttttcatttattgtttatgtaaatgtttgttaaaaataaatcccatggaatatttccatgt

SEQ ID NO: 112488 - DNA, 3287 bp, Homo sapiens
  Payload ID: 2011
  Gene Symbol: BUB1
  Gene Name: BUB1 mitotic checkpoint serine/threonine kinase
  Uniprot ID: O43683
  ENST ID: ENST00000409311
  CDS Start-End: 69-3155
attcgaatcggcggcggcttctagtttgcggttcaggtttggccgctgccggccagcgtcctctggccatggacaccccggaaaatgtccttcagatgcttgaagcccacatgcagagctacaagggcaatgaccctcttggtgaatgggaaagatacatacagtgggtagaagagaattttcctgagaataaagaatacttgataactttactagaacatttaatgaaggaatttttagataagaagaaataccacaatgacccaagattcatcagttattgtttaaaatttgctgagtacaacagtgacctccatcaattttttgagtttctgtacaaccatgggattggaaccctgtcatcccctctgtacattgcctgggcggggcatctggaagcccaaggagagctgcagcatgccagtgctgtccttcagagaggaattcaaaaccaggctgaacccagagagttcctgcaacaacaatacaggttatttcagacacgcctcactgaaacccatttgccagctcaagctagaacctcagaacctctgcataatgttcaggttttaaatcaaatgataacatcaaaatcaaatccaggaaataacatggcctgcatttctaagaatcagggttcagagctttctggagtgatatcttcagcttgtgataaagagtcaaatatggaacgaagagtgatcacgatttctaaatcagaatattctgtgcactcatctttggcatccaaagttgatgttgagcaggttgttatgtattgcaaggagaagcttattcgtggggaatcagaattttcctttgaagaattgagagcccagaaatacaatcaacggagaaagcatgagcaatgggtaaatgaagacagacattatatgaaaaggaaagaagcaaatgcttttgaagaacagctattaaaacagaaaatggatgaacttcataagaagttgcatcaggtggtggagacatcccatgaggatctgcccgcttcccaggaaaggtccgaggttaatccagcacgtatggggccaagtgtaggctcccagcaggaactgagagcgccatgtcttccagtaacctatcagcagacaccagtgaacatggaaaagaacccaagagaggcacctcctgttgttcctcctttggcaaatgctatttctgcagctttggtgtccccagccaccagccagagcattgctcctcctgttcctttgaaagcccagacagtaacagactccatgtttgcagtggccagcaaagatgctggatgtgtgaataagagtactcatgaattcaagccacagagtggagcagagatcaaagaagggtgtgaaacacataaggttgccaacacaagttcttttcacacaactccaaacacatcactgggaatggttcaggcaacgccatccaaagtgcagccatcacccaccgtgcacacaaaagaagcattaggtttcatcatgaatatgtttcaggctcctacacttcctgatatttctgatgacaaagatgaatggcaatctctagatcaaaatgaagatgcatttgaagcccagtttcaaaaaaatgtaaggtcatctggggcttggggagtcaataagatcatctcttctttgtcatctgcttttcatgtgtttgaagatggaaacaaagaaaattatggattaccacagcctaaaaataaacccacaggagccaggacctttggagaacgctctgtcagcagacttccttcaaaaccaaaggaggaagtgcctcatgctgaagagtttttggatgactcaactgtatggggtattcgctgcaacaaaaccctggcacccagtcctaagagcccaggagacttcacatctgctgcacaacttgcgtctacaccattccacaagcttccagtggagtcagtgcacattttagaagataaagaaaatgtggtagcaaaacagtgtacccaggcgactttggattcttgtgaggaaaacatggtggtgccttcaagggatggaaaattcagtccaattcaagagaaaagcccaaaacaggccttgtcgtctcacatgtattcagcatccttacttcgtctgagccagcctgctgcaggtggggtacttacctgtgaggcagagttgggcgttgaggcttgcagactcacagacactgacgctgccattgcagaagatccaccagatgctattgctgggctccaagcagaatggatgcagatgagttcacttgggactgttgatgctccaaacttcattgttgggaacccatgggatgataagctgattttcaaacttttatctgggctttctaaaccagtgagttcctatccaaatacttttgaatggcaatgtaaacttccagccatcaagcccaagactgaatttcaattgggttctaagctggtctatgtccatcaccttcttggagaaggagcctttgcccaggtgtacgaagctacccagggagatctgaatgatgctaaaaataaacagaaatttgttttaaaggtccaaaagcctgccaacccctgggaattctacattgggacccagttgatggaaagactaaagccatctatgcagcacatgtttatgaagttctattctgcccacttattccagaatggcagtgtattagtaggagagctctacagctatggaacattattagatgatgaagatgatttatctgctggcttggcactgattgacctgggtcagagtatagatatgaaactttttccaaaaggaactatattcacagcaaagtgtgaaacatctggttttcagtgtgttgagatgctcagcaacaaaccatggaactaccagatcgattactttggggttgctgcaacagtatattgcatgctctttggcacttacatgaaagtgaaaaatgaaggaggagagtgtaagcctgaaggtctttttagaaggcttcctcatttggatatgtggaatgaattttttcatgttatgttgaatattccagattgtcatcatcttccatctttggatttgttaaggcaaaagctgaagaaagtatttcaacaacactatactaacaagattagggccctacgtaataggctaattgtactgctcttagaatgtaagcgttcacgaaaataaaatttggatatagacagtccttaaaaatcacactgtaaatatgaatctgctcactttaaacctgtttttttttcatttattgtttatgtaaatgtttgttaaaaataaatcccatggaatatttccatgtaa

SEQ ID NO: 112489 - DNA, 540 bp, Homo sapiens
  Payload ID: 2011
  Gene Symbol: BUB1
  Gene Name: BUB1 mitotic checkpoint serine/threonine kinase
  ENST ID: ENST00000436916
  CDS Start-End: 373-540
tttctcctattatatgttattttgtttgttcttctgagtacttaatgtaacctgacattactttgcatgtttctttttgtttagcccttctagctctccccaaggggaattttgctttgcctggctgctttttttcagctgtagttgagtatatggaagtgggggatgcagagttctctgggagctctgtggctgatttctgagcactgttatcatctgctcttcctcagggactttgttactttgaagcaatgaaaacaaactgtgtctgggaactctactttgtggtactctgggctgcctcacacccgtttacaatccctctttgactcgttccagccgtgtctcagccatgctcctgggaagcaaaggatgcttgaagcccacatgcagagctacaagggcaatgaccctcttggtgaatgggaaagatacatacagtgggtagaagagaattttcctgagaataaagaatacttgataactttactagaacatttaatgaaggaatttttagataagaagaaataccacaatgac

SEQ ID NO: 112490 - DNA, 551 bp, Homo sapiens
  Payload ID: 2011
  Gene Symbol: BUB1
  Gene Name: BUB1 mitotic checkpoint serine/threonine kinase
  ENST ID: ENST00000447014
  CDS Start-End: 113-551
gttcaggtttggccgctgccggccagcgtcctctggccatggacaccccggaaaatgtccttcactgtgtaatacttcatgtaccctaattgatctaagcagtcaacacaggatgcttgaagcccacatgcagagctacaagggcaatgaccctcttggtgaatgggaaagatacatacagtgggtagaagagaattttcctgagaataaagaatacttgataactttactagaacatttaatgaaggaatttttagataagaagaaataccacaatgacccaagattcatcagttattgtttaaaatttgctgagtacaacagtgacctccatcaattttttgagtttctgtacaaccatgggattggaaccctgtcatcccctctgtacattgcctgggcggggcatctggaagcccaaggagagctgcagcatgccagtgctgtccttcagagaggaattcaaaaccaggctgaacccagagagttcctgcaacaacaatacaggttatttcagacacgcctcactgaaacccatttgccagctcaag

SEQ ID NO: 112491 - DNA, 566 bp, Homo sapiens
  Payload ID: 2011
  Gene Symbol: BUB1
  Gene Name: BUB1 mitotic checkpoint serine/threonine kinase
  ENST ID: ENST00000420328
  CDS Start-End: 165-566
agtttgcggttcaggtttggccgctgccggccagcgtcctctggccatggacaccccggaaaatgtccttcactgtgtaatacttcatgtaccctaattgatctaagcagtcaacacaggttgttgacaatctgtttcaaatagtggcacggtgaaaaatcttgatgcttgaagcccacatgcagagctacaagggcaatgaccctcttggtgaatgggaaagatacatacagtgggtagaagagaattttcctgagaataaagaatacttgataactttactagaacatttaatgaaggaatttttagataagaagaaataccacaatgacccaagattcatcagttattgtttaaaatttgctgagtacaacagtgacctccatcaattttttgagtttctgtacaaccatgggattggaaccctgtcatcccctctgtacattgcctgggcggggcatctggaagcccaaggagagctgcagcatgccagtgctgtccttcagagaggaattcaaaaccaggctgaacccagagagttcctgcaacaacaatacaggttattt

SEQ ID NO: 112492 - DNA, 3576 bp, Homo sapiens
  Payload ID: 2011
  Gene Symbol: BUB1
  Gene Name: BUB1 mitotic checkpoint serine/threonine kinase
  Uniprot ID: O43683
  ENST ID: ENST00000535254
  CDS Start-End: 113-3310
ggcgccctgaaacgttcggcgagccgactgcggctgcgcggggtattcgaatcggcggcggcttctagtttgcggttcaggtttggccgctgccggccagcgtcctctggccatggacaccccggaaaatgtccttcaatacatacagtgggtagaagagaattttcctgagaataaagaatacttgataactttactagaacatttaatgaaggaatttttagataagaagaaataccacaatgacccaagattcatcagttattgtttaaaatttgctgagtacaacagtgacctccatcaattttttgagtttctgtacaaccatgggattggaaccctgtcatcccctctgtacattgcctgggcggggcatctggaagcccaaggagagctgcagcatgccagtgctgtccttcagagaggaattcaaaaccaggctgaacccagagagttcctgcaacaacaatacaggttatttcagacacgcctcactgaaacccatttgccagctcaagctagaacctcagaacctctgcataatgttcaggttttaaatcaaatgataacatcaaaatcaaatccaggaaataacatggcctgcatttctaagaatcagggttcagagctttctggagtgatatcttcagcttgtgataaagagtcaaatatggaacgaagagtgatcacgatttctaaatcagaatattctgtgcactcatctttggcatccaaagttgatgttgagcaggttgttatgtattgcaaggagaagcttattcgtggggaatcagaattttcctttgaagaattgagagcccagaaatacaatcaacggagaaagcatgagcaatgggtaaatgaagacagacattatatgaaaaggaaagaagcaaatgcttttgaagaacagctattaaaacagaaaatggatgaacttcataagaagttgcatcaggtggtggagacatcccatgaggatctgcccgcttcccaggaaaggtccgaggttaatccagcacgtatggggccaagtgtaggctcccagcaggaactgagagcgccatgtcttccagtaacctatcagcagacaccagtgaacatggaaaagaacccaagagaggcacctcctgttgttcctcctttggcaaatgctatttctgcagctttggtgtccccagccaccagccagagcattgctcctcctgttcctttgaaagcccagacagtaacagactccatgtttgcagtggccagcaaagatgctggatgtgtgaataagagtactcatgaattcaagccacagagtggagcagagatcaaagaagggtgtgaaacacataaggttgccaacacaagttcttttcacacaactccaaacacatcactgggaatggttcaggcaacgccatccaaagtgcagccatcacccaccgtgcacacaaaagaagcattaggtttcatcatgaatatgtttcaggctcctacacttcctgatatttctgatgacaaagatgaatggcaatctctagatcaaaatgaagatgcatttgaagcccagtttcaaaaaaatgtaaggtcatctggggcttggggagtcaataagatcatctcttctttgtcatctgcttttcatgtgtttgaagatggaaacaaagaaaattatggattaccacagcctaaaaataaacccacaggagccaggacctttggagaacgctctgtcagcagacttccttcaaaaccaaaggaggaagtgcctcatgctgaagagtttttggatgactcaactgtatggggtattcgctgcaacaaaaccctggcacccagtcctaagagcccaggagacttcacatctgctgcacaacttgcgtctacaccattccacaagcttccagtggagtcagtgcacattttagaagataaagaaaatgtggtagcaaaacagtgtacccaggcgactttggattcttgtgaggaaaacatggtggtgccttcaagggatggaaaattcagtccaattcaagagaaaagcccaaaacaggccttgtcgtctcacatgtattcagcatccttacttcgtctgagccagcctgctgcaggtggggtacttacctgtgaggcagagttgggcgttgaggcttgcagactcacagacactgacgctgccattgcagaagatccaccagatgctattgctgggctccaagcagaatggatgcagatgagttcacttgggactgttgatgctccaaacttcattgttgggaacccatgggatgataagctgattttcaaacttttatctgggctttctaaaccagtgagttcctatccaaatacttttgaatggcaatgtaaacttccagccatcaagcccaagactgaatttcaattgggttctaagctggtctatgtccatcaccttcttggagaaggagcctttgcccaggtgtacgaagctacccagggagatctgaatgatgctaaaaataaacagaaatttgttttaaaggtccaaaagcctgccaacccctgggaattctacattgggacccagttgatggaaagactaaagccatctatgcagcacatgtttatgaagttctattctgcccacttattccagaatggcagtgtattagtaggagagctctacagctatggaacattattaaatgccattaacctctataaaaatacccctgaaaaagtgatgcctcaaggtcttgtcatctcttttgctatgagaatgctttacatgattgagcaagtgcatgactgtgaaatcattcatggagacattaaaccagacaatttcatacttggaaacggatttttggaacaggatgatgaagatgatttatctgctggcttggcactgattgacctgggtcagagtatagatatgaaactttttccaaaaggaactatattcacagcaaagtgtgaaacatctggttttcagtgtgttgagatgctcagcaacaaaccatggaactaccagatcgattactttggggttgctgcaacagtatattgcatgctctttggcacttacatgaaagtgaaaaatgaaggaggagagtgtaagcctgaaggtctttttagaaggcttcctcatttggatatgtggaatgaattttttcatgttatgttgaatattccagattgtcatcatcttccatctttggatttgttaaggcaaaagctgaagaaagtatttcaacaacactatactaacaagattagggccctacgtaataggctaattgtactgctcttagaatgtaagcgttcacgaaaataaaatttggatatagacagtccttaaaaatcacactgtaaatatgaatctgctcactttaaacctgtttttttttcatttattgtttatgtaaatgtttgttaaaaataaatcccatggaatatttccatgtaacttagttgttataaatatttcaacaaaatatacaaccccataaggtccctatatagcaggctgattgggctgcttctgggatgcaagcatttgtgagaataattcagacatgagcattctctagaaatcacttt

SEQ ID NO: 112493 - DNA, 3725 bp, Homo sapiens
  Payload ID: 2012
  Gene Symbol: BUB1B
  Gene Name: BUB1 mitotic checkpoint serine/threonine kinase B
  Uniprot ID: O60566
  ENST ID: ENST00000287598
  CDS Start-End: 196-3348
gaccgcgcgggaccgttaaatttgaaacttggcggctaggggtgtgggcttgaggtggccggtttgttagggagtcgtgtacgtgccttggtcgcttctgtagctccgagggcaggttgcggaagaaagcccaggcggtctgtggcccagaggaaaggcctgcagcaggacgaggacctgagccaggaatgcaggatggcggcggtgaagaaggaagggggtgctctgagtgaagccatgtccctggagggagatgaatgggaactgagtaaagaaaatgtacaacctttaaggcaagggcggatcatgtccacgcttcagggagcactggcacaagaatctgcctgtaacaatactcttcagcagcagaaacgggcatttgaatatgaaattcgattttacactggaaatgaccctctggatgtttgggataggtatatcagctggacagagcagaactatcctcaaggtgggaaggagagtaatatgtcaacgttattagaaagagctgtagaagcactacaaggagaaaaacgatattatagtgatcctcgatttctcaatctctggcttaaattagggcgtttatgcaatgagcctttggatatgtacagttacttgcacaaccaagggattggtgtttcacttgctcagttctatatctcatgggcagaagaatatgaagctagagaaaactttaggaaagcagatgcgatatttcaggaagggattcaacagaaggctgaaccactagaaagactacagtcccagcaccgacaattccaagctcgagtgtctcggcaaactctgttggcacttgagaaagaagaagaggaggaagtttttgagtcttctgtaccacaacgaagcacactagctgaactaaagagcaaagggaaaaagacagcaagagctccaatcatccgtgtaggaggtgctctcaaggctccaagccagaacagaggactccaaaatccatttcctcaacagatgcaaaataatagtagaattactgtttttgatgaaaatgctgatgaggcttctacagcagagttgtctaagcctacagtccagccatggatagcaccccccatgcccagggccaaagagaatgagctgcaagcaggcccttggaacacaggcaggtccttggaacacaggcctcgtggcaatacagcttcactgatagctgtacccgctgtgcttcccagtttcactccatatgtggaagagactgcacgacagccagttatgacaccatgtaaaattgaacctagtataaaccacatcctaagcaccagaaagcctggaaaggaagaaggagatcctctacaaagggttcagagccatcagcaagcgtctgaggagaagaaagagaagatgatgtattgtaaggagaagatttatgcaggagtaggggaattctcctttgaagaaattcgggctgaagttttccggaagaaattaaaagagcaaagggaagccgagctattgaccagtgcagagaagagagcagaaatgcagaaacagattgaagagatggagaagaagctaaaagaaatccaaactactcagcaagaaagaacaggtgatcagcaagaagagacgatgcctacaaaggagacaactaaactgcaaattgcttccgagtctcagaaaataccaggaatgactctatccagttctgtttgtcaagtaaactgttgtgccagagaaacttcacttgcggagaacatttggcaggaacaacctcattctaaaggtcccagtgtacctttctccatttttgatgagtttcttctttcagaaaagaagaataaaagtcctcctgcagatcccccacgagttttagctcaacgaagaccccttgcagttctcaaaacctcagaaagcatcacctcaaatgaagatgtgtctccagatgtttgtgatgaatttacaggaattgaacccttgagcgaggatgccattatcacaggcttcagaaatgtaacaatttgtcctaacccagaagacacttgtgactttgccagagcagctcgttttgtatccactccttttcatgagataatgtccttgaaggatctcccttctgatcctgagagactgttaccggaagaagatctagatgtaaagacctctgaggaccagcagacagcttgtggcactatctacagtcagactctcagcatcaagaagctgagcccaattattgaagacagtcgtgaagccacacactcctctggcttctctggttcttctgcctcggttgcaagcacctcctccatcaaatgtcttcaaattcctgagaaactagaacttactaatgagacttcagaaaaccctactcagtcaccatggtgttcacagtatcgcagacagctactgaagtccctaccagagttaagtgcctctgcagagttgtgtatagaagacagaccaatgcctaagttggaaattgagaaggaaattgaattaggtaatgaggattactgcattaaacgagaatacctaatatgtgaagattacaagttattctgggtggcgccaagaaactctgcagaattaacagtaataaaggtatcttctcaacctgtcccatgggacttttatatcaacctcaagttaaaggaacgtttaaatgaagattttgatcatttttgcagctgttatcaatatcaagatggctgtattgtttggcaccaatatataaactgcttcacccttcaggatcttctccaacacagtgaatatattacccatgaaataacagtgttgattatttataaccttttgacaatagtggagatgctacacaaagcagaaatagtccatggtgacttgagtccaaggtgtctgattctcagaaacagaatccacgatccctatgattgtaacaagaacaatcaagctttgaagatagtggacttttcctacagtgttgaccttagggtgcagctggatgtttttaccctcagcggctttcggactgtacagatcctggaaggacaaaagatcctggctaactgttcttctccctaccaggtagacctgtttggtatagcagatttagcacatttactattgttcaaggaacacctacaggtcttctgggatgggtccttctggaaacttagccaaaatatttctgagctaaaagatggtgaattgtggaataaattctttgtgcggattctgaatgccaatgatgaggccacagtgtctgttcttggggagcttgcagcagaaatgaatggggtttttgacactacattccaaagtcacctgaacaaagccttatggaaggtagggaagttaactagtcctggggctttgctctttcagtgagctaggcaatcaagtctcacagattgctgcctcagagcaatggttgtattgtggaacactgaaactgtatgtgctgtaatttaatttaggacacatttagatgcactaccattgctgttctactttttggtacaggtatattttgacgtcactgatattttttatacagtgatatacttactcatggccttgtctaacttttgtgaagaactattttattctaaacagactcattacaaatggttaccttgttatttaacccatttgtctctacttttccctgtacttttcccatttgtaatttgtaaaatgttctcttatgatcaccatgtattttgtaaataataaaatagtatctgttaaatttgtgcttctaa

SEQ ID NO: 112494 - DNA, 3628 bp, Homo sapiens
  Payload ID: 2012
  Gene Symbol: BUB1B
  Gene Name: BUB1 mitotic checkpoint serine/threonine kinase B
  Uniprot ID: O60566
  ENST ID: ENST00000412359
  CDS Start-End: 155-3349
gtgtgggcttgaggtggccggtttgttagggagtcgtgtacgtgccttggtcgcttctgtagctccgagggcaggttgcggaagaaagcccaggcggtctgtggcccagaggaaaggcctgcagcaggacgaggacctgagccaggaatgcaggatggcggcggtgaagaaggaagggggtgctctgagtgaagccatgtccctggagggagatgaatgggaactgagtaaagaaaatgtacaacctttaaggcaagggcggatcatgtccacgcttcagggagcactggcacaagaatctgcctgtaacaatactcttcagcagcagaaacgggcatttgaatatgaaattcgattttacactggaaatgaccctctggatgtttgggataggtgggtctttttatttcacaaggacaatagaaacattaacaggtatatcagctggacagagcagaactatcctcaaggtgggaaggagagtaatatgtcaacgttattagaaagagctgtagaagcactacaaggagaaaaacgatattatagtgatcctcgatttctcaatctctggcttaaattagggcgtttatgcaatgagcctttggatatgtacagttacttgcacaaccaagggattggtgtttcacttgctcagttctatatctcatgggcagaagaatatgaagctagagaaaactttaggaaagcagatgcgatatttcaggaagggattcaacagaaggctgaaccactagaaagactacagtcccagcaccgacaattccaagctcgagtgtctcggcaaactctgttggcacttgagaaagaagaagaggaggaagtttttgagtcttctgtaccacaacgaagcacactagctgaactaaagagcaaagggaaaaagacagcaagagctccaatcatccgtgtaggaggtgctctcaaggctccaagccagaacagaggactccaaaatccatttcctcaacagatgcaaaataatagtagaattactgtttttgatgaaaatgctgatgaggcttctacagcagagttgtctaagcctacagtccagccatggatagcaccccccatgcccagggccaaagagaatgagctgcaagcaggcccttggaacacaggcaggtccttggaacacaggcctcgtggcaatacagcttcactgatagctgtacccgctgtgcttcccagtttcactccatatgtggaagagactgcacgacagccagttatgacaccatgtaaaattgaacctagtataaaccacatcctaagcaccagaaagcctggaaaggaagaaggagatcctctacaaagggttcagagccatcagcaagcgtctgaggagaagaaagagaagatgatgtattgtaaggagaagatttatgcaggagtaggggaattctcctttgaagaaattcgggctgaagttttccggaagaaattaaaagagcaaagggaagccgagctattgaccagtgcagagaagagagcagaaatgcagaaacagattgaagagatggagaagaagctaaaagaaatccaaactactcagcaagaaagaacaggtgatcagcaagaagagacgatgcctacaaaggagacaactaaactgcaaattgcttccgagtctcagaaaataccaggaatgactctatccagttctgtttgtcaagtaaactgttgtgccagagaaacttcacttgcggagaacatttggcaggaacaacctcattctaaaggtcccagtgtacctttctccatttttgatgagtttcttctttcagaaaagaagaataaaagtcctcctgcagatcccccacgagttttagctcaacgaagaccccttgcagttctcaaaacctcagaaagcatcacctcaaatgaagatgtgtctccagatgtttgtgatgaatttacaggaattgaacccttgagcgaggatgccattatcacaggcttcagaaatgtaacaatttgtcctaacccagaagacacttgtgactttgccagagcagctcgttttgtatccactccttttcatgagataatgtccttgaaggatctcccttctgatcctgagagactgttaccggaagaagatctagatgtaaagacctctgaggaccagcagacagcttgtggcactatctacagtcagactctcagcatcaagaagctgagcccaattattgaagacagtcgtgaagccacacactcctctggcttctctggttcttctgcctcggttgcaagcacctcctccatcaaatgtcttcaaattcctgagaaactagaacttactaatgagacttcagaaaaccctactcagtcaccatggtgttcacagtatcgcagacagctactgaagtccctaccagagttaagtgcctctgcagagttgtgtatagaagacagaccaatgcctaagttggaaattgagaaggaaattgaattaggtaatgaggattactgcattaaacgagaatacctaatatgtgaagattacaagttattctgggtggcgccaagaaactctgcagaattaacagtaataaaggtatcttctcaacctgtcccatgggacttttatatcaacctcaagttaaaggaacgtttaaatgaagattttgatcatttttgcagctgttatcaatatcaagatggctgtattgtttggcaccaatatataaactgcttcacccttcaggatcttctccaacacagtgaatatattacccatgaaataacagtgttgattatttataaccttttgacaatagtggagatgctacacaaagcagaaatagtccatggtgacttgagtccaaggtgtctgattctcagaaacagaatccacgatccctatgattgtaacaagaacaatcaagctttgaagatagtggacttttcctacagtgttgaccttagggtgcagctggatgtttttaccctcagcggctttcggactgtacagatcctggaaggacaaaagatcctggctaactgttcttctccctaccaggtagacctgtttggtatagcagatttagcacatttactattgttcaaggaacacctacaggtcttctgggatgggtccttctggaaacttagccaaaatatttctgagctaaaagatggtgaattgtggaataaattctttgtgcggattctgaatgccaatgatgaggccacagtgtctgttcttggggagcttgcagcagaaatgaatggggtttttgacactacattccaaagtcacctgaacaaagccttatggaaggtagggaagttaactagtcctggggctttgctctttcagtgagctaggcaatcaagtctcacagattgctgcctcagagcaatggttgtattgtggaacactgaaactgtatgtgctgtaatttaatttaggacacatttagatgcactaccattgctgttctactttttggtacaggtatattttgacgtcactgatattttttatacagtgatatacttactcatggccttgtctaacttttgtgaagaactattttattctaaacagactcattacaaatggttaccttgttatttaacccatttgtctctacttttc

SEQ ID NO: 112495 - DNA, 786 bp, Homo sapiens
  Payload ID: 2012
  Gene Symbol: BUB1B
  Gene Name: BUB1 mitotic checkpoint serine/threonine kinase B
  ENST ID: ENST00000559733
  CDS Start-End: 1-199
acaattccaagctcgagtgtctcggcaaactctgttggcacttgagaaagaagaagaggaggaagtttttgagtcttctgtaccacaacgaagcacactagctgaactaaagagcaaagggaaaaagacagcaagagctccaatcatccgtgtaggaggtgctctcaagggacaccatgtaaaattgaacctagtataaaccacatcctaagcaccagaaagcctggaaaggaagaaggagatcctctacaaagggttcagagccatcagcaagcgtctgaggagaagaaagagaagatgatgtattgtaaggagaagatttatgcaggagtaggggaattctcctttgaagaaattcgggctgaagttttccggaagaaattaaaagagcaaagggaagccgagctattgaccagtgcagagaagagagcagaaatgcagaaacagattgaagagatggagaagaagctaaaagaaatccaaactactcagcaagaaagaacaggtgatcagcaagaagagacgatgcctacaaaggagacaactaaactgcaaattgcttccgagtctcagaaaataccaggaatgactctatccagttctgtttgtcaagtaaactgttgtgccagagaaacttcacttgcggagaacatttggcaggaacaacctcattctaaaggtcccagtgtacctttctccatttttgatgagtttcttctttcagaaaagaagaataaaagtcctcctgcagatcccccacgagttttagctcaacgaagacccctt

SEQ ID NO: 112496 - DNA, 580 bp, Homo sapiens
  Payload ID: 2012
  Gene Symbol: BUB1B
  Gene Name: BUB1 mitotic checkpoint serine/threonine kinase B
  ENST ID: ENST00000558715
  CDS Start-End: 155-445
gtgtgggcttgaggtggccggtttgttagggagtcgtgtacgtgccttggtcgcttctgtagctccgagggcaggttgcggaagaaagcccaggcggtctgtggcccagaggaaaggcctgcagcaggacgaggacctgagccaggaatgcaggatggcggcggtgaagaaggaagggggtgctctgagtgaagccatgtccctggagggagatgaatgggaactgagtaaagaaaatgtacaacctttaaggcaagggcggatcatgtccacgcttcagggagcactggcacaagaatctgcctgtaacaatactcttcagcagcagaaacgagacggagtctcgctctttcggccaggctggagtgcagtggcacgatcttggctcactggaagctctgcctcctgggttcacgccaatctcctgcctcagcctcctgagtagctgggactacagggcatttgaatatgaaattcgattttacactggaaatgaccctctggatgtttgggataggtatatcagctggacagagcagaactatcctcaaggtgggaaggagagtaatatgtcaacgtt

SEQ ID NO: 112497 - DNA, 1361 bp, Homo sapiens
  Payload ID: 2013
  Gene Symbol: BUB3
  Gene Name: BUB3 mitotic checkpoint protein
  Uniprot ID: O43684
  ENST ID: ENST00000368858
  CDS Start-End: 72-1052
gaagcaaggaggcggcggcggccgcagcgagtggcgagtagtggaaacgttgcttctgaggggagcccaagatgaccggttctaacgagttcaagctgaaccagccacccgaggatggcatctcctccgtgaagttcagccccaacacctcccagttcctgcttgtctcctcctgggacacgtccgtgcgtctctacgatgtgccggccaactccatgcggctcaagtaccagcacaccggcgccgtcctggactgcgccttctacgatccaacgcatgcctggagtggaggactagatcatcaattgaaaatgcatgatttgaacactgatcaagaaaatcttgttgggacccatgatgcccctatcagatgtgttgaatactgtccagaagtgaatgtgatggtcactggaagttgggatcagacagttaaactgtgggatcccagaactccttgtaatgctgggaccttctctcagcctgaaaaggtatataccctctcagtgtctggagaccggctgattgtgggaacagcaggccgcagagtgttggtgtgggacttacggaacatgggttacgtgcagcagcgcagggagtccagcctgaaataccagactcgctgcatacgagcgtttccaaacaagcagggttatgtattaagctctattgaaggccgagtggcagttgagtatttggacccaagccctgaggtacagaagaagaagtatgccttcaaatgtcacagactaaaagaaaataatattgagcagatttacccagtcaatgccatttcttttcacaatatccacaatacatttgccacaggtggttctgatggctttgtaaatatttgggatccatttaacaaaaagcgactgtgccaattccatcggtaccccacgagcatcgcatcacttgccttcagtaatgatgggactacgcttgcaatagcgtcatcatatatgtatgaaatggatgacacagaacatcctgaagatggtatcttcattcgccaagtgacagatgcagaaacaaaacccaagtccacctaatcatcctgtgaaagtggtttctctatggaaagctttgtttgcttcctacaaatacatgcttattccttaagggatgtgttagagttactgtggatttctctgttttctgtcttacaagaaacttgtctatgtaccttaatactttgtttaggatgaggagtctttgtgtccctgtacagtagtctgacgtatttccccttctgtcccctagtaagcccagttgctgtatctgaacagtttgagctctttttgtaatatactctaaacctgttatttctgtgctaataaacgagatgcagaacccttgaa

SEQ ID NO: 112498 - DNA, 667 bp, Homo sapiens
  Payload ID: 2013
  Gene Symbol: BUB3
  Gene Name: BUB3 mitotic checkpoint protein
  ENST ID: ENST00000368859
  CDS Start-End: 85-522
gagtgttctgagggaagcaaggaggcggcggcggccgcagcgagtggcgagtagtggaaacgttgcttctgaggggagcccaagatgaccggttctaacgagttcaagctgaaccagccacccgaggatggcatctcctccgtgaagttcagccccaacacctcccagttcctgcttgtctcctcctgggacacgtccgtgcgtctctacgatgtgccggccaactccatgcggctcaagtaccagcacaccggcgccgtcctggactgcgccttctacgatccaacgcatgcctggagtggaggactagatcatcaattgaaaatgcatgatttgaacactgatcaagaaaatcttgttgggacccatgatgcccctatcagatgtgttgaatactgtccagaagtgaatgtgatggtcactggaagttgggatcagacagttaaactgtgggatcccagaactccttgtaatgctgggaccttctctcagcctgaaaaggtccacctaatcatcctgtgaaagtggtttctctatggaaagctttgtttgcttcctacaaatacatgcttattccttaagggatgtgttagagttactgtggatttctctgttttctgtcttacaagaaacttgtctatgtaccttaatactttgtttaggatga

SEQ ID NO: 112499 - DNA, 7828 bp, Homo sapiens
  Payload ID: 2013
  Gene Symbol: BUB3
  Gene Name: BUB3 mitotic checkpoint protein
  Uniprot ID: O43684
  ENST ID: ENST00000368865
  CDS Start-End: 210-1196
gggttgaccgatgctgggcagctgagcggaccaatcggccccctagactgagacgttggcgtttgaaatcagccaatggcaggtctacactggagcttcctctccgcctccttcgcctagcctgcgagtgttctgagggaagcaaggaggcggcggcggccgcagcgagtggcgagtagtggaaacgttgcttctgaggggagcccaagatgaccggttctaacgagttcaagctgaaccagccacccgaggatggcatctcctccgtgaagttcagccccaacacctcccagttcctgcttgtctcctcctgggacacgtccgtgcgtctctacgatgtgccggccaactccatgcggctcaagtaccagcacaccggcgccgtcctggactgcgccttctacgatccaacgcatgcctggagtggaggactagatcatcaattgaaaatgcatgatttgaacactgatcaagaaaatcttgttgggacccatgatgcccctatcagatgtgttgaatactgtccagaagtgaatgtgatggtcactggaagttgggatcagacagttaaactgtgggatcccagaactccttgtaatgctgggaccttctctcagcctgaaaaggtatataccctctcagtgtctggagaccggctgattgtgggaacagcaggccgcagagtgttggtgtgggacttacggaacatgggttacgtgcagcagcgcagggagtccagcctgaaataccagactcgctgcatacgagcgtttccaaacaagcagggttatgtattaagctctattgaaggccgagtggcagttgagtatttggacccaagccctgaggtacagaagaagaagtatgccttcaaatgtcacagactaaaagaaaataatattgagcagatttacccagtcaatgccatttcttttcacaatatccacaatacatttgccacaggtggttctgatggctttgtaaatatttgggatccatttaacaaaaagcgactgtgccaattccatcggtaccccacgagcatcgcatcacttgccttcagtaatgatgggactacgcttgcaatagcgtcatcatatatgtatgaaatggatgacacagaacatcctgaagatggtatcttcattcgccaagtgacagatgcagaaacaaaacccaagtcaccatgtacttgacaagatttcatttacttaagtgccatgttgatgataataaaacaattcgtactccccaatggtggatttattactattaaagaaaccagggaaaatattaattttaatattataacaacctgaaaataatggaaaagaggtttttgaatttttttttttaaataaacaccttcttaagtgcatgagatggtttgatggtttgctgcattaaaggtatttgggcaaacaaaattggagggcaagtgactgcagttttgagaatcagttttgaccttgatgattttttgtttccactgtggaaataaatgtttgtaaataagtgtaataaaaatccctttgcattctttctggaccttaaatggtagaggaaaaggctcgtgagccatttgtttcttttgctggttatagttgctaattctaaagctgcttcagactgcttcatgaggaggttaatctacaattaaacaatatttcctcttggccgtccattattttctgaagcagatggttcatcatttcctgggctgttaaacaaagcgaggttaaggttagactcttgggaatcagctagttttcaatcttattagggtgcagaaggaaaactaataagaaaacctcctaatatcattttgtgactgtaaacaattatttattagcaaacaattgatcccagaagggcaaattgtttgagtcagtaatgagctgagaaaagacagagcatatctgtgtatttggaaaaataattgtaacgtaattgcagtgcatttagacaggcatctatttggacctgtttctatctctaaatgaatttttggaaacattaatgaggtttacatatttctctgacatttatatagttcttatgtccatttcagttgaccagccgctggtgattaaagttaaaaagaaaaaaattatagtgagaatgagattcatttcaatgtaatgcactaaagcagaacacgaacttagcttggcctattctaggtagttccaaatagtatttttgttgtcaaactttaaaatttatattaatttgcaaatgtatgtctctgagtaggacttggacctttcctgagatttattttatccgtgatgtattttttttaattcttttgatacagagaagggtctttttttttttaagtatttcagtgaaaacttggtgtaagtctgaacccatcttttgaaatgtattttcttcattgcaggtccacctaatcatcctgtgaaagtggtttctctatggaaagctttgtttgcttcctacaaatacatgcttattccttaagggatgtgttagagttactgtggatttctctgttttctgtcttacaagaaacttgtctatgtaccttaatactttgtttaggatgaggagtctttgtgtccctgtacagtagtctgacgtatttccccttctgtcccctagtaagcccagttgctgtatctgaacagtttgagctctttttgtaatatactctaaacctgttatttctgtgctaataaacgagatgcagaacccttgaatgttggatgtttttgaatgttggtaattaatataatttacttaaaaaggcttgtgtaaggcaaaactcgtcatcacaggcatgttgggggatgacattttacctttaagtccactctccctcgtttaattgtctcctctgatgtgtgttggggattcagtcctgcataaagtgatttgttggagttcagccatttccctcatgcccccttgtgccctctcggtggatcagcagggcctttgagccaagtgtgcagcttcactcaggatgggcagagactatgtggcagcctctggggaccttttggctcagtgctttactagtgccagcgcagtagtgcttaggtagcttgtgcatccccgtgttgatgtagtcatagtccacacagagccaaataacagacccttctgtacttagccatcaaatactaaatcacagtgaagcccttgggaaggtaaataatgtaatagccagggactgatggtattagttctttagtgtgattatgtgcttctaaaagtccctaaccacttggttgaggacagaccataagtttaaaacattgtataagtgaaagaattaatatagtattgttataggtaaccaaattatagtaatgtggacttgtttttgaggtggtgagggagggcttattttgtggttccatctggatgtcctcttgtctctggaaatcaagtgtgcctccctgccatctctacataccccttaaccagctctccacaatttacttgtttatggttatagctaccttttccccaagttacccaggtgtagttaccttggccttctcattggtttccctcacccacattctttaagtgtctcttctgtttatcttttcttcctactgctaccatcccagggccttttgggtgaatgtggcagcctccaatttctgccttaagtcctccatctaatagagtagtgacttttgaaccttgtagttgtgacccaagtaagaaatacattttgaactacagttcagaacacagaggtcagtatattatacatgacagaaggatcctgaaatatgacttgcccttcttgcatgcgatgtatctggtgcatgtgtgcatttttttctttgctttttaagaaatcctggctatgtcaccttgaattgattttacaacaaatgcctgtcacctgtaatttgcaaaaactgcttgatcagattctaaaaaatttctaaaagatttttaaaaaatgtattctgatgtcatacttggaatcctccactgcttcctgttgctcatagtcacccttcagtgatttcataaggaggtgtgctgcttcccaagcttctagatcatcaggaaggggccgcggactgtaaggtgctctcagaagatgggactaacctttgttgggaatataaataagtggatgggatgggaagtgacagcaatatctggttctgagttctgttgtgtaaaaacttaaaggtatattagcaggttagcctttgttctgtgggagatccaggccttgttagaaggaccaaggccagaatgcccagtttagccttagcattcaaacccttcattgtttttcctccattatctgttaaactcctgctttgccaaaggtatcttctataccctaataacactagcttccttccctcagtggggactcaacgcacattagcctactgagagcttagatcactacaacgaatccttgtaaatttgtttaactcagttttccccaaattcatttaagccggttctactttttctggtcttgttcccacaatcattttaccttttaccactcccccagaaaacactggggttcttctcttacgctgagagccaggttactttcttcactatcactccgacgcttgtgttgattcccaaatctcagtctgcccagggtcattctctttctgaattgctctttcaggatttaatttgaatcctgcaaagtcctgttcaaggcccccttttccatgaagcccttcttccttgttgcagctcacaaataagtgtgccctttctcaaaacacgtatgaaacacctcctgcttgtatacctttagcagtagttcctcatattgcctggcatttaaacatttttgtatgcgtacatcttgctttcctacttaaagcaagagcaggaccacatctttttgtatgctctggcacatgactgttggaccactttgatattgctgaattatatagactccttttaaaataatttgaaatataattttggagtatagacatcttgtccagtgcactagacaggtgacctttggctttgttcattaagcatttagtgtcttagaagtgatatgtttactgcagaaaaatttggatagcatgcaaaaaatgaaacatactatcacaatcctatgatataacttaaaaatttctttatagcttcatggaggtatttgatgaaaattgtatatatttaaggtatataatgttttgatacatgtatacattgtgaaatgattaccacaaggaggttactaaacatctccatcaccttgttaaattgagttaaacaaatttacaagttgacaaattacatttacaaatttatgtaattttttacgctttttttttttctcctttttctggagaacggggtctcgctatactgcccaggcaggtctcgaactcctgggctcaagctatcctcccgcctcttgcctccctaagagctgggattataggcgtgagccaccccacccggcctatgtcatttttttatgtggtgagaataaataatctcagcaaatttcaagtatacaattcattattactaagatagccaccacactgtatgtcagggctccagaacttactcatctcataggaggcagctacttttaacattcttggtgtatatccatccttcaggattttctgtatatttctctaacagcaaaagtttttgttagctacatcatgtgaaatgcctgggtagacaaatttaaagatgttatttgggatggtgtgacttgcacaagccacacagcctgcatggtgtccactttgagggggatgcccatagctatacttagaagtcatcctctagagcaagcttgtccaatttgttgtccatgggccacatgctgcccaggatggctttgaaggtggcccaaaacaaattcataaacttttgtaaaacgtgagattttttgtgattttttttttttcgagacacagtctcgttctgtcgcccaggctggagtgcaagtggcgcgatctccgctcattgcaagctccgcctctcgggttcaagcaattctcctgcctcagccacccgagtagttgggattacaggcacccgccatcacgcccggctaatttttgtatttcttttagtagagaccgggtttcatcatgttggccaggttggtcttgaactcctgacttcaggtaatccgccctccttggtctcccaaagtgctgggatacaggcatgagccactgcacccagctgtgacttttttttttttaagctcatcagctattgtattagtgtattttatgtgtagctcaagacaattcttccagtgtggaccaggaaagccaaaagattggacacccctgccctagagcatctgacgcctggatacaaaagagcctgtggctatgactatcaggattctggccatgaggaattccatgacatggagggaaaatggcaacttcaaatttgcacccccaggtatcatgtgggcaggtgctccatgtggctggtgatagttgtgagtgagccttgcacgggctttccccctatcggctgttccagagcgagaggctgcaggtgtccacttacgtacctgtggctaagatgcgcctgagcaagtgagggccagttagtatacataatttttacaaaatttggatcatattacataaatatcttgcttcatgcacttaatatgaaattttgcccatgatttattttttaccttatttttaagggccacctagttagaatttgattatttgagcaactatttagtgcctgtgatgtgccagccactgctaggttctggggctcaaaacactgtgacagatgctgtgataccacaacgtggccacattttgttttcaagaccttggccaacctttggtcttcacagccactgccctggtagtaagggacttagttaagtttggtgactgcttgaagtctaagatcaccaaagtggctaatgcaggcactgtgacaatctgggcactaggaaaagcaatgtgggcagaaattccttgttcgagagccttctggttatactttaaaaagaagggagcctagcatcttgtcaaatctttgagcccactcactcagagggcctgtcactcatccagaattgaatctgctggtttaacaggtcaggcagtgtgatttgacagcgtgaatcttagagtccagcctttgaacctggcgctgaatcctgactttactgcttattcagggggccactagctaagttaatttgtgagcctgggcaacatggcgtgacccatctctacaaaagatacaaaaattaactggatgtggtggtgcatgcctgtagttcatagctactctggaggctgaggcgggaggataacctgagtgcgggaggttgaggttgcagtgagctgaagttgcaccactgcactccagcctaggtgacagagtgagaccttatcttaatctaaaaaataaaatttctgagccttattttcctcatctgtaaaatgaagagaatacctagctcatggagttaggaacaagtatgttaaatatttatcagagtgtgcctgacagtgagttgaaaatatctactctctttggatgaaaaatatttaacacttcactctcagatataattattagctgactttttagattcttttttcttttacatgatgtagttctcagatatatacgggatttctagttcttaaatgccagtattttttttctgttaaaatatttatgaactatttcaaacattcagaaaaactcaggatcatacccataaacccactgtttagattttaaaaagttcaatgtttttctgtattttatctcttcattttaaaataaagttttgcacatg

SEQ ID NO: 112500 - DNA, 895 bp, Homo sapiens
  Payload ID: 2013
  Gene Symbol: BUB3
  Gene Name: BUB3 mitotic checkpoint protein
  ENST ID: ENST00000407911
  CDS Start-End: 60-895
tgtcagtgcgcagccccagcccgcgggacccctggggactctgggcgcctgttctgcagatgaccggttctaacgagttcaagctgaaccagccacccgaggatggcatctcctccgtgaagttcagccccaacacctcccagttcctgcttgtctcctcctgggacacgtccgtgcgtctctacgatgtgccggccaactccatgcggctcaagtaccagcacaccggcgccgtcctggactgcgccttctacgatccaacgcatgcctggagtggaggactagatcatcaattgaaaatgcatgatttgaacactgatcaagaaaatcttgttgggacccatgatgcccctatcagatgtgttgaatactgtccagaagtgaatgtgatggtcactggaagttgggatcagacagttaaactgtgggatcccagaactccttgtaatgctgggaccttctctcagcctgaaaaggtatataccctctcagtgtctggagaccggctgattgtgggaacagcaggccgcagagtgttggtgtgggacttacggaacatgggttacgtgcagcagcgcagggagtccagcctgaaataccagactcgctgcatacgagcgtttccaaacaagcagggttatgtattaagctctattgaaggccgagtggcagttgagtatttggacccaagccctgaggtacagaagaagaagtatgccttcaaatgtcacagactaaaagaaaataatattgagcagatttacccagtcaatgccatttcttttcacaatatccacaatacatttgccacaggtggttctgatggctttgtaaatatttgggatccatttaacaaaaagcgactgtgccaattccatcggtaccccacgagcat

SEQ ID NO: 112501 - DNA, 2196 bp, Homo sapiens
  Payload ID: 2014
  Gene Symbol: BUD13
  Gene Name: BUD13 homolog
  Uniprot ID: Q9BRD0
  ENST ID: ENST00000260210
  CDS Start-End: 25-1884
cgtctctctgcccccgccgctgccatggcggcagctccgccgctttccaaggccgagtatctgaagcgttacttgtccggggcagatgccggcgtcgaccggggatctgagtccggtcgcaagcgtcgcaaaaagcggccgaagcctggcggggccggcggcaagggaatgcggattgtggatgatgatgtgagctggacagctatctccacaaccaaactagaaaaggaggaagaggaagatgatggagatttgcctgtggtggcagagtttgtggatgagcggccagaagaggtaaagcagatggaggcctttcgttccagtgccaaatggaagcttctgggaggccacaacgaagacctaccctcaaacagacattttcgtcacgataccccggattcatctcctaggagggtccgtcatggtaccccagatccatctcctaggaaggaccgtcatgacaccccggatccatctcctaggagggcccgtcatgacaccccggatccttctcccctcagaggggctcgtcatgactcagacacatctcctcccaggaggatccgtcatgactcctcagacacttcacccccaaggagggcccgtcatgattctccagatccttctcccccaaggaggcctcagcataattcttcaggtgcatctcctaggagagtccgtcatgattcaccagatccctctcctcctaggcgagcccgtcatggttcctcagatatctcttcccccagaagggtccataacaactcccctgacacatctaggaggactcttggctcttcagacacacagcaactcagaagggcccgtcatgactcccctgatttggctcctaatgtcacttattccctgcccagaaccaaaagtggtaaagccccagaaagagcctctagcaagacttctccacattggaaggagtcaggagcctcccatttgtcattcccaaagaacagcaaatatgagtatgaccctgacatctctcctccacgaaaaaagcaagcaaaatcccattttggagacaagaagcagcttgattccaaaggtgactgccagaaagcaactgattcagacctttcttctccacggcataaacaaagtccagggcaccaggattctgattcagatctgtcacctccacggaatagacctagacaccggagctctgattctgacctctctccaccaaggaggagacagaggaccaaatcttctgattctgacctgtccccgcctcgaaggagtcagcctcctggaaagaaggctgcacacatgtattctggggctaaaactgggttggtgttaactgacatacagcgagaacagcaggagctcaaggaacaggatcaagaaaccatggcatttgaagctgaatttcaatatgctgaaaccgtatttcgagataagtctggtcgtaagaggaatttgaaactcgaacgtttagagcaaaggaggaaagcagaaaaggactcagagagagatgagctgtatgcccagtggggaaaagggcttgcccagagccggcaacagcaacaaaatgtggaggatgcaatgaaagagatgcaaaagcctctggcccgctatattgatgacgaagatctggataggatgctaagagaacaggaaagagagggggaccctatggccaacttcatcaagaagaataaggccaaggagaacaagaataaaaaagtgagacctcgctacagtggtccagcacctcctcccaacagatttaatatctggcctggatatcgctgggacggagtggacagatccaatggatttgaacagaagcgctttgccaggcttgccagcaagaaggcagtggaggaacttgcctacaaatggagtgttgaggatatgtaactttcctgaggctgtgggggtggctgggctgtggtagtgggcataggcagcgagatatccagtggtaacagttgtctgtgctaataattggagcccacacagaccagcaacttgttgaatgccagttttgaccacagaagaatattcgagacctgatgtttggactgaggtacctgtacttcttgggtgtgacagcaccggctgttgctggctttcagaggaagcattgatttctcattgaccagggtttgttcttggtagggtttttctttttcttttttaaataaacatgtatttatttttttaaaatta

SEQ ID NO: 112502 - DNA, 1793 bp, Homo sapiens
  Payload ID: 2014
  Gene Symbol: BUD13
  Gene Name: BUD13 homolog
  Uniprot ID: Q9BRD0
  ENST ID: ENST00000375445
  CDS Start-End: 24-1481
gtctctctgcccccgccgctgccatggcggcagctccgccgctttccaaggccgagtatctgaagcgttacttgtccggggcagatgccggcgtcgaccggggatctgagtccggtcgcaagcgtcgcaaaaagcggccgaagcctggcggggccggcggcaagggaatgcggattgtggatgatgatgtgagctggacagctatctccacaaccaaactagaaaaggaggaagaggaagatgatggagatttgcctgtggtggcagagtttgtggatgagcggccagaagaggtaaagcagatggaggcctttcgttccagtgccaaatggaagcttctgggaggccacaacgaagacctaccctcaaacagacattttcgtcacgataccccggattcatctcctaggagggtccgtcatggtaccccagatccatctcctaggaaggaccgtcatgacaccccggatccatctcctaggagggcccgtcatgacaccccggatccttctcccctcagaggggctcgtcatgactcagacacatctcctcccaggaggatccgtcatgactcctcagacacttcacccccaaggagggcccgtcatgattctccagatccttctcccccaaggaggcctcagcataattcttcaggtgactgccagaaagcaactgattcagacctttcttctccacggcataaacaaagtccagggcaccaggattctgattcagatctgtcacctccacggaatagacctagacaccggagctctgattctgacctctctccaccaaggaggagacagaggaccaaatcttctgattctgacctgtccccgcctcgaaggagtcagcctcctggaaagaaggctgcacacatgtattctggggctaaaactgggttggtgttaactgacatacagcgagaacagcaggagctcaaggaacaggatcaagaaaccatggcatttgaagctgaatttcaatatgctgaaaccgtatttcgagataagtctggtcgtaagaggaatttgaaactcgaacgtttagagcaaaggaggaaagcagaaaaggactcagagagagatgagctgtatgcccagtggggaaaagggcttgcccagagccggcaacagcaacaaaatgtggaggatgcaatgaaagagatgcaaaagcctctggcccgctatattgatgacgaagatctggataggatgctaagagaacaggaaagagagggggaccctatggccaacttcatcaagaagaataaggccaaggagaacaagaataaaaaagtgagacctcgctacagtggtccagcacctcctcccaacagatttaatatctggcctggatatcgctgggacggagtggacagatccaatggatttgaacagaagcgctttgccaggcttgccagcaagaaggcagtggaggaacttgcctacaaatggagtgttgaggatatgtaactttcctgaggctgtgggggtggctgggctgtggtagtgggcataggcagcgagatatccagtggtaacagttgtctgtgctaataattggagcccacacagaccagcaacttgttgaatgccagttttgaccacagaagaatattcgagacctgatgtttggactgaggtacctgtacttcttgggtgtgacagcaccggctgttgctggctttcagaggaagcattgatttctcattgaccagggtttgttcttggtagggtttttctttttcttttttaaataaacatgtatttatttttttaaaatta

SEQ ID NO: 112503 - DNA, 947 bp, Homo sapiens
  Payload ID: 2014
  Gene Symbol: BUD13
  Gene Name: BUD13 homolog
  ENST ID: ENST00000419189
  CDS Start-End: 1-355
atctaggaggactcttggctcttcagacacacagcaactcagaagggcccgtcatgactcccctgatttggctcctaatgtcacttattccctgcccagaaccaaaagtggtaaagccccagaaagagcctctagcaagacttctccacattggaaggagtcaggagcctcccatttgtcattcccaaagaacagcaaatatgagtatgaccctgacatctctcctccacgaaaaaagcaagcaaaatcccattttggagacaagaagcagcttgattccaaagagccggcaacagcaacaaaatgtggaggatgcaatgaaagagatgcaaaagcctctggcccgctatattgatgacgaagatctggataggatgctaagagaacaggaaagagagggggaccctatggccaacttcatcaagaagaataaggccaaggagaacaagaataaaaaagtgagacctcgctacagtggtccagcacctcctcccaacagatttaatatctggcctggatatcgctgggacggagtggacagatccaatggatttgaacagaagcgctttgccaggcttgccagcaagaaggcagtggaggaacttgcctacaaatggagtgttgaggatatgtaactttcctgaggctgtgggggtggctgggctgtggtagtgggcataggcagcgagatatccagtggtaacagttgtctgtgctaataattggagcccacacagaccagcaacttgttgaatgccagttttgaccacagaagaatattcgagacctgatgtttggactgaggtacctgtacttcttgggtgtgacagcaccggctgttgctggctttcagaggaagcattgatttctcattgaccagggtttgttcttggtagggtttttctttttcttttttaaataaacatgtatttatttttttaaaatta

SEQ ID NO: 112504 - DNA, 1035 bp, Homo sapiens
  Payload ID: 2015
  Gene Symbol: BUD31
  Gene Name: BUD31 homolog
  Uniprot ID: P41223
  ENST ID: ENST00000222969
  CDS Start-End: 434-868
cagctacccaagctccaggagcttccggtatgtgttttccctctgttctcgattaccttggcaacggctgaggcgggagaccggtggtctgcaccgtcctggagggagatatgagtggctggactctcagccagccactgggatgtgttcgggctttggaccttgaggccggagagagctcccgagaggaggcggcgccacgttcgttcttctgaggggacggtagatttgggggttttcctctaggattctcgcgccgtttcctctgaagaaacaggaccagagagggaaggtgacctgaaagtcacagaataattttttagagctgaacaagaatccaagcctgcaactgcagagacgagagatctttctgctgtctatactcttggaaagcacatcctaagatctttgcagattatcctgtggaaggaaaatgcctaaagtcaaaagaagccggaaagcacccccagatggctgggagttgattgagccaacactggatgaattagatcaaaagatgagagaagctgaaacagaaccgcatgagggaaagaggaaagtggaatctctgtggcccatcttcaggatccaccaccagaaaacccgctacatcttcgacctcttttacaagcggaaagccatcagcagagaactctatgaatattgtattaaagaaggctatgcagacaaaaacctgattgcaaaatggaaaaagcaaggatatgagaacttgtgctgcctgcggtgcattcagacacgggacaccaacttcgggacgaactgcatctgccgcgtgcccaaaagcaagctggaagtgggccgcatcatcgagtgcacacactgtggctgtcgtggctgctctggctgaggctggcgcgctccaccctggactctggacttcgcaggttcctgcctgtcacgccacccccttcctgggagcagcgagcagtgccccaggcccgagttggagcacggtctctatggggaaggcttcgctgtctatcagctgtgatttgtaaaaataaaatctttaaa

SEQ ID NO: 112505 - DNA, 1139 bp, Homo sapiens
  Payload ID: 2015
  Gene Symbol: BUD31
  Gene Name: BUD31 homolog
  Uniprot ID: P41223
  ENST ID: ENST00000403633
  CDS Start-End: 530-964
gccgccgccgccgcttcagtggccgcagtggccgcaaggacccggacctcagggaggcctccgcacgaagtcggaccgtcctgcgcgccgcctaagtccaggcttgcccgtctgctgccaggcaacaacgcccctagtctctccgttcgggaagacgcgtggccctgcctgccacccaccggaagtgagggcaaatggcaacagcggctctggaattctatacaggcattgctgaggacacctaagatgacgcaatctccgcgcgggtagggcggggctccgcaaggacctcatgccttagagatcgcctgaagagcggaagccttctgtcgagaagcagctacccaagctccaggagcttccgaagaaacaggaccagagagggaaggtgacctgaaagtcacagaataattttttagagctgaacaagaatccaagcctgcaactgcagagacgagagatctttctgctgtctatactcttggaaagcacatcctaagatctttgcagattatcctgtggaaggaaaatgcctaaagtcaaaagaagccggaaagcacccccagatggctgggagttgattgagccaacactggatgaattagatcaaaagatgagagaagctgaaacagaaccgcatgagggaaagaggaaagtggaatctctgtggcccatcttcaggatccaccaccagaaaacccgctacatcttcgacctcttttacaagcggaaagccatcagcagagaactctatgaatattgtattaaagaaggctatgcagacaaaaacctgattgcaaaatggaaaaagcaaggatatgagaacttgtgctgcctgcggtgcattcagacacgggacaccaacttcgggacgaactgcatctgccgcgtgcccaaaagcaagctggaagtgggccgcatcatcgagtgcacacactgtggctgtcgtggctgctctggctgaggctggcgcgctccaccctggactctggacttcgcaggttcctgcctgtcacgccacccccttcctgggagcagcgagcagtgccccaggcccgagttggagcacggtctctatggggaaggcttcgctgtctatcagctgtgatttgtaaaaataaaatctttaaatctctcga

SEQ ID NO: 112506 - DNA, 519 bp, Homo sapiens
  Payload ID: 2015
  Gene Symbol: BUD31
  Gene Name: BUD31 homolog
  ENST ID: ENST00000456893
  CDS Start-End: 37-348
cccccagatctttgcagattatcctgtggaaggaaaatgcctaaagtcaaaagaagccggaaagcacccccagatggctgggagttgattgagccaacactggatgaattagatcaaaagatgagagaagaactctatgaatattgtattaaagaaggctatgcagacaaaaacctgattgcaaaatggaaaaagcaaggatatgagaacttgtgctgcctgcggtgcattcagacacgggacaccaacttcgggacgaactgcatctgccgcgtgcccaaaagcaagctggaagtgggccgcatcatcgagtgcacacactgtggctgtcgtggctgctctggctgaggctggcgcgctccaccctggactctggacttcgcaggttcctgcctgtcacgccacccccttcctgggagcagcgagcagtgccccaggcccgagttggagcacggtctctatggggaaggcttcgctgtctatcagctgtgatttgtaaaaataaaatctttaaatctc

SEQ ID NO: 112507 - DNA, 608 bp, Homo sapiens
  Payload ID: 2015
  Gene Symbol: BUD31
  Gene Name: BUD31 homolog
  ENST ID: ENST00000431419
  CDS Start-End: 125-472
agacagctgagcctgggaatcccaccaagacgcggagaccggtagtggccccaaatgccaggctgcactgatatttattggatacaagacaaaggggcaggataagcagtgtgaaccatctccaatgatagctgaaacagaaccgcatgagggaaagaggaaagtggaatctctgtggcccatcttcaggatccaccaccagaaaacccgctacatcttcgacctcttttacaagcggaaagccatcagcagagaactctatgaatattgtattaaagaaggctatgcagacaaaaacctgattgcaaaatggaaaaagcaaggatatgagaacttgtgctgcctgcggtgcattcagacacgggacaccaacttcgggacgaactgcatctgccgcgtgcccaaaagcaagctggaagtgggccgcatcatcgagtgcacacactgtggctgtcgtggctgctctggctgaggctggcgcgctccaccctggactctggacttcgcaggttcctgcctgtcacgccacccccttcctgggagcagcgagcagtgccccaggcccgagttggagcacggtctctatggggaaggcttcgctgtctatc

SEQ ID NO: 112508 - DNA, 889 bp, Homo sapiens
  Payload ID: 2015
  Gene Symbol: BUD31
  Gene Name: BUD31 homolog
  ENST ID: ENST00000427499
  CDS Start-End: 499-612
ccgcaaggacccggacctcagggaggcctccgcacgaagtcggaccgtcctgcgcgccgcctaagtccaggcttgcccgtctgctgccaggcaacaacgcccctagtctctccgttcgggaagacgcgtggccctgcctgccacccaccggaagtgagggcaaatggcaacagcggctctggaattctatacaggcattgctgaggacacctaagatgacgcaatctccgcgcgggtagggcggggctccgcaaggacctcatgccttagagatcgcctgaagagcggaagccttctgtcgagaagcagctacccaagctccaggagcttccgaagaaacaggaccagagagggaaggtgacctgaaagtcacagaataattttttagagctgaacaagaatccaagcctgcaactgcagagacgagagatctttctgctgtctatactcttggaaagcacatcctaagatctttgcagattatcctgtggaaggaaaatgcctaaagtcaaaagaagccggaaagcacccccagatggctgggagttgattgagccaacactggatgaattagatcaaaagatgagagaaggctgcagtgcagtggcgtgatctcggctcactgcaacctctgcctcccgtgttcaagtgattttcctgcctctcagcctctcgagtaatttggattacaggcatgcgccaccatgcccggctaatttttgtatttttagtagagatgggtttctccatgttggccaggctggtctcgaactcctggcctcaagtgatccacccacctcggcctcccaaagtgatgggattacagctgaaacagaaccgcatgagggaaagaggaaagtggaatctctgtggcccatcttcaggatcc

SEQ ID NO: 112509 - DNA, 1886 bp, Homo sapiens
  Payload ID: 2016
  Gene Symbol: BBOX1
  Gene Name: butyrobetaine (gamma), 2-oxoglutarate dioxygenase (gamma-butyrobetaine hydroxylase) 1
  Uniprot ID: O75936
  ENST ID: ENST00000263182
  CDS Start-End: 369-1532
aagaagtgaactgcttgttcacttgctgctgttgccactgctggtacagaaatagaaggtaagacagcacaaaaaaacaaagacaaaaaacctccaagctcccttcagtagttgctacaccttcagattgagacatccttcctcatttacaaacctcagctgtgtctgggggcagggccacagtgaaactgccaggagcaaaaaggcttccaagaaaaagtaccacatcagattggaaactggggacagatcattcctgggatgtgacgggcaccagaatgctccctctccaaaggatctaaggaccaaagctgacagtttctttacttgcaggtagctgacagcatctactcctgaagaccggaaacatggcttgtaccatccaaaaggcagaagcacttgacggggctcatttgatgcagatcctctggtatgatgaggaagagtctctctacccagctgtatggttgagagacaactgtccgtgctctgattgctacctggattctgcaaaagcacggaaacttctagtggaagctcttgatgtgaacattggaattaaaggcttgatatttgacagaaaaaaggtgtacatcacatggcccgatgagcattacagtgaattccaggctgattggctgaagaaaagatgcttttccaagcaggccagagcaaagctccaaagagaattgttttttccagaatgccaatactggggctcagagctccagctacccactttggattttgaagatgttttaagatatgatgaacacgcatacaagtggctctccaccctcaagaaagtaggcatagtaagactcaccggagcatctgacaaaccaggagaagtttcaaaacttgggaaaaggatgggtttcctctatctcacattttatggacatacttggcaagtgcaagacaaaatcgatgcaaacaatgtggcttacacaactgggaagctaagctttcacactgattatccagccctccatcatccacctggggttcagcttcttcactgcataaagcaaacagtcacagggggtgattcagaaattgtagatgggtttaatgtgtgccaaaaactaaagaaaaataatcctcaggcattccagattttgtcctctacctttgtggactttacagacattggagtggattactgtgatttttctgtacaatcaaaacataaaattatagagttagatgataaaggccaagtggttcgcatcaacttcaataacgcaactagggacacaatatttgatgtgcctgttgaaagagttcagcctttttatgctgctctgaaggagtttgttgacctcatgaacagcaaagaatccaagtttaccttcaagatgaatccaggtgatgtgattacttttgataactggcgcttacttcatggccgacgtagctatgaagcaggaactgagatatcccgccatctagaaggagcttatgctgactgggatgtggtcatgtcaaggcttcgtatcttaaggcagagggtggagaatggaaactgaagtcacctgtagataattttaataagattccaatgaccatattttgtgagatatggcacattattcacagaccatgatctttgtgatttacatataatttccttaacaatgaacatgtaacttctctcacaagagtactctttactttgtaatcatatacaatgtcaactttttagatgtttcaccactcttttgcaaataaagcatcctttctgctctgttgcatgcctgctctaatttcttttgcccatatatgagtatctccagaatgtctacaaatagtttttgtagcaaatgaaaatttcttcaaataagccttttgtttcaaataaaacttgtctcaaaacatgcttc

SEQ ID NO: 112510 - DNA, 1596 bp, Homo sapiens
  Payload ID: 2016
  Gene Symbol: BBOX1
  Gene Name: butyrobetaine (gamma), 2-oxoglutarate dioxygenase (gamma-butyrobetaine hydroxylase) 1
  Uniprot ID: O75936
  ENST ID: ENST00000525090
  CDS Start-End: 215-1378
acagtatgtgaaatactctcaccagaacaaaggtcccagcgtcaataagtcaaaccgcagactctgacagctgagtgaatagcagaggccagagtccacttgaagtgttcacactctcagaggccaagtttagatcttatctgcctgagattccttttaacactgatttgtcatagcaggtagctgacagcatctactcctgaagaccggaaacatggcttgtaccatccaaaaggcagaagcacttgacggggctcatttgatgcagatcctctggtatgatgaggaagagtctctctacccagctgtatggttgagagacaactgtccgtgctctgattgctacctggattctgcaaaagcacggaaacttctagtggaagctcttgatgtgaacattggaattaaaggcttgatatttgacagaaaaaaggtgtacatcacatggcccgatgagcattacagtgaattccaggctgattggctgaagaaaagatgcttttccaagcaggccagagcaaagctccaaagagaattgttttttccagaatgccaatactggggctcagagctccagctacccactttggattttgaagatgttttaagatatgatgaacacgcatacaagtggctctccaccctcaagaaagtaggcatagtaagactcaccggagcatctgacaaaccaggagaagtttcaaaacttgggaaaaggatgggtttcctctatctcacattttatggacatacttggcaagtgcaagacaaaatcgatgcaaacaatgtggcttacacaactgggaagctaagctttcacactgattatccagccctccatcatccacctggggttcagcttcttcactgcataaagcaaacagtcacagggggtgattcagaaattgtagatgggtttaatgtgtgccaaaaactaaagaaaaataatcctcaggcattccagattttgtcctctacctttgtggactttacagacattggagtggattactgtgatttttctgtacaatcaaaacataaaattatagagttagatgataaaggccaagtggttcgcatcaacttcaataacgcaactagggacacaatatttgatgtgcctgttgaaagagttcagcctttttatgctgctctgaaggagtttgttgacctcatgaacagcaaagaatccaagtttaccttcaagatgaatccaggtgatgtgattacttttgataactggcgcttacttcatggccgacgtagctatgaagcaggaactgagatatcccgccatctagaaggagcttatgctgactgggatgtggtcatgtcaaggcttcgtatcttaaggcagagggtggagaatggaaactgaagtcacctgtagataattttaataagattccaatgaccatattttgtgagatatggcacattattcacagaccatgatctttgtgatttacatataatttccttaacaatgaacatgtaacttctctcacaagagtactctttactttgtaatcatatacaatgtcaactttttagatgtttcaccactcttttgcaaataaagcatcctttctgctc

SEQ ID NO: 112511 - DNA, 1724 bp, Homo sapiens
  Payload ID: 2016
  Gene Symbol: BBOX1
  Gene Name: butyrobetaine (gamma), 2-oxoglutarate dioxygenase (gamma-butyrobetaine hydroxylase) 1
  Uniprot ID: O75936
  ENST ID: ENST00000528583
  CDS Start-End: 205-1368
tctgggggcagggccacagtgaaactgccaggagcaaaaaggcttccaagaaaaagtaccacatcagattggaaactggggacagatcattcctgggatgtgacgggcaccagaatgctccctctccaaaggatctaaggaccaaagctgacagtttctttacttgcaggtagctgacagcatctactcctgaagaccggaaacatggcttgtaccatccaaaaggcagaagcacttgacggggctcatttgatgcagatcctctggtatgatgaggaagagtctctctacccagctgtatggttgagagacaactgtccgtgctctgattgctacctggattctgcaaaagcacggaaacttctagtggaagctcttgatgtgaacattggaattaaaggcttgatatttgacagaaaaaaggtgtacatcacatggcccgatgagcattacagtgaattccaggctgattggctgaagaaaagatgcttttccaagcaggccagagcaaagctccaaagagaattgttttttccagaatgccaatactggggctcagagctccagctacccactttggattttgaagatgttttaagatatgatgaacacgcatacaagtggctctccaccctcaagaaagtaggcatagtaagactcaccggagcatctgacaaaccaggagaagtttcaaaacttgggaaaaggatgggtttcctctatctcacattttatggacatacttggcaagtgcaagacaaaatcgatgcaaacaatgtggcttacacaactgggaagctaagctttcacactgattatccagccctccatcatccacctggggttcagcttcttcactgcataaagcaaacagtcacagggggtgattcagaaattgtagatgggtttaatgtgtgccaaaaactaaagaaaaataatcctcaggcattccagattttgtcctctacctttgtggactttacagacattggagtggattactgtgatttttctgtacaatcaaaacataaaattatagagttagatgataaaggccaagtggttcgcatcaacttcaataacgcaactagggacacaatatttgatgtgcctgttgaaagagttcagcctttttatgctgctctgaaggagtttgttgacctcatgaacagcaaagaatccaagtttaccttcaagatgaatccaggtgatgtgattacttttgataactggcgcttacttcatggccgacgtagctatgaagcaggaactgagatatcccgccatctagaaggagcttatgctgactgggatgtggtcatgtcaaggcttcgtatcttaaggcagagggtggagaatggaaactgaagtcacctgtagataattttaataagattccaatgaccatattttgtgagatatggcacattattcacagaccatgatctttgtgatttacatataatttccttaacaatgaacatgtaacttctctcacaagagtactctttactttgtaatcatatacaatgtcaactttttagatgtttcaccactcttttgcaaataaagcatcctttctgctctgttgcatgcctgctctaatttcttttgcccatatatgagtatctccagaatgtctacaaatagtttttgtagcaaatgaaaatttcttcaaataagccttttgtttcaaataaaacttgtctcaaaacatgcttcta

SEQ ID NO: 112512 - DNA, 703 bp, Homo sapiens
  Payload ID: 2016
  Gene Symbol: BBOX1
  Gene Name: butyrobetaine (gamma), 2-oxoglutarate dioxygenase (gamma-butyrobetaine hydroxylase) 1
  ENST ID: ENST00000533566
  CDS Start-End: 498-703
gacaagtagataccacttcacctctgctagggtgagcgctggtagctcctccctgttaaatgcccatctcaatgcctctgccctaagtgagttgtgcaataaatgagctgtcactctgaacaggtgggaaagaagtgaactgcttgttcacttgctgctgttgccactgctggtacagaaatagaaggtaagacagcacaaaaaaacaaagacaaaaaacctccaagctcccttcagtagttgctacaccttcagattgagacatccttcctcatttacaaacctcagctgtgtctgggggcagggccacagtgaaactgccaggagcaaaaaggcttccaagaaaaagtaccacatcagattggaaactggggacagatcattcctgggatgtgacgggcaccagaatgctccctctccaaaggatctaaggaccaaagctgacagtttctttacttgcaggtagctgacagcatctactcctgaagaccggaaacatggcttgtaccatccaaaaggcagaagcacttgacggggctcatttgatgcagatcctctggtatgatgaggaagagtctctctacccagctgtatggttgagagacaactgtccgtgctctgattgctacctggattctgcaaaagcacggaaacttctagtggaagctcttgatgtgaacattggaattaaaggcttgatatt

SEQ ID NO: 112513 - DNA, 1725 bp, Homo sapiens
  Payload ID: 2016
  Gene Symbol: BBOX1
  Gene Name: butyrobetaine (gamma), 2-oxoglutarate dioxygenase (gamma-butyrobetaine hydroxylase) 1
  Uniprot ID: O75936
  ENST ID: ENST00000529202
  CDS Start-End: 340-1503
gcagagaaaggagggcatcaagcttaggggaccaatccctgtctttctaccagtccctgataactactcaagctccctttaaagaggctcatattggaatactctgttgacaagtagataccacttcacctctgctagggtgagcgctggtagctcctccctgttaaatgcccatctcaatgcctctgccctaagtgagttgtgcaataaatgagctgtcactctgaacaggtgggaaagaagtgaactgcttgttcacttgctgctgttgccactgctggtacagaaatagaaggtaagacaggtagctgacagcatctactcctgaagaccggaaacatggcttgtaccatccaaaaggcagaagcacttgacggggctcatttgatgcagatcctctggtatgatgaggaagagtctctctacccagctgtatggttgagagacaactgtccgtgctctgattgctacctggattctgcaaaagcacggaaacttctagtggaagctcttgatgtgaacattggaattaaaggcttgatatttgacagaaaaaaggtgtacatcacatggcccgatgagcattacagtgaattccaggctgattggctgaagaaaagatgcttttccaagcaggccagagcaaagctccaaagagaattgttttttccagaatgccaatactggggctcagagctccagctacccactttggattttgaagatgttttaagatatgatgaacacgcatacaagtggctctccaccctcaagaaagtaggcatagtaagactcaccggagcatctgacaaaccaggagaagtttcaaaacttgggaaaaggatgggtttcctctatctcacattttatggacatacttggcaagtgcaagacaaaatcgatgcaaacaatgtggcttacacaactgggaagctaagctttcacactgattatccagccctccatcatccacctggggttcagcttcttcactgcataaagcaaacagtcacagggggtgattcagaaattgtagatgggtttaatgtgtgccaaaaactaaagaaaaataatcctcaggcattccagattttgtcctctacctttgtggactttacagacattggagtggattactgtgatttttctgtacaatcaaaacataaaattatagagttagatgataaaggccaagtggttcgcatcaacttcaataacgcaactagggacacaatatttgatgtgcctgttgaaagagttcagcctttttatgctgctctgaaggagtttgttgacctcatgaacagcaaagaatccaagtttaccttcaagatgaatccaggtgatgtgattacttttgataactggcgcttacttcatggccgacgtagctatgaagcaggaactgagatatcccgccatctagaaggagcttatgctgactgggatgtggtcatgtcaaggcttcgtatcttaaggcagagggtggagaatggaaactgaagtcacctgtagataattttaataagattccaatgaccatattttgtgagatatggcacattattcacagaccatgatctttgtgatttacatataatttccttaacaatgaacatgtaacttctctcacaagagtactctttactttgtaatcatatacaatgtcaactttttagatgtttcaccactcttttgcaaataaagcatcctttctgctctgtt

SEQ ID NO: 112514 - DNA, 2895 bp, Homo sapiens
  Payload ID: 2017
  Gene Symbol: BTN1A1
  Gene Name: butyrophilin, subfamily 1, member A1
  Uniprot ID: Q13410
  ENST ID: ENST00000244513
  CDS Start-End: 67-1647
atctcctaggctgaagctcctgaggggactcacatcagttatcttgctgctccagaagggtgggagatggcagttttcccaagctccggtctccccagatgtctgctcaccctcattctcctccagctgcccaaactggattcagctccctttgacgtgattggacccccggagcccatcctggccgttgtgggtgaggacgccgagctgccctgtcgcctgtctccgaacgcgagcgccgagcacttggagctacgctggttccgaaagaaggtttcgccggccgtgctggtgcatagggacgggcgcgagcaggaagccgagcagatgcccgagtaccgcgggcgggcgacgctggtccaggacggcatcgccaaggggcgcgtggccttgaggatccgtggcgtcagagtctctgacgacggggagtacacgtgctttttcagggaggatggaagctacgaagaagccctggtgcatctgaaggtggctgctctgggctctgaccctcacatcagtatgcaagttcaagagaatggagaaatctgtctggagtgcacctcagtgggatggtacccagagccccaggtgcagtggagaacttccaagggagagaagtttccatctacatcagagtccaggaatcctgatgaagaaggtttgttcactgtggctgcttcagtgatcatcagagacacttctgcgaaaaatgtgtcctgctacatccagaatctccttcttggccaggagaagaaagtagaaatatccataccagcttcctccctcccaaggctgactccctggatagtggctgtggctgtcatcctgatggttctaggacttctcaccattgggtccatatttttcacttggagactatacaacgaaagacccagagagaggaggaatgaattcagctctaaagagagactcctggaagaactcaaatggaaaaaggctaccttgcatgcagttgatgtgactctggacccagacacagctcatccccacctctttctttatgaggattcaaaatctgttcgactggaagattcacgtcagaaactgcctgagaaaacagagagatttgactcctggccctgtgtgttgggccgtgagaccttcacctcaggaaggcattactgggaggtggaggtgggagacaggactgactgggcaatcggcgtgtgtagggagaatgtgatgaagaaaggatttgaccccatgactcctgagaatgggttctgggctgtagagttgtatggaaatgggtactgggccctcactcctctccggacccctctcccattggcagggcccccacgccgggttgggattttcctagactatgaatcaggagacatctccttctacaacatgaatgatggatctgatatctatactttctccaatgtcactttctctggccccctccggcccttcttttgcctatggtctagcggtaaaaagcccctgaccatctgcccaattgctgatgggcctgagagggtcacagtcattgctaatgcccaggacctttctaaggagatcccattgtcccccatgggggaggactctgcccctagggatgcagacactctccattctaagctaatccctacccaacccagccaaggggcaccttaaggaatatctcagctcatctgttttcctttcctctaacccctctcctccatagccttctgaggcttcacctgctagctttacccagtctgtttcttcctgttgggtggcaattaattaatcctgtgaaggttacattgctgctgctagagagggtggggattgcaccttccaaatctgtttctgtaccaatatttgggggatggaggggtgactcaaactgcttctagtgttctcctaatcccttaagactagaacctataggaaactacttggagcaaactcaaaggacagattagggatcgagattgggtcaggttagcatggggttgtggttgaaatatcttggtatccaggataagggtatgtggaaaaacaggctttaggcaagtggaaaattcaaaatgtgctgtgaaaggacaatctcaggctgaaatcccataaaggaacttggagggaatattatgatggagggaagtgaggtgaatccaggcacatgatgaacacctggctcatccatagagttttcacagcctatatcgcaaattttctaagccacgtcctataggacagaggagactggccccacttctatgggtctgagctgtggaaaagggagagcagagaggaactgagatgagcagggatgaagggtcaggcagaaagcgtgatagaggagagaatttttgacaaaactcaaaagttgtttgcacagctgttctttgtaccctgttcctttctctgcgccctcctgtttctcccttgcctggaagtcattccaccctcaatttgttgatccacaagtttccagttgtcctcttctttttgttatagcatctctctatttcaaagacattcctagaagtcatccttcagtgatatcaccacttgctcagtcaccatctcaaccttatgtcacctcagccctcatctcaatgcccaaaccccttacacacaccttcagttagcttcaactgcctccgtttccacactgtgcacctttcactttccctacccagctttcctacatgctgcctctcctcagggtcccctgaatgctgcatcattgtgttcagtgcagctggactgattgcacctgtgtatttgcccctgagcactttcctttacacatgtggcttgtcttgccaatagactccaggcttataccttccatttccatcgtattctccagtttccaggatagacgttgctcatcgtctttacctaataaataagtttgtctgattgctg

SEQ ID NO: 112515 - DNA, 2266 bp, Homo sapiens
  Payload ID: 2017
  Gene Symbol: BTN1A1
  Gene Name: butyrophilin, subfamily 1, member A1
  ENST ID: ENST00000613186
  CDS Start-End: 21-1505
ctgctccagaagggtgggagatggcagttttcccaagctccggtctccccagatgtctgctcaccctcattctcctccagctgcccaaactggattcagctccctttgacgtgattggacccccggagcccatcctggccgttgtgggtgaggacgccgagctgccctgtcgcctgtctccgaacgcgagcgccgagcacttggagctacgctggttccgaaagaaggtttcgccggccgtgctggtgcatagggacgggcgcgagcaggaagccgagcagatgcccgagtaccgcgggcgggcgacgctggtccaggacggcatcgccaaggggcgcgtggccttgaggatccgtggcgtcagagtctctgacgacggggagtacacgtgctttttcagggaggatggaagctacgaagaagccctggtgcatctgaaggtggctgctctgggctctgaccctcacatcagtatgcaagttcaagagaatggagaaatctgtctggagtgcacctcagtgggatggtacccagagccccaggtgcagtggagaacttccaagggagagaagtttccatctacatcagagtccaggaatcctgatgaagaaggtttgttcactgtggctgcttcagtgatcatcagagacacttctgcgaaaaatgtgtcctgctacatccagaatctccttcttggccaggagaagaaagtagaaatatccataccagcttcctccctcccaaggctgactccctggatagtggctgtggctgtcatcctgatggttctaggacttctcaccattgggtccatatttttcacttggagactatacaacgaaagacccagagagaggaggaatgaattcagctctaaagagagactcctggaagaactcaaatggaaaaaggctaccttgcatgcagttgatgtgactctggacccagacacagctcatccccacctctttctttatgaggattcaaaatctgttcgactggaagattcacgtcagaaactgcctgagaaaacagagagatttgactcctggccctgtgtgttgggccgtgagaccttcacctcaggaaggcattactgggaggtggaggtgggagacaggactgactgggcaatcggcgtgtgtagggagaatgtgatgaagaaaggatttgaccccatgactcctgagaatgggttctgggctgtagagttgtatggaaatgggtactgggccctcactcctctccggacccctctcccattggcagggcccccacgccgggttgggattttcctagactatgaatcaggagacatctccttctacaacatgaatgatggatctgatatctatactttctccaatgtcacagtcattgctaatgcccaggacctttctaaggagatcccattgtcccccatgggggaggactctgcccctagggatgcagacactctccattctaagctaatccctacccaacccagccaaggggcaccttaaggaatatctcagctcatctgttttcctttcctctaacccctctcctccatagccttctgaggcttcacctgctagctttacccagtctgtttcttcctgttgggtggcaattaattaatcctgtgaaggttacattgctgctgctagagagggtggggattgcaccttccaaatctgtttctgtaccaatatttgggggatggaggggtgactcaaactgcttctagtgttctcctaatcccttaagactagaacctataggaaactacttggagcaaactcaaaggacagattagggatcgagattgggtcaggttagcatggggttgtggttgaaatatcttggtatccaggataagggtatgtggaaaaacaggctttaggcaagtggaaaattcaaaatgtgctgtgaaaggacaatctcaggctgaaatcccataaaggaacttggagggaatattatgatggagggaagtgaggtgaatccaggcacatgatgaacacctggctcatccatagagttttcacagcctatatcgcaaattttctaagccacgtcctataggacagaggagactggccccacttctatgggtctgagctgtggaaaagggagagcagagaggaactgagatgagcagggatgaagggtcaggcagaaagcgtgatagaggagagaatttttgacaaaactcaaaagttgtttgcacagctgttctttgtaccctgttcctttctctgcgccctcctgtttctccctt

SEQ ID NO: 112516 - DNA, 2920 bp, Homo sapiens
  Payload ID: 2018
  Gene Symbol: BTN2A1
  Gene Name: butyrophilin, subfamily 2, member A1
  Uniprot ID: Q7KYR7
  ENST ID: ENST00000312541
  CDS Start-End: 249-1832
actcttgggactgtggaagcccaggagaccagatttcgtttcctgcatctccaaacatggcgacctaggagaaggggaagaacaattttttctcctcttttgggaaggtttgtgtctagtagtgcctgtgcccctgggcagattggagagaagagggacgactggagaatcgtcgagaaccagcggagaaaagaaaaagcaacgtttaattctagaaggcctcctgtccctgcctgctctgggtgctcatggaatcagctgctgccctgcacttctcccggccagcctccctcctcctcctcctcctcagcctgtgtgcactggtctcagcccagtttattgtcgtggggcccactgatcccatcttggccacggttggagaaaacactacgttacgctgccatctgtcacccgagaaaaatgctgaggacatggaggtgcggtggttccggtctcagttctcccccgcagtgtttgtgtataaaggtggcagagagagaacagaggagcagatggaggagtaccgaggaagaaccacctttgtgagcaaagacatcagcaggggcagcgtggccctggtcatacacaacatcacagcccaggaaaacggcacctaccgctgttacttccaagaaggcaggtcctacgatgaggccatcctgcacctcgtagtggcaggactaggctctaagcccctcatttcaatgaggggccatgaagacgggggcatccggctggagtgcatatctagagggtggtacccaaagcccctcacagtgtggagggacccctacggtggggttgcgcctgccctgaaagaggtctccatgcctgatgcagacggcctcttcatggtcaccacggctgtgatcatcagagacaagtctgtgaggaacatgtcctgctctatcaacaacaccctgctcggccagaagaaagaaagtgtcatttttattccagaatcctttatgcccagtgtgtctccctgtgcagtggccctgcctatcattgtggttattctgatgatacccattgccgtatgcatctattggatcaacaaactccaaaaggaaaaaaagattctgtcaggggaaaaggagtttgaacgggaaacaagagaaattgctctaaaggaactggagaaagaacgtgtgcaaaaagaggaagaacttcaagtaaaagagaaacttcaagaagaattgcgatggagaagaacattcttacatgctgttgatgtggtcctggatccagacaccgctcatcccgatctcttcctgtcagaggaccggagaagtgtgagaaggtgccccttcaggcacctaggggagagcgtgcctgacaacccagagagattcgacagtcagccttgtgtcctaggccgggagagcttcgcttcagggaaacattactgggaggtggaggtggaaaacgtgattgagtggactgtgggggtctgtagagacagtgttgagaggaaaggggaggtcctgctgattcctcagaatggcttctggaccttggagatgcataaagggcaataccgggccgtgtcctcccctgataggattctccctttgaaggagtccctttgccgggtgggcgtcttcctggactatgaagctggagatgtctccttctacaacatgagggacagatcgcacatctacacatgtccccgttcagccttttccgtgcctgtgaggcccttcttcaggttggggtgtgaggacagccccatcttcatctgccctgcactcacaggagccaatggggtcacggtgcctgaagagggcctgacacttcacagagtggggacccaccagagcctatagaatcaattccttggtctcacagccatgtagacaagccctggtcatctcagcagccaccgcacaacacccctggtggaagacacgccctcctcccctctggtcacacaagagaacatcttccagctgcctctttcacacccactacagacctcagccccagttttctcctcctcactaggctgtgtttttagtagttcctttgcttgtaactatgggatgggatccaggcatagggaactagttgttacacagctcccagccaagaagaaagtgtgagaagttgatgggcagcaaacctgctgtttaacatcagggtgaccacattaagcccagtattccagttggcaccagaagatatggacttggaatgaggcctacagggttcaccaggatgtaagaggagagaggaatccacaggaccaccagagaggagagggaaccagatatgcagatcagagatagaggaagtggaaccagagagctgggagggaccaaggttgtaagggtggctaagtcccaccataacagctaaggggacctgggagatgatggctcatttccacccagccccaggatttccagagcgcacatccacaggcctggacctgggatgaagatgaatgaagaacatggatgcacgtggatgtagtttggctcaggtgtccctgcagttggcaaggagtcagtactcagtccctgagtgtggctgaaatttgaggtcctggctgagccaaggagtaatggaccagatctacctcagtattcaagttcagtggggacaccagtggcttcaaacttcctggtttcatgatatcttgagacgccttacaaatgatggaggattccaaagagtttttgtttatttgggttaatatttgttggtatttatggcatttgagattgaaactaagaaatgttttaatttattacctttacaacatttatttacattacatacatacatttacaacatttattaatttatattaaaatagcatgaataagccaattataggttaatataagtagaatgtttgtgaaaaataagtatggtatccaaagcaaaataaattttattgtgaagtgtg

SEQ ID NO: 112517 - DNA, 2989 bp, Homo sapiens
  Payload ID: 2018
  Gene Symbol: BTN2A1
  Gene Name: butyrophilin, subfamily 2, member A1
  ENST ID: ENST00000377600
  CDS Start-End: 252-707
ggaactcttgggactgtggaagcccaggagaccagatttcgtttcctgcatctccaaacatggcgacctaggagaaggggaagaacaattttttctcctcttttgggaaggtttgtgtctagtagtgcctgtgcccctgggcagattggagagaagagggacgactggagaatcgtcgagaaccagcggagaaaagaaaaagcaacgtttaattctagaaggcctcctgtccctgcctgctctgggtgctcatggaatcagctgctgccctgcacttctcccggccagcctccctcctcctcctcctcctcagcctgtgtgcactggtctcagcccagtttattgtcgtggggcccactgatcccatcttggccacggttggagaaaacactacgttacgctgccatctgtcacccgagaaaaatgctgaggacatggaggtgcggtggttccggtctcagttctcccccgcagtgtttgtgtataaaggtggcagagagagaacagaggagcagatggaggagtaccgaggaagaaccacctttgtgagcaaagacatcagcaggggcagcgtggccctggtcatacacaacatcacagcccaggaaaacggcacctaccgctgttacttccaagaaggcaggtcctacgatgaggccatcctgcacctcgtagtggcagagcttctggaagctgaggtctactgagaagtcgtcccagaagcagaaagtgaaatccaaaacctgcctgtttgaagttggagtcgacacacccatctcaaagactaggctctaagcccctcatttcaatgaggggccatgaagacgggggcatccggctggagtgcatatctagagggtggtacccaaagcccctcacagtgtggagggacccctacggtggggttgcgcctgccctgaaagaggtctccatgcctgatgcagacggcctcttcatggtcaccacggctgtgatcatcagagacaagtctgtgaggaacatgtcctgctctatcaacaacaccctgctcggccagaagaaagaaagtgtcatttttattccagaatcctttatgcccagtgtgtctccctgtgcagtggccctgcctatcattgtggttattctgatgatacccattgccgtatgcatctattggatcaacaaactccaaaaggaaaaaaagattctgtcaggggaaaaggagtttgaacgggaaacaagagaaattgctctaaaggaactggagaaagaacgtgtgcaaaaagaggaagaacttcaagtaaaagagaaacttcaagaagaattgcgatggagaagaacattcttacatgctgttgatgtggtcctggatccagacaccgctcatcccgatctcttcctgtcagaggaccggagaagtgtgagaaggtgccccttcaggcacctaggggagagcgtgcctgacaacccagagagattcgacagtcagccttgtgtcctaggccgggagagcttcgcttcagggaaacattactgggaggtggaggtggaaaacgtgattgagtggactgtgggggtctgtagagacagtgttgagaggaaaggggaggtcctgctgattcctcagaatggcttctggaccttggagatgcataaagggcaataccgggccgtgtcctcccctgataggattctccctttgaaggagtccctttgccgggtgggcgtcttcctggactatgaagctggagatgtctccttctacaacatgagggacagatcgcacatctacacatgtccccgttcagccttttccgtgcctgtgaggcccttcttcaggttggggtgtgaggacagccccatcttcatctgccctgcactcacaggagccaatggggtcacggtgcctgaagagggcctgacacttcacagagtggggacccaccagagcctatagaatcaattccttggtctcacagccatgtagacaagccctggtcatctcagcagccaccgcacaacacccctggtggaagacacgccctcctcccctctggtcacacaagagaacatcttccagctgcctctttcacacccactacagacctcagccccagttttctcctcctcactaggctgtgtttttagtagttcctttgcttgtaactatgggatgggatccaggcatagggaactagttgttacacagctcccagccaagaagaaagtgtgagaagttgatgggcagcaaacctgctgtttaacatcagggtgaccacattaagcccagtattccagttggcaccagaagatatggacttggaatgaggcctacagggttcaccaggatgtaagaggagagaggaatccacaggaccaccagagaggagagggaaccagatatgcagatcagagatagaggaagtggaaccagagagctgggagggaccaaggttgtaagggtggctaagtcccaccataacagctaaggggacctgggagatgatggctcatttccacccagccccaggatttccagagcgcacatccacaggcctggacctgggatgaagatgaatgaagaacatggatgcacgtggatgtagtttggctcaggtgtccctgcagttggcaaggagtcagtactcagtccctgagtgtggctgaaatttgaggtcctggctgagccaaggagtaatggaccagatctacctcagtattcaagttcagtggggacaccagtggcttcaaacttcctggtttcatgatatcttgagacgccttacaaatgatggaggattccaaagagtttttgtttatttgggttaatatttgttggtatttatggcatttgagattgaaactaagaaatgttttaatttattacctttacaacatttatttacattacatacatacatttacaacatttattaatttatattaaaatagcatgaataagccaattataggttaatataagtagaatgtttgtgaaaaataagtatgg

SEQ ID NO: 112518 - DNA, 3113 bp, Homo sapiens
  Payload ID: 2018
  Gene Symbol: BTN2A1
  Gene Name: butyrophilin, subfamily 2, member A1
  Uniprot ID: Q7KYR7
  ENST ID: ENST00000429381
  CDS Start-End: 213-1217
cgtttcctgcatctccaaacatggcgacctaggagaaggggaagaacaattttttctcctcttttgggaaggtttgtgtctagtagtgcctgtgcccctgggcagattggagagaagagggacgactggagaatcgtcgagaaccagcggagaaaagaaaaagcaacgtttaattctagaaggcctcctgtccctgcctgctctgggtgctcatggaatcagctgctgccctgcacttctcccggccagcctccctcctcctcctcctcctcagcctgtgtgcactggtctcagcccagtttattgtcgtggggcccactgatcccatcttggccacggttggagaaaacactacgttacgctgccatctgtcacccgagaaaaatgctgaggacatggaggtgcggtggttccggtctcagttctcccccgcagtgtttgtgtataaaggtggcagagagagaacagaggagcagatggaggagtaccgaggaagaaccacctttgtgagcaaagacatcagcaggggcagcgtggccctggtcatacacaacatcacagcccaggaaaacggcacctaccgctgttacttccaagaaggcaggtcctacgatgaggccatcctgcacctcgtagtggcaggactaggctctaagcccctcatttcaatgaggggccatgaagacgggggcatccggctggagtgcatatctagagggtggtacccaaagcccctcacagtgtggagggacccctacggtggggttgcgcctgccctgaaagaggtctccatgcctgatgcagacggcctcttcatggtcaccacggctgtgatcatcagagacaagtctgtgaggaacatgtcctgctctatcaacaacaccctgctcggccagaagaaagaaagtgtcatttttattccagaatcctttatgcccagtgtgtctccctgtgcagtggccctgcctatcattgtggttattctgatgatacccattgccgtatgcatctattggatcaacaaactccaaaaggaaaaaaagattctgtcaggggaaaaggagtttgaacgggaaacaagagaaattgctctaaaggaactggagaaagaacgtgtgcaaaaagaggaagaacttcaagtaaaagagaaacttcaagaagaattgcgatggagaagaacattcttacatgctgagctccaattcttctcaaactgagagaactgcttctgtctctggagagacagaagtgcagcttcagtaattctcagtgtgtgagctgcctaggatcagagagccttcatggaagtggccactacgtggggatcccttcagagatatctgagacctctctggggatcaggaaccacacaatccccagggttcctgagaccccaggcctaaacctgagacttcctctgcagttgatgtggtcctggatccagacaccgctcatcccgatctcttcctgtcagaggaccggagaagtgtgagaaggtgccccttcaggcacctaggggagagcgtgcctgacaacccagagagattcgacagtcagccttgtgtcctaggccgggagagcttcgcttcagggaaacattactgggaggtggaggtggaaaacgtgattgagtggactgtgggggtctgtagagacagtgttgagaggaaaggggaggtcctgctgattcctcagaatggcttctggaccttggagatgcataaagggcaataccgggccgtgtcctcccctgataggattctccctttgaaggagtccctttgccgggtgggcgtcttcctggactatgaagctggagatgtctccttctacaacatgagggacagatcgcacatctacacatgtccccgttcagccttttccgtgcctgtgaggcccttcttcaggttggggtgtgaggacagccccatcttcatctgccctgcactcacaggagccaatggggtcacggtgcctgaagagggcctgacacttcacagagtggggacccaccagagcctatagaatcaattccttggtctcacagccatgtagacaagccctggtcatctcagcagccaccgcacaacacccctggtggaagacacgccctcctcccctctggtcacacaagagaacatcttccagctgcctctttcacacccactacagacctcagccccagttttctcctcctcactaggctgtgtttttagtagttcctttgcttgtaactatgggatgggatccaggcatagggaactagttgttacacagctcccagccaagaagaaagtgtgagaagttgatgggcagcaaacctgctgtttaacatcagggtgaccacattaagcccagtattccagttggcaccagaagatatggacttggaatgaggcctacagggttcaccaggatgtaagaggagagaggaatccacaggaccaccagagaggagagggaaccagatatgcagatcagagatagaggaagtggaaccagagagctgggagggaccaaggttgtaagggtggctaagtcccaccataacagctaaggggacctgggagatgatggctcatttccacccagccccaggatttccagagcgcacatccacaggcctggacctgggatgaagatgaatgaagaacatggatgcacgtggatgtagtttggctcaggtgtccctgcagttggcaaggagtcagtactcagtccctgagtgtggctgaaatttgaggtcctggctgagccaaggagtaatggaccagatctacctcagtattcaagttcagtggggacaccagtggcttcaaacttcctggtttcatgatatcttgagacgccttacaaatgatggaggattccaaagagtttttgtttatttgggttaatatttgttggtatttatggcatttgagattgaaactaagaaatgttttaatttattacctttacaacatttatttacattacatacatacatttacaacatttattaatttatattaaaatagcatgaataagccaattataggttaatataagtagaatgtttgtgaaaaataagtatggtatccaaagcaaaataaattttattgtgaagtgtg

SEQ ID NO: 112519 - DNA, 687 bp, Homo sapiens
  Payload ID: 2018
  Gene Symbol: BTN2A1
  Gene Name: butyrophilin, subfamily 2, member A1
  ENST ID: ENST00000480218
  CDS Start-End: 1-236
ctatcattgtggttattctgatgatacccattgccgtatgcatctattggatcaacaaactccaaaaggaaaaaaagattctgtcaggggaaaaggagtttgaacgggaaacaagagaaattgctctaaaggaactggagaaagaacgtgtgcaaaaagaggaagaacttcaagtaaaagagaaacttcaagaagaattgcgatggagaagaacattcttacatgctgggtggtgagtgggtgctgatggcagcctggtttgaaaatctccactggagagaagacacagcaggattcagatgcaaatgaccagagcactccaagttggaaagaactgctgagcgggtctgtagagcccatcgctctctcctgtctattcatcagctaggctgaagctcctgacagactcacaccagtatcttgctgctccagaaaggtcgaagatggcagttttcccaaactccggcttgcccagatgtctgctcaccctcattcttctccagctgcccaagctggtttcagataggtctctctctctggcctgcagagttaaaacatctcaataaatataaagtataaaaagaagctggagcccaaccacttcggcacatgttcacaggatctcggggctgtgtcacaagccactgggcactcatatctggctgagaataaatctcttgcaatatt

SEQ ID NO: 112520 - DNA, 1687 bp, Homo sapiens
  Payload ID: 2018
  Gene Symbol: BTN2A1
  Gene Name: butyrophilin, subfamily 2, member A1
  Uniprot ID: Q7KYR7
  ENST ID: ENST00000469185
  CDS Start-End: 206-1198
tgcatctccaaacatggcgacctaggagaaggggaagaacaattttttctcctcttttgggaaggtttgtgtctagtagtgcctgtgcccctgggcagattggagagaagagggacgactggagaatcgtcgagaaccagcggagaaaagaaaaagcaacgtttaattctagaaggcctcctgtccctgcctgctctgggtgctcatggaatcagctgctgccctgcacttctcccggccagcctccctcctcctcctcctcctcagcctgtgtgcactggtctcagcccagtttattgtcgtggggcccactgatcccatcttggccacggttggagaaaacactacgttacgctgccatctgtcacccgagaaaaatgctgaggacatggaggtgcggtggttccggtctcagttctcccccgcagtgtttgtgtataaaggtggcagagagagaacagaggagcagatggaggagtaccgaggaagaaccacctttgtgagcaaagacatcagcaggggcagcgtggccctggtcatacacaacatcacagcccaggaaaacggcacctaccgctgttacttccaagaaggcaggtcctacgatgaggccatcctgcacctcgtagtggcaggactaggctctaagcccctcatttcaatgaggggccatgaagacgggggcatccggctggagtgcatatctagagggtggtacccaaagcccctcacagtgtggagggacccctacggtggggttgcgcctgccctgaaagaggtctccatgcctgatgcagacggcctcttcatggtcaccacggctgtgatcatcagagacaagtctgtgaggaacatgtcctgctctatcaacaacaccctgctcggccagaagaaagaaagtgtcatttttattccagaatcctttatgcccagtgtgtctccctgtgcagtggccctgcctatcattgtggttattctgatgatacccattgccgtatgcatctattggatcaacaaactccaaaaggaaaaaaagattctgtcaggggaaaaggagtttgaacgggaaacaagagaaattgctctaaaggaactggagaaagaacgtgtgcaaaaagaggaagaacttcaagtaaaagagaaacttcaagaagaattgcgatggagaagaacattcttacatgctgggccagtttgaagctttatatatcatttaccaaacttagggtggtgagtgggtgctgatggcagcctggtttgaaaatctccactggagagaagacacagcaggattcagatgcaaatgaccagagcactccaagttggaaagaactgctgagcgggtctgtagagcccatcgctctctcctgtctattcatcagctaggctgaagctcctgacagactcacaccagtatcttgctgctccagaaaggtcgaagatggcagttttcccaaactccggcttgcccagatgtctgctcaccctcattcttctccagctgcccaagctggtttcagataggtctctctctctggcctgcagagttaaaacatctcaataaatataaagtataaaaagaagctggagcccaaccacttcggcacatgttcacaggatctcggggctgtgtcacaagccactgggcactcatatctggctgagaataaatctcttgcaatatttt

SEQ ID NO: 112521 - DNA, 551 bp, Homo sapiens
  Payload ID: 2018
  Gene Symbol: BTN2A1
  Gene Name: butyrophilin, subfamily 2, member A1
  ENST ID: ENST00000493173
  CDS Start-End: 295-551
agaccagatttcgtttcctgcatctccaaacatggcgacctaggagaaggggaagaacaattttttctcctcttttgggaaggtttgtgtctagtagtgcctgtgcccctgggcagattggagagaagagggacgactggagaatcgtcgagaaccagcggagaaaagaaaaagcaacgtttaattctagaagcccagtttattgtcgtggggcccactgatcccatcttggccacggttggagaaaacactacgttacgctgccatctgtcacccgagaaaaatgctgaggacatggaggtgcggtggttccggtctcagttctcccccgcagtgtttgtgtataaaggtggcagagagagaacagaggagcagatggaggagtaccgaggaagaaccacctttgtgagcaaagacatcagcaggggcagcgtggccctggtcatacacaacatcacagcccaggaaaacggcacctaccgctgttacttccaagaaggcaggtcctacgatgaggccatcctgcacctcgtagtggcaggactaggctc

SEQ ID NO: 112522 - DNA, 2845 bp, Homo sapiens
  Payload ID: 2018
  Gene Symbol: BTN2A1
  Gene Name: butyrophilin, subfamily 2, member A1
  Uniprot ID: Q7KYR7
  ENST ID: ENST00000541522
  CDS Start-End: 341-1741
gggctctaaaatacttagggaactcttgggactgtggaagcccaggagaccagatttcgtttcctgcatctccaaacatggcgacctaggagaaggggaagaacaattttttctcctcttttgggaaggtttgtgtctagtagtgcctgtgcccctgggcagattggagagaagagggacgactggagaatcgtcgagaaccagcggagaaaagaaaaagcaacgtttaattctagaagcccagtttattgtcgtggggcccactgatcccatcttggccacggttggagaaaacactacgttacgctgccatctgtcacccgagaaaaatgctgaggacatggaggtgcggtggttccggtctcagttctcccccgcagtgtttgtgtataaaggtggcagagagagaacagaggagcagatggaggagtaccgaggaagaaccacctttgtgagcaaagacatcagcaggggcagcgtggccctggtcatacacaacatcacagcccaggaaaacggcacctaccgctgttacttccaagaaggcaggtcctacgatgaggccatcctgcacctcgtagtggcaggactaggctctaagcccctcatttcaatgaggggccatgaagacgggggcatccggctggagtgcatatctagagggtggtacccaaagcccctcacagtgtggagggacccctacggtggggttgcgcctgccctgaaagaggtctccatgcctgatgcagacggcctcttcatggtcaccacggctgtgatcatcagagacaagtctgtgaggaacatgtcctgctctatcaacaacaccctgctcggccagaagaaagaaagtgtcatttttattccagaatcctttatgcccagtgtgtctccctgtgcagtggccctgcctatcattgtggttattctgatgatacccattgccgtatgcatctattggatcaacaaactccaaaaggaaaaaaagattctgtcaggggaaaaggagtttgaacgggaaacaagagaaattgctctaaaggaactggagaaagaacgtgtgcaaaaagaggaagaacttcaagtaaaagagaaacttcaagaagaattgcgatggagaagaacattcttacatgctgttgatgtggtcctggatccagacaccgctcatcccgatctcttcctgtcagaggaccggagaagtgtgagaaggtgccccttcaggcacctaggggagagcgtgcctgacaacccagagagattcgacagtcagccttgtgtcctaggccgggagagcttcgcttcagggaaacattactgggaggtggaggtggaaaacgtgattgagtggactgtgggggtctgtagagacagtgttgagaggaaaggggaggtcctgctgattcctcagaatggcttctggaccttggagatgcataaagggcaataccgggccgtgtcctcccctgataggattctccctttgaaggagtccctttgccgggtgggcgtcttcctggactatgaagctggagatgtctccttctacaacatgagggacagatcgcacatctacacatgtccccgttcagccttttccgtgcctgtgaggcccttcttcaggttggggtgtgaggacagccccatcttcatctgccctgcactcacaggagccaatggggtcacggtgcctgaagagggcctgacacttcacagagtggggacccaccagagcctatagaatcaattccttggtctcacagccatgtagacaagccctggtcatctcagcagccaccgcacaacacccctggtggaagacacgccctcctcccctctggtcacacaagagaacatcttccagctgcctctttcacacccactacagacctcagccccagttttctcctcctcactaggctgtgtttttagtagttcctttgcttgtaactatgggatgggatccaggcatagggaactagttgttacacagctcccagccaagaagaaagtgtgagaagttgatgggcagcaaacctgctgtttaacatcagggtgaccacattaagcccagtattccagttggcaccagaagatatggacttggaatgaggcctacagggttcaccaggatgtaagaggagagaggaatccacaggaccaccagagaggagagggaaccagatatgcagatcagagatagaggaagtggaaccagagagctgggagggaccaaggttgtaagggtggctaagtcccaccataacagctaaggggacctgggagatgatggctcatttccacccagccccaggatttccagagcgcacatccacaggcctggacctgggatgaagatgaatgaagaacatggatgcacgtggatgtagtttggctcaggtgtccctgcagttggcaaggagtcagtactcagtccctgagtgtggctgaaatttgaggtcctggctgagccaaggagtaatggaccagatctacctcagtattcaagttcagtggggacaccagtggcttcaaacttcctggtttcatgatatcttgagacgccttacaaatgatggaggattccaaagagtttttgtttatttgggttaatatttgttggtatttatggcatttgagattgaaactaagaaatgttttaatttattacctttacaacatttatttacattacatacatacatttacaacatttattaatttatattaaaatagcatgaataagccaattataggttaatataagtagaatgtttgtgaaaaataagtatggtatccaaagcaaaataaattttattgtgaagtgtggcattgattaactttt

SEQ ID NO: 112523 - DNA, 3241 bp, Homo sapiens
  Payload ID: 2019
  Gene Symbol: BTN2A2
  Gene Name: butyrophilin, subfamily 2, member A2
  Uniprot ID: Q8WVV5
  ENST ID: ENST00000352867
  CDS Start-End: 111-1334
aatcttgggactttttggacacccagagaacaggtcccagataccgagtccgcaactccaaacatcgcgattaataggaggcctctggtctctgcctgccctgggtgctcatggaaccagctgctgctctgcacttctccctgccagcctccctcctcctcctcctgctcctcctccttctcagcctgtgtgcactggtctcaggccttgggtctaagcccctcattgaaatcaaggcccaagaggatgggagcatctggctggagtgcatatctggagggtggtacccagagcccctcacagtgtggagggacccctacggtgaggttgtgcccgccctgaaggaggtttccatcgctgatgctgacggcctcttcatggtcaccacagctgtgatcatcagagacaagtatgtgaggaatgtgtcctgctctgtcaacaacaccctgctcggccaggagaaggaaactgtcatttttattccagaatcctttatgcccagcgcatctccctggatggtggccctagctgtcatcctgaccgcatctccctggatggtgtccatgactgtcatcctggctgttttcatcatcttcatggctgtcagcatctgttgcatcaagaaacttcaaagggaaaaaaagattctgtcaggggaaaagaaagttgaacaagaggaaaaagaaattgcacagcaacttcaagaagaattgcgatggagaagaacattcttacatgctgctgatgtggtcctggatccagacaccgctcatcccgagctcttcctgtcagaggaccggagaagtgtgaggcggggcccctacaggcagagagtgcctgacaacccagagagattcgacagtcagccttgtgtcctgggatgggagagcttcgcctcagggaaacattactgggaggtggaggtggaaaacgtgatggtgtggactgtgggggtctgcagacacagtgttgagaggaaaggggaggtcctgctgattcctcagaatggcttctggaccctggagatgtttggaaaccaataccgggccctgtcctcccctgagaggattctccctttgaaggagtccctttgccgggtgggcgtcttcctggactatgaagctggagatgtctccttctacaacatgagggacagatcgcacatctacacatgtccccgttcagcctttactgtgcctgtgaggcccttcttcaggttagggtctgatgacagccccatcttcatctgccctgcactcacaggagccagtggggtcatggtgcctgaagagggcctgaaacttcacagagtggggacccaccagagcctatagaatcaattccttggactcacagccatgcagataagccctggccatctcagcagccaccgcacaacccccctaatgaaagacacgccctcctcccctctggtcacgtaagagaacatcttccagctgcctttttcacacccactccagccctctgccccagttttctcctcctcactagtctgtggctttagtagttcctttgcttgtaattatgggatgggatccaggcatagggaactagttgtttcatagctcccagtcaaaaagaaagtgagagaagctgttgggcagcgaacctactgtttaaaatcaggataaccacattaagcccaatatgccagttggcaccagatgctgtggacttggaatgaggccaacagggttcaccaggatgagagaggagagaggaatccacaggaccaccagaagggagagggaaccagatatgcagatcagagatagaggaagtggaaccagagagctgggagggaccaaggttgtaaggatggctaagtcccaccataagagctaaagggtcctgggagatgatggctcatttccacccaaccccaggatttccacagcacacacccacaggcctggacctgggatgaagatgaatgaagaacatggactcatgtggatgtggtttggctcagatgtccctgcaataaacaaggggtcagtacttagtccctgagtgtggttgaggtttgaggtcctggtcgagcagggcagtactggaccaggtctacgtcagcattcaggttcaatggggacaccagtggcttcaaacttcctgatctaattatgtttttagacacttagaagttattgaggactttaaagagcttttgtttatttgggttaatatttatgacatttgacattgaaacaaaaatttaaaatgttatcttttaatttatgttaaaatagcattaataaatcagttataggttaatgtagataggatgttttgtgaaaaagcaatctattgtgtccaaataaaaaaacaaaaagtgtgacactggttaactttttccagatctcatgtctggcttaataagagatatttgtattatcatatctgcctttgtattaaacctattggtatatcataggtcatgttagctcaaaaaaactttactgcacactactgagagaatgagatgaaaaacgattaatgtttcattattattattgtgaaaatattattaacactggggactccttaagagtacatcagagttctctctaggaatcccaaaaccacattttgaaactagaatagtggatcctggaagttaatccatgtgctggttaattttagatgtcaacctgactggattaaggaatacctagacagctggtacaacattatttctgggtgtgtctgtgagtgtgtttccagaagagattggcaagtgagtcagtgggaaattctctccttctgttggctgggtgcccaatacaacaaaaaggcagaggaaaggcaaattcttctctcctctggagctgagacactcttcttcttctgcccttggacatcagaactcctggctctccggcctttgaacttcaggacttgtaccaggaggccctgggttctcaggcctttggctttggactgagagttacacaatcagcttccctggttctgaggctttcagacttaaactgagccatgctaccagcatcccagggtctccagcctacagatgagctgttgtgcgatttcttagcctccataatcacatgagccaatctccttaataaatgcctgctcatagatctgtatctacatctatatctgtatgtgcatctatatctatgcctatatctatatctatatcatattgattttgtctctctggagaaccctgactaataaaatgaggcatctaaaa

SEQ ID NO: 112524 - DNA, 3590 bp, Homo sapiens
  Payload ID: 2019
  Gene Symbol: BTN2A2
  Gene Name: butyrophilin, subfamily 2, member A2
  Uniprot ID: Q8WVV5
  ENST ID: ENST00000356709
  CDS Start-End: 112-1683
aaatcttgggactttttggacacccagagaacaggtcccagataccgagtccgcaactccaaacatcgcgattaataggaggcctctggtctctgcctgccctgggtgctcatggaaccagctgctgctctgcacttctccctgccagcctccctcctcctcctcctgctcctcctccttctcagcctgtgtgcactggtctcagcccagtttactgtcgtggggccagctaatcccatcctggccatggtgggagaaaacactacattacgctgccatctgtcacccgagaaaaatgctgaggacatggaggtgcggtggttccggtctcagttctcccccgcagtgtttgtgtataagggtgggagagagagaacagaggagcagatggaggagtaccggggaagaatcacctttgtgagcaaagacatcaacaggggcagcgtggccctggtcatacataacgtcacagcccaggagaatgggatctaccgctgttacttccaagaaggcaggtcctacgatgaggccatcctacgcctcgtggtggcaggccttgggtctaagcccctcattgaaatcaaggcccaagaggatgggagcatctggctggagtgcatatctggagggtggtacccagagcccctcacagtgtggagggacccctacggtgaggttgtgcccgccctgaaggaggtttccatcgctgatgctgacggcctcttcatggtcaccacagctgtgatcatcagagacaagtatgtgaggaatgtgtcctgctctgtcaacaacaccctgctcggccaggagaaggaaactgtcatttttattccagaatcctttatgcccagcgcatctccctggatggtggccctagctgtcatcctgaccgcatctccctggatggtgtccatgactgtcatcctggctgttttcatcatcttcatggctgtcagcatctgttgcatcaagaaacttcaaagggaaaaaaagattctgtcaggggaaaagaaagttgaacaagaggaaaaagaaattgcacagcaacttcaagaagaattgcgatggagaagaacattcttacatgctgctgatgtggtcctggatccagacaccgctcatcccgagctcttcctgtcagaggaccggagaagtgtgaggcggggcccctacaggcagagagtgcctgacaacccagagagattcgacagtcagccttgtgtcctgggatgggagagcttcgcctcagggaaacattactgggaggtggaggtggaaaacgtgatggtgtggactgtgggggtctgcagacacagtgttgagaggaaaggggaggtcctgctgattcctcagaatggcttctggaccctggagatgtttggaaaccaataccgggccctgtcctcccctgagaggattctccctttgaaggagtccctttgccgggtgggcgtcttcctggactatgaagctggagatgtctccttctacaacatgagggacagatcgcacatctacacatgtccccgttcagcctttactgtgcctgtgaggcccttcttcaggttagggtctgatgacagccccatcttcatctgccctgcactcacaggagccagtggggtcatggtgcctgaagagggcctgaaacttcacagagtggggacccaccagagcctatagaatcaattccttggactcacagccatgcagataagccctggccatctcagcagccaccgcacaacccccctaatgaaagacacgccctcctcccctctggtcacgtaagagaacatcttccagctgcctttttcacacccactccagccctctgccccagttttctcctcctcactagtctgtggctttagtagttcctttgcttgtaattatgggatgggatccaggcatagggaactagttgtttcatagctcccagtcaaaaagaaagtgagagaagctgttgggcagcgaacctactgtttaaaatcaggataaccacattaagcccaatatgccagttggcaccagatgctgtggacttggaatgaggccaacagggttcaccaggatgagagaggagagaggaatccacaggaccaccagaagggagagggaaccagatatgcagatcagagatagaggaagtggaaccagagagctgggagggaccaaggttgtaaggatggctaagtcccaccataagagctaaagggtcctgggagatgatggctcatttccacccaaccccaggatttccacagcacacacccacaggcctggacctgggatgaagatgaatgaagaacatggactcatgtggatgtggtttggctcagatgtccctgcaataaacaaggggtcagtacttagtccctgagtgtggttgaggtttgaggtcctggtcgagcagggcagtactggaccaggtctacgtcagcattcaggttcaatggggacaccagtggcttcaaacttcctgatctaattatgtttttagacacttagaagttattgaggactttaaagagcttttgtttatttgggttaatatttatgacatttgacattgaaacaaaaatttaaaatgttatcttttaatttatgttaaaatagcattaataaatcagttataggttaatgtagataggatgttttgtgaaaaagcaatctattgtgtccaaataaaaaaacaaaaagtgtgacactggttaactttttccagatctcatgtctggcttaataagagatatttgtattatcatatctgcctttgtattaaacctattggtatatcataggtcatgttagctcaaaaaaactttactgcacactactgagagaatgagatgaaaaacgattaatgtttcattattattattgtgaaaatattattaacactggggactccttaagagtacatcagagttctctctaggaatcccaaaaccacattttgaaactagaatagtggatcctggaagttaatccatgtgctggttaattttagatgtcaacctgactggattaaggaatacctagacagctggtacaacattatttctgggtgtgtctgtgagtgtgtttccagaagagattggcaagtgagtcagtgggaaattctctccttctgttggctgggtgcccaatacaacaaaaaggcagaggaaaggcaaattcttctctcctctggagctgagacactcttcttcttctgcccttggacatcagaactcctggctctccggcctttgaacttcaggacttgtaccaggaggccctgggttctcaggcctttggctttggactgagagttacacaatcagcttccctggttctgaggctttcagacttaaactgagccatgctaccagcatcccagggtctccagcctacagatgagctgttgtgcgatttcttagcctccataatcacatgagccaatctccttaataaatgcctgctcatagatctgtatctacatctatatctgtatgtgcatctatatctatgcctatatctatatctatatcatattgattttgtctctctggagaaccctgactaataaaatgaggcatctaaaa

SEQ ID NO: 112525 - DNA, 1570 bp, Homo sapiens
  Payload ID: 2019
  Gene Symbol: BTN2A2
  Gene Name: butyrophilin, subfamily 2, member A2
  Uniprot ID: Q8WVV5
  ENST ID: ENST00000432533
  CDS Start-End: 87-857
agagaacaggtcccagataccgagtccgcaactccaaacatcgcgattaataggaggcctctggtctctgcctgccctgggtgctcatggaaccagctgctgctctgcacttctccctgccagcctccctcctcctcctcctgctcctcctccttctcagcctgtgtgcactggtctcagcccagtttactgtcgtggggccagctaatcccatcctggccatggtgggagaaaacactacattacgctgccatctgtcacccgagaaaaatgctgaggacatggaggtgcggtggttccggtctcagttctcccccgcagtgtttgtgtataagggtgggagagagagaacagaggagcagatggaggagtaccggggaagaatcacctttgtgagcaaagacatcaacaggggcagcgtggccctggtcatacataacgtcacagcccaggagaatgggatctaccgctgttacttccaagaaggcaggtcctacgatgaggccatcctacgcctcgtggtggcagaatcctttatgcccagcgcatctccctggatggtggccctagctgtcatcctgaccgcatctccctggatggtgtccatgactgtcatcctggctgttttcatcatcttcatggctgtcagcatctgttgcatcaagaaacttcaaagggaaaaaaagattctgtcaggggaaaagaaagttgaacaagaggaaaaagaaattgcacagcaacttcaagaagaattgcgatggagaagaacattcttacatgctgggtatgagctgcctgggatcaggggaccttcatggaaacggccactacatggggaacccccttcagctttctgagacttctctggggaccaggaaccacacaatccccagggttcctgagaccccaggcataaacctgagacttcctctgcagctgatgtggtcctggatccagacaccgctcatcccgagctcttcctgtcagaggaccggagaagtgtgaggcggggcccctacaggcagagagtgcctgacaacccagagagattcgacagtcagccttgtgtcctgggatgggagagcttcgcctcagggaaacattactgggaggtggaggtggaaaacgtgatggtgtggactgtgggggtctgcagacacagtgttgagaggaaaggggaggtcctgctgattcctcagaatggcttctggaccctggagatgtttggaaaccaataccgggccctgtcctcccctgagaggattctccctttgaaggagtccctttgccgggtgggcgtcttcctggactatgaagctggagatgtctccttctacaacatgagggacagatcgcacatctacacatgtccccgttcagcctttactgtgcctgtgaggcccttcttcaggttagggtctgatgacagccccatcttcatctgccctgcactcacaggagccagtggggtcatggtgcctgaagagggcctgaaacttcacagagtggggacccaccagagcctatagaatcaattccttggactcacagccatgcagataagccctgg

SEQ ID NO: 112526 - DNA, 2733 bp, Homo sapiens
  Payload ID: 2019
  Gene Symbol: BTN2A2
  Gene Name: butyrophilin, subfamily 2, member A2
  Uniprot ID: Q8WVV5
  ENST ID: ENST00000416795
  CDS Start-End: 137-1708
gggatgctttgttgtctggtggtgactgtgcccatgggtgagttgtatcggaaaatcgtcatgtgaggatcagaggggaaaagaaaacagaggttagttctagaaggcctctggtctctgcctgccctgggtgctcatggaaccagctgctgctctgcacttctccctgccagcctccctcctcctcctcctgctcctcctccttctcagcctgtgtgcactggtctcagcccagtttactgtcgtggggccagctaatcccatcctggccatggtgggagaaaacactacattacgctgccatctgtcacccgagaaaaatgctgaggacatggaggtgcggtggttccggtctcagttctcccccgcagtgtttgtgtataagggtgggagagagagaacagaggagcagatggaggagtaccggggaagaatcacctttgtgagcaaagacatcaacaggggcagcgtggccctggtcatacataacgtcacagcccaggagaatgggatctaccgctgttacttccaagaaggcaggtcctacgatgaggccatcctacgcctcgtggtggcaggccttgggtctaagcccctcattgaaatcaaggcccaagaggatgggagcatctggctggagtgcatatctggagggtggtacccagagcccctcacagtgtggagggacccctacggtgaggttgtgcccgccctgaaggaggtttccatcgctgatgctgacggcctcttcatggtcaccacagctgtgatcatcagagacaagtatgtgaggaatgtgtcctgctctgtcaacaacaccctgctcggccaggagaaggaaactgtcatttttattccagaatcctttatgcccagcgcatctccctggatggtggccctagctgtcatcctgaccgcatctccctggatggtgtccatgactgtcatcctggctgttttcatcatcttcatggctgtcagcatctgttgcatcaagaaacttcaaagggaaaaaaagattctgtcaggggaaaagaaagttgaacaagaggaaaaagaaattgcacagcaacttcaagaagaattgcgatggagaagaacattcttacatgctgctgatgtggtcctggatccagacaccgctcatcccgagctcttcctgtcagaggaccggagaagtgtgaggcggggcccctacaggcagagagtgcctgacaacccagagagattcgacagtcagccttgtgtcctgggatgggagagcttcgcctcagggaaacattactgggaggtggaggtggaaaacgtgatggtgtggactgtgggggtctgcagacacagtgttgagaggaaaggggaggtcctgctgattcctcagaatggcttctggaccctggagatgtttggaaaccaataccgggccctgtcctcccctgagaggattctccctttgaaggagtccctttgccgggtgggcgtcttcctggactatgaagctggagatgtctccttctacaacatgagggacagatcgcacatctacacatgtccccgttcagcctttactgtgcctgtgaggcccttcttcaggttagggtctgatgacagccccatcttcatctgccctgcactcacaggagccagtggggtcatggtgcctgaagagggcctgaaacttcacagagtggggacccaccagagcctatagaatcaattccttggactcacagccatgcagataagccctggccatctcagcagccaccgcacaacccccctaatgaaagacacgccctcctcccctctggtcacgtaagagaacatcttccagctgcctttttcacacccactccagccctctgccccagttttctcctcctcactagtctgtggctttagtagttcctttgcttgtaattatgggatgggatccaggcatagggaactagttgtttcatagctcccagtcaaaaagaaagtgagagaagctgttgggcagcgaacctactgtttaaaatcaggataaccacattaagcccaatatgccagttggcaccagatgctgtggacttggaatgaggccaacagggttcaccaggatgagagaggagagaggaatccacaggaccaccagaagggagagggaaccagatatgcagatcagagatagaggaagtggaaccagagagctgggagggaccaaggttgtaaggatggctaagtcccaccataagagctaaagggtcctgggagatgatggctcatttccacccaaccccaggatttccacagcacacacccacaggcctggacctgggatgaagatgaatgaagaacatggactcatgtggatgtggtttggctcagatgtccctgcaataaacaaggggtcagtacttagtccctgagtgtggttgaggtttgaggtcctggtcgagcagggcagtactggaccaggtctacgtcagcattcaggttcaatggggacaccagtggcttcaaacttcctgatctaattatgtttttagacacttagaagttattgaggactttaaagagcttttgtttatttgggttaatatttatgacatttgacattgaaacaaaaatttaaaatgttatcttttaatttatgttaaaatagcattaataaatcagttataggttaatgtagataggatgttttgtgaaaaagcaatctattgtgtccaaataaaaaaacaaaaagtgtga

SEQ ID NO: 112527 - DNA, 3297 bp, Homo sapiens
  Payload ID: 2019
  Gene Symbol: BTN2A2
  Gene Name: butyrophilin, subfamily 2, member A2
  ENST ID: ENST00000495632
  CDS Start-End: 1-171
ttcatcatcttcatggctgtcagcatctgttgcatcaagaaacttcaaagggaaaaaaagattctgtcaggggaaaagaaagttgaacaagaggaaaaagaaattgcacagcaacttcaagaagaattgcgatggagaagaacattcttacatgctggtgagtgcctctgatgttctctcagatctcagctttctccccactagccagctaacaggactccttagaggagatgagcaaggggcccagggctacacagggaccatagggaactggggtcagttcatcaacggtgtcccagcaatgatgcatcatggctcttctgtcagggaaccccagcagctcttaatgaaccctgcagtttacatccccaggaccctttctcttttggaataatttaatgcatgattatcaaaggtttcccatgcatagtagcctcctaagagttacatttcagaagtcattgctctttgattctggatcaatttgaaataagataatgctgtcttagcaattcatatcctgggaatggtatagactgtgcacagttgaagacctatgtgaggaaaaggccataagggtccccagtaagcctgatgcaatggtgtacaaataggtggccagaaatacctttctgcctctaagagagcactgatattctgcatgtagtctgccaggggaaggggtttgggtgagtgggagggtgagtgggagagcacagagaaaccaatcgcccacttccagtgagttctcatcttgtgattcggcacctctgcctgtcagcaccaaagaatccaaactttaccagataccagggcccatggacctttcctctttggcgagtttcaaaattgccactgtcattttgggacacaatcacaacttgtcacaatcagacatatcaacttgtggaaaagagaaaatcattttaatgcaatagaaaggtagactgaataagtaagaatacatgcagaaggtagaggtttgcagaatgctcagctcctggggcttttcctgtatgggagaagtaatcctggtagatgtcagactcatattgttaaagcaaaactggattgaagtatttcttccctaactttgcccacacatccctcaggcaccaggttttcttttgcacacatttattctccttctttatcctttgaagtgtgcccttgtcagccacttaaatcagttgtcacctattaaaacaacctataggaccaacgaagaggtccttcaccacctaggacagtgtgtaatgatagactcacttaattgatccattgagaggtatgtgggggaacaataggagataaagcttctgtgatggtttaagccaagttggaaagtttctaactaaagaaagtcccagagatcatatatcttgaatagaaaagggatcagatcttagaatgctgagaaaaactgggaaccattaattttggctcatttcctaaactctctggatttcatagagccacaattcttctcaacctgggggcactgcttctgtctctggagagatagaagtgcagcttccgtaattctcagggtatgagctgcctgggatcaggggaccttcatggaaacggccactacatggggaacccccttcagctttctgagacttctctggggaccaggaaccacacaatccccagggttcctgagaccccaggcataaacctgagacttcctctgcagctgatgtggtcctggatccagacaccgctcatcccgagctcttcctgtcagaggaccggagaagtgtgaggcggggcccctacaggcagagagtgcctgacaacccagagagattcgacagtcagccttgtgtcctgggatgggagagcttcgcctcagggaaacattactgggaggtggaggtggaaaacgtgatggtgtggactgtgggggtctgcagacacagtgttgagaggaaaggggaggtcctgctgattcctcagaatggcttctggaccctggagatgtttggaaaccaataccgggccctgtcctcccctgagaggattctccctttgaaggagtccctttgccgggtgggcgtcttcctggactatgaagctggagatgtctccttctacaacatgagggacagatcgcacatctacacatgtccccgttcagcctttactgtgcctgtgaggcccttcttcaggttagggtctgatgacagccccatcttcatctgccctgcactcacaggagccagtggggtcatggtgcctgaagagggcctgaaacttcacagagtggggacccaccagagcctatagaatcaattccttggactcacagccatgcagataagccctggccatctcagcagccaccgcacaacccccctaatgaaagacacgccctcctcccctctggtcacgtaagagaacatcttccagctgcctttttcacacccactccagccctctgccccagttttctcctcctcactagtctgtggctttagtagttcctttgcttgtaattatgggatgggatccaggcatagggaactagttgtttcatagctcccagtcaaaaagaaagtgagagaagctgttgggcagcgaacctactgtttaaaatcaggataaccacattaagcccaatatgccagttggcaccagatgctgtggacttggaatgaggccaacagggttcaccaggatgagagaggagagaggaatccacaggaccaccagaagggagagggaaccagatatgcagatcagagatagaggaagtggaaccagagagctgggagggaccaaggttgtaaggatggctaagtcccaccataagagctaaagggtcctgggagatgatggctcatttccacccaaccccaggatttccacagcacacacccacaggcctggacctgggatgaagatgaatgaagaacatggactcatgtggatgtggtttggctcagatgtccctgcaataaacaaggggtcagtacttagtccctgagtgtggttgaggtttgaggtcctggtcgagcagggcagtactggaccaggtctacgtcagcattcaggttcaatggggacaccagtggcttcaaacttcctgatctaattatgtttttagacacttagaagttattgaggactttaaagagcttttgtttatttgggttaatatttatgacatttgacattgaaacaaaaatttaaaatgttatcttttaatttatgttaaaatagcattaataaatcagttataggttaatgtagataggatgttttgtgaaaaagcaatctattgtgtcc

SEQ ID NO: 112528 - DNA, 1790 bp, Homo sapiens
  Payload ID: 2019
  Gene Symbol: BTN2A2
  Gene Name: butyrophilin, subfamily 2, member A2
  Uniprot ID: Q8WVV5
  ENST ID: ENST00000469230
  CDS Start-End: 235-1245
agtggaaatcttgggactttttggacacccagagaacaggtcccagataccgagtccgcaactccaaacatcgcgattaataggaggtgaacacagcttttctcttctctttgggatgctttgttgtctggtggtgactgtgcccatgggtgagttgtatcggaaaatcgtcatgtgaggatcagaggggaaaagaaaacagaggcctctggtctctgcctgccctgggtgctcatggaaccagctgctgctctgcacttctccctgccagcctccctcctcctcctcctgctcctcctccttctcagcctgtgtgcactggtctcagcccagtttactgtcgtggggccagctaatcccatcctggccatggtgggagaaaacactacattacgctgccatctgtcacccgagaaaaatgctgaggacatggaggtgcggtggttccggtctcagttctcccccgcagtgtttgtgtataagggtgggagagagagaacagaggagcagatggaggagtaccggggaagaatcacctttgtgagcaaagacatcaacaggggcagcgtggccctggtcatacataacgtcacagcccaggagaatgggatctaccgctgttacttccaagaaggcaggtcctacgatgaggccatcctacgcctcgtggtggcaggccttgggtctaagcccctcattgaaatcaaggcccaagaggatgggagcatctggctggagtgcatatctggagggtggtacccagagcccctcacagtgtggagggacccctacggtgaggttgtgcccgccctgaaggaggtttccatcgctgatgctgacggcctcttcatggtcaccacagctgtgatcatcagagacaagtatgtgaggaatgtgtcctgctctgtcaacaacaccctgctcggccaggagaaggaaactgtcatttttattccagaatcctttatgcccagcgcatctccctggatggtggccctagctgtcatcctgaccgcatctccctggatggtgtccatgactgtcatcctggctgttttcatcatcttcatggctgtcagcatctgttgcatcaagaaacttcaaagggaaaaaaagattctgtcaggggaaaagaaagttgaacaagaggaaaaagaaattgcacagcaacttcaagaagaattgcgatggagaagaacattcttacatgctgatgtcaacctgactggattaaggaatacctagacagctggtacaacattatttctgggtgtgtctgtgagtgtgtttccagaagagattggcaagtgagtcagtgggaaattctctccttctgttggctgggtgcccaatacaacaaaaaggcagaggaaaggcaaattcttctctcctctggagctgagacactcttcttcttctgcccttggacatcagaactcctggctctccggcctttgaacttcaggacttgtaccaggaggccctgggttctcaggcctttggctttggactgagagttacacaatcagcttccctggttctgaggctttcagacttaaactgagccatgctaccagcatcccagggtctccagcctacagatgagctgttgtgcgatttcttagcctccataatcacatgagccaatctccttaataaatgcctgctcatagatctgtatctacatctatatctgtatgtgcatctatatctatgcctatatctatatctatatcatattgattttgtctctctggagaaccctgactaataaaatgaggcatctaaaa

SEQ ID NO: 112529 - DNA, 540 bp, Homo sapiens
  Payload ID: 2019
  Gene Symbol: BTN2A2
  Gene Name: butyrophilin, subfamily 2, member A2
  ENST ID: ENST00000494184
  CDS Start-End: 252-540
gttgtctggtggtgactgtgcccatgggtgagttgtatcggaaaatcgtcatgtgaggatcagaggggaaaagaaaacagagatacctgagccttgagatgcaagcgactcccagaagttggggcaccgatgagacctacttgagtgacaggagaggttgggcccgaccagcactgaggtgccaagactcctaggctgattctcctcctctgtaaccctaggcctctggtctctgcctgccctgggtgctcatggaaccagctgctgctctgcacttctccctgccagcctccctcctcctcctcctgctcctcctccttctcagcctgtgtgcactggtctcagcccagtttactgtcgtggggccagctaatcccatcctggccatggtgggagaaaacactacattacgctgccatctgtcacccgagaaaaatgctgaggacatggaggtgcggtggttccggtctcagttctcccccgcagtgtttgtgtataagggtgggagagagagaacagaggagcagatggaggagtacc

SEQ ID NO: 112530 - DNA, 587 bp, Homo sapiens
  Payload ID: 2019
  Gene Symbol: BTN2A2
  Gene Name: butyrophilin, subfamily 2, member A2
  ENST ID: ENST00000482842
  CDS Start-End: 346-587
agaacaggtcccagataccgagtccgcaactccaaacatcgcgattaataggaggtgaacacagcttttctcttctctttgggatgctttgttgtctggtggtgactgtgcccatgggtgagttgtatcggaaaatcgtcatgtgaggatcagaggggaaaagaaaacagaggccttgggtctaagcccctcattgaaatcaaggcccaagaggatgggagcatctggctggagtgcatatctggagggtggtacccagagcccctcacagtgtggagggacccctacggtgaggttgtgcccgccctgaaggaggtttccatcgctgatgctgacggcctcttcatggtcaccacagctgtgatcatcagagacaagtatgtgaggaatgtgtcctgctctgtcaacaacaccctgctcggccaggagaaggaaactgtcatttttattccagaatcctttatgcccagcgcatctccctggatggtggccctagctgtcatcctgaccgcatctccctggatggtgtccatgactgtcatcctggctgttttcatcatcttcatggctgtcagcatctgttgcat

SEQ ID NO: 112531 - DNA, 942 bp, Homo sapiens
  Payload ID: 2019
  Gene Symbol: BTN2A2
  Gene Name: butyrophilin, subfamily 2, member A2
  ENST ID: ENST00000483410
  CDS Start-End: 390-942
ctggtggggaggcgcagcctcgcctggctttacctcgagtgtcccgacctgggtctcggggagggggaagtggagggacgagggtgtgaaagaatccagggacaactgaagaaaccggactgtggcccgagaagtgggaagaggaaggaggaaaacggcccccttgatctctgcattgatggcttacttatggaatgtttacggaatccctctttcggagatacctgagccttgagatgcaagcgactcccagaagttggggcaccgatgagacctacttgagtgacaggagaggttgggcccgaccagcactgaggtgccaagactcctaggctgattctcctcctctgtaaccctaggcctctggtctctgcctgccctgggtgctcatggaaccagctgctgctctgcacttctccctgccagcctccctcctcctcctcctgctcctcctccttctcagcctgtgtgcactggtctcaggccttgggtctaagcccctcattgaaatcaaggcccaagaggatgggagcatctggctggagtgcatatctggagggtggtacccagagcccctcacagtgtggagggacccctacggtgaggttgtgcccgccctgaaggaggtttccatcgctgatgctgacggcctcttcatggtcaccacagctgtgatcatcagagacaagtatgtgaggaatgtgtcctgctctgtcaacaacaccctgctcggccaggagaaggaaactgtcatttttattccagaatcctttatgcccagcgcatctccctggatggtggccctagctgtcatcctgaccgcatctccctggatggtgtccatgactgtcatcctggctgttttcatcatcttcatggctgtcagcatctgttgcatcaagaaacttcaaagggaaaaaaagattctgtcaggggaaaaga

SEQ ID NO: 112532 - DNA, 600 bp, Homo sapiens
  Payload ID: 2019
  Gene Symbol: BTN2A2
  Gene Name: butyrophilin, subfamily 2, member A2
  ENST ID: ENST00000471116
  CDS Start-End: 140-259
gcttttctcttctctttgggatgctttgttgtctggtggtgactgtgcccatgggtgagttgtatcggaaaatcgtcatgtgaggatcagaggggaaaagaaaacagaggcctctggtctctgcctgccctgggtgctcatggaaccagctgctgctctgcacttctccctgccagcctccctcctcctcctcctgctcctcctccttctcagcctgtgtgcactggtctcagttctcccccgcagtgtttgtgtataagggtgggagagagagaacagaggagcagatggaggagtaccggggaagaatcacctttgtgagcaaagacatcaacaggggcagcgtggccctggtcatacataacgtcacagcccaggagaatgggatctaccgctgttacttccaagaaggcaggtcctacgatgaggccatcctacgcctcgtggtggcaggccttgggtctaagcccctcattgaaatcaaggcccaagaggatgggagcatctggctggagtgcatatctggagggtggtacccagagcccctcacagtgtggagggacccctacggtgaggttgtgcccgccctgaaggaggttt

SEQ ID NO: 112533 - DNA, 881 bp, Homo sapiens
  Payload ID: 2019
  Gene Symbol: BTN2A2
  Gene Name: butyrophilin, subfamily 2, member A2
  ENST ID: ENST00000493275
  CDS Start-End: 163-881
tttttggacacccagagaacaggtcccagataccgagtccgcaactccaaacatcgcgattaataggaggtgaacacagcttttctcttctctttgggatgctttgttgtctggtggtgactgtgcccatgggcctctggtctctgcctgccctgggtgctcatggaaccagctgctgctctgcacttctccctgccagcctccctcctcctcctcctgctcctcctccttctcagcctgtgtgcactggtctcagcccagtttactgtcgtggggccagctaatcccatcctggccatggtgggagaaaacactacattacgctgccatctgtcacccgagaaaaatgctgaggacatggaggtgcggtggttccggtctcagttctcccccgcagtgtttgtgtataagggtgggagagagagaacagaggagcagatggaggagtaccggggaagaatcacctttgtgagcaaagacatcaacaggggcagcgtggccctggtcatacataacgtcacagcccaggagaatgggatctaccgctgttacttccaagaaggcaggtcctacgatgaggccatcctacgcctcgtggtggcaggccttgggtctaagcccctcattgaaatcaaggcccaagaggatgggagcatctggctggagtgcatatctggagggtggtacccagagcccctcacagtgtggagggacccctacggtgaggttgtgcccgccctgaaggaggtttccatcgctgatgctgacggcctcttcatggtcaccacagctgtgatcatcagagacaagtatgtgaggaatgtgtcctgctctgtcaacaacaccctgctcggccaggagaaggaaactgtcatttttat

SEQ ID NO: 112534 - DNA, 966 bp, Homo sapiens
  Payload ID: 2019
  Gene Symbol: BTN2A2
  Gene Name: butyrophilin, subfamily 2, member A2
  ENST ID: ENST00000490025
  CDS Start-End: 255-966
aaatcttgggactttttggacacccagagaacaggtcccagataccgagtccgcaactccaaacatcgcgattaataggaggccttgggtctaagcccctcattgaaatcaaggcccaagaggatgggagcatctggctggagtgcatatctggagggtggtacccagagcccctcacagtgtggagggacccctacggtgaggttgtgcccgccctgaaggaggtttccatcgctgatgctgacggcctcttcatggtcaccacagctgtgatcatcagagacaagtatgtgaggaatgtgtcctgctctgtcaacaacaccctgctcggccaggagaaggaaactgtcatttttattccagaatcctttatgcccagcgcatctccctggatggtggccctagctgtcatcctgaccgcatctccctggatggtgtccatgactgtcatcctggctgttttcatcatcttcatggctgtcagcatctgttgcatcaagaaacttcaaagggaaaaaaagattctgtcaggggaaaagaaagttgaacaagaggaaaaagaaattgcacagcaacttcaagaagaattgcgatggagaagaacattcttacatgctgctgatgtggtcctggatccagacaccgctcatcccgagctcttcctgtcagaggaccggagaagtgtgaggcggggcccctacaggcagagagtgcctgacaacccagagagattcgacagtcagccttgtgtcctgggatgggagagcttcgcctcagggaaacattactgggaggtggaggtggaaaacgtgatggtgtggactgtgggggtctgcagacacagtgttgagaggaaaggggaggtcctgctgattcctcagaatggcttctggaccctggagatgtttggaaaccaataccgggccctgtcctcccctgagaggattctccctttgaaggagtccc

SEQ ID NO: 112535 - DNA, 535 bp, Homo sapiens
  Payload ID: 2019
  Gene Symbol: BTN2A2
  Gene Name: butyrophilin, subfamily 2, member A2
  ENST ID: ENST00000472507
  CDS Start-End: 205-535
agagaacaggtcccagataccgagtccgcaactccaaacatcgcgattaataggaggtgaacacagcttttctcttctctttgggatgctttgttgtctggtggtgactgtgcccatgggtgagttgtatcggaaaatcgtcatgtgaggatcagaggggaaaagaaaacagaggcctctggtctctgcctgccctgggtgctcatggaaccagctgctgctctgcacttctccctgccagcctccctcctcctcctcctgctcctcctccttctcagcctgtgtgcactggtctcaggccttgggtctaagcccctcattgaaatcaaggcccaagaggatgggagcatctggctggagtgcatatctggagggtggtacccagagcccctcacagtgtggagggacccctacggtgaggttgtgcccgccctgaaggaggtttccatcgctgatgctgacggcctcttcatggtcaccacagctgtgatcatcagagacaagtatgtgaggaatgtgtcctgctctgtcaaca

SEQ ID NO: 112536 - DNA, 1068 bp, Homo sapiens
  Payload ID: 2019
  Gene Symbol: BTN2A2
  Gene Name: butyrophilin, subfamily 2, member A2
  Uniprot ID: Q8WVV5
  ENST ID: ENST00000482536
  CDS Start-End: 87-1028
agagaacaggtcccagataccgagtccgcaactccaaacatcgcgattaataggaggcctctggtctctgcctgccctgggtgctcatggaaccagctgctgctctgcacttctccctgccagcctccctcctcctcctcctgctcctcctccttctcagcctgtgtgcactggtctcagaatcctttatgcccagcgcatctccctggatggtggccctagctgtcatcctgaccgcatctccctggatggtgtccatgactgtcatcctggctgttttcatcatcttcatggctgtcagcatctgttgcatcaagaaacttcaaagggaaaaaaagattctgtcaggggaaaagaaagttgaacaagaggaaaaagaaattgcacagcaacttcaagaagaattgcgatggagaagaacattcttacatgctgctgatgtggtcctggatccagacaccgctcatcccgagctcttcctgtcagaggaccggagaagtgtgaggcggggcccctacaggcagagagtgcctgacaacccagagagattcgacagtcagccttgtgtcctgggatgggagagcttcgcctcagggaaacattactgggaggtggaggtggaaaacgtgatggtgtggactgtgggggtctgcagacacagtgttgagaggaaaggggaggtcctgctgattcctcagaatggcttctggaccctggagatgtttggaaaccaataccgggccctgtcctcccctgagaggattctccctttgaaggagtccctttgccgggtgggcgtcttcctggactatgaagctggagatgtctccttctacaacatgagggacagatcgcacatctacacatgtccccgttcagcctttactgtgcctgtgaggcccttcttcaggttagggtctgatgacagccccatcttcatctgccctgcactcacaggagccagtggggtcatggtgcctgaagagggcctgaaacttcacagagtggggacccaccagagcctatagaatcaattccttggactcacagccatgcagataagccctg

SEQ ID NO: 112537 - DNA, 3434 bp, Homo sapiens
  Payload ID: 2020
  Gene Symbol: BTN3A1
  Gene Name: butyrophilin, subfamily 3, member A1
  Uniprot ID: O00481
  ENST ID: ENST00000289361
  CDS Start-End: 369-1910
aatcaaaaaacttattcttccaaagagagattgttattattcctcacgatgacccgacagtctctgctttctttttcctttcttccagaaggagatttaaccatagtagaaagaatggagaactattaactgcctttcttctgtgggctgtgattttcagaggggaatgctaagaggtgattttcaatgttgggactcaaaggtgaagacactgaaggacagaatttttggcagaggaaagatcttcttcggtcaccatacttgagttagctctagggaagtggaggtttccatttggaattctatagcttcttccaggtcatagtgtctgccccccaccttccagtatctcctgatatgcagcatgaatgaaaatggcaagtttcctggccttccttctgctcaactttcgtgtctgcctccttttgcttcagctgctcatgcctcactcagctcagttttctgtgcttggaccctctgggcccatcctggccatggtgggtgaagacgctgatctgccctgtcacctgttcccgaccatgagtgcagagaccatggagctgaagtgggtgagttccagcctaaggcaggtggtgaacgtgtatgcagatggaaaggaagtggaagacaggcagagtgcaccgtatcgagggagaacttcgattctgcgggatggcatcactgcagggaaggctgctctccgaatacacaacgtcacagcctctgacagtggaaagtacttgtgttatttccaagatggtgacttctatgaaaaagccctggtggagctgaaggttgcagcactgggttctgatcttcacgttgatgtgaagggttacaaggatggagggatccatctggagtgcaggtccactggctggtacccccaaccccaaatacagtggagcaacaacaagggagagaacatcccgactgtggaagcacctgtggttgcagacggagtgggcctgtatgcagtagcagcatctgtgatcatgagaggcagctctggggagggtgtatcctgtaccatcagaagttccctcctcggcctggaaaagacagccagcatttccatcgcagaccccttcttcaggagcgcccagaggtggatcgccgccctggcagggaccctgcctgtcttgctgctgcttcttgggggagccggttacttcctgtggcaacagcaggaggaaaaaaagactcagttcagaaagaaaaagagagagcaagagttgagagaaatggcatggagcacaatgaagcaagaacaaagcacaagagtgaagctcctggaggaactcagatggagaagtatccagtatgcatctcggggagagagacattcagcctataatgaatggaaaaaggccctcttcaagcctgcggatgtgattctggatccaaaaacagcaaaccccatcctccttgtttctgaggaccagaggagtgtgcagcgtgccaaggagccccaggatctgccagacaaccctgagagatttaattggcattattgtgttctcggctgtgagagcttcatatcagggagacattactgggaggtggaggtaggggacaggaaagagtggcatataggggtgtgcagtaagaatgtgcagagaaaaggctgggtcaaaatgacacctgagaatggattctggactatggggctgactgatgggaataagtatcggactctaactgagcccagaaccaacctgaaacttcctaagccccctaagaaagtgggggtcttcctggactatgagactggagatatctcattctacaatgctgtggatggatcgcatattcatactttcctggacgtctccttctctgaggctctatatcctgttttcagaattttgaccttggagcccacggccctgactatttgtccagcgtgaaaagaagaagagagttcctccaattctgaccgagtgctgatcattccctagagacaccagtaaccccgggcttagctaacgaaagtggggagcctcaggctgaagtaacttttctctgcttctccctgcccagctcagagctgagggcctccccctccacagcaaccaatcacaaccataaagctacaagcacgcactgaagcactttactgatactcattcaattattcatatgacagttgtttgagtttggtaccatcttattttccccttatacagataaggaaactggggtgcagaaaagtgaattgactacaaagtagacatgactagttaacaacacagctgggatctaaacagcaataactaacattaatggagaacttaaaatgctctgagtgctgtgttatgagctttggtggatgtcactcctttaatcctcgcaacaccctgtcgggtagtctcatttagcaagtatggaagttgaggcagggcaacattaagcaacttacataactcatgcagtaatttctgcagttgggagatgttcagcttcagtccccggccctatggccgttcttttccaccctgtttcttcccccataggaagaacccacctgtagccctgaggttcttttcccaggatggctccaggataaggatcactgtaggtggttgtggagttgacacccctgttgactccttcccagctgattgtcagagccttagacccagcacgccttggattagctctgcagagtgtcttggttgagagaataacctcaccgtacccacatgacacgtgatttggaaagagactagaggccacacttgataaatcatggggaacagatgtgttccacccaacaaatgtgataagtgatcatgcagccagagccagccttccttcaatcaaggtttccaggcagagcaaataccctagagattctctgtgatataggaaatttggatgaagggagctagaagaaatacagggatttttttttttttttaagatggagtcttactctgttgctaggctggagtgcagtggtgcgatctcagctccctgcaacctccacctcctgggttcaaacaattctcctgcctcagcctcccgagtactgggaatataggtgcacgccaccacacccaacaaatttttgtacttttagtacagatgagggttcactatgttggccaggatggtctcgatctcttgacctcatgatccacccacctcggtctcccaaagtgctgggattacaggcttgagccaccgggtgaccggcttacagggatatttttaatcccgttatggactctgtctccaggagaggggtctatccacccctgctcattggtggatgttaaaccaatattcctttcaactgctgcctgctagggaaaaactactcctcattatcatcattattattgctctccactgtatcccctctacctggcatgtgcttgtcaagttctagttgttcaataaatttgttaataatgctgactcttcaa

SEQ ID NO: 112538 - DNA, 580 bp, Homo sapiens
  Payload ID: 2020
  Gene Symbol: BTN3A1
  Gene Name: butyrophilin, subfamily 3, member A1
  ENST ID: ENST00000450085
  CDS Start-End: 224-580
attcttccaaagagagattgttattattcctcacgatgacccgacagtctctgctttctttttcctttcttccagaaggagatttaaccatagtagaaagaatggagaactattaactgcctttcttctgtgggctgtgattttcagaggggaatgctaagagcttcttccaggtcatagtgtctgccccccaccttccagtatctcctgatatgcagcatgaatgaaaatggcaagtttcctggccttccttctgctcaactttcgtgtctgcctccttttgcttcagctgctcatgcctcactcagctcagttttctgtgcttggaccctctgggcccatcctggccatggtgggtgaagacgctgatctgccctgtcacctgttcccgaccatgagtgcagagaccatggagctgaagtgggtgagttccagcctaaggcaggtggtgaacgtgtatgcagatggaaaggaagtggaagacaggcagagtgcaccgtatcgagggagaacttcgattctgcgggatggcatcactgcagggaaggctgctctccgaatacacaacgtcacagcctct

SEQ ID NO: 112539 - DNA, 1882 bp, Homo sapiens
  Payload ID: 2020
  Gene Symbol: BTN3A1
  Gene Name: butyrophilin, subfamily 3, member A1
  Uniprot ID: O00481
  ENST ID: ENST00000425234
  CDS Start-End: 356-1492
attcttccaaagagagattgttattattcctcacgatgacccgacagtctctgctttctttttcctttcttccagaaggagatttaaccatagtagaaagaatggagaactattaactgcctttcttctgtgggctgtgattttcagaggggaatgctaagaggtgattttcaatgttgggactcaaaggtgaagacactgaaggacagaatttttggcagaggaaagatcttcttcggtcaccatacttgagttagctctagggaagtggaggtttccatttggaattctatagcttcttccaggtcatagtgtctgccccccaccttccagtatctcctgatatgcagcatgaatgaaaatggcaagtttcctggccttccttctgctcaactttcgtgtctgcctccttttgcttcagctgctcatgcctcactcagctcagttttctgtgcttggaccctctgggcccatcctggccatggtgggtgaagacgctgatctgccctgtcacctgttcccgaccatgagtgcagagaccatggagctgaagtgggtgagttccagcctaaggcaggtggtgaacgtgtatgcagatggaaaggaagtggaagacaggcagagtgcaccgtatcgagggagaacttcgattctgcgggatggcatcactgcagggaaggctgctctccgaatacacaacgtcacagcctctgacagtggaaagtacttgtgttatttccaagatggtgacttctatgaaaaagccctggtggagctgaaggttgcagcactgggttctgatcttcacgttgatgtgaagggttacaaggatggagggatccatctggagtgcaggtccactggctggtacccccaaccccaaatacagtggagcaacaacaagggagagaacatcccgactgtggaagcacctgtggttgcagacggagtgggcctgtatgcagtagcagcatctgtgatcatgagaggcagctctggggagggtgtatcctgtaccatcagaagttccctcctcggcctggaaaagacagccagcatttccatcgcagaccccttcttcaggagcgcccagaggtggatcgccgccctggcagggaccctgcctgtcttgctgctgcttcttgggggagccggttacttcctgtggcaacagcaggaggaaaaaaagactcagttcagaaagaaaaagagagagcaagagttgagagaaatggcatggagcacaatgaagcaagaacaaagcacaagagtgaagctcctggaggaactcagatggagaagtatccagtatgcatctcggggagagagacattcagcctataatgaatggaaaaaggccctcttcaagcctgggcctcccattggccaaacccaacagcaaaccagaggacaagggagcccagtggcactgtctcaggaatctgcccagaggacagattcctggggcccagaagagggtggagaaagctgaagggtggagagtgaatctagggcatataaggcaccacatagagcccagcacagagacggccttgcagctatcaggaagatgaggagcttccttcatggcctgctgtgggctgagtaaataacatgattgccttctacagcgctagagattcatttgtttatccccatttttcaggtgaggaaatgcttcagatgaggctccactttgttaaataaattggatgtatggaaaaatagactgcagaaaaggggaactcatttagctcatgagtggtcgaatgaaggttgaaaattaacctctgagtataaagcattagtgggcagagtgaatatggggagggaaacaagaaaaacgtagaaaggatccttgctgcttcctgaggccgcgtca

SEQ ID NO: 112540 - DNA, 570 bp, Homo sapiens
  Payload ID: 2020
  Gene Symbol: BTN3A1
  Gene Name: butyrophilin, subfamily 3, member A1
  ENST ID: ENST00000427334
  CDS Start-End: 441-570
aaagagagattgttattattcctcacgatgacccgacagtctctgctttctttttcctttcttccagaaggagatttaaccatagtagaaagaatggagaactattaactgcctttcttctgtgggctgtgattttcagaggggaatgctaagagatcttgttctcagaggccattcccagacccacagcaagagggattatggctgcaggcctcatgctcctttgttttggaagaaactgttgaggagtgattttcaatgttgggactcaaaggtgaagacactgaaggacagaatttttggcagaggaaagatcttcttcggtcaccatacttgagttagctctagggaagtggaggtttccatttggaattctatagcttcttccaggtcatagtgtctgccccccaccttccagtatctcctgatatgcagcatgaatgaaaatggcaagtttcctggccttccttctgctcaactttcgtgtctgcctccttttgcttcagctgctcatgcctcactcagctcagttttctgtgcttggaccctctgggcccatcctggccatgg

SEQ ID NO: 112541 - DNA, 2077 bp, Homo sapiens
  Payload ID: 2020
  Gene Symbol: BTN3A1
  Gene Name: butyrophilin, subfamily 3, member A1
  Uniprot ID: O00481
  ENST ID: ENST00000414912
  CDS Start-End: 311-1696
agtctctgctttctttttcctttcttccagaaggagatttaaccatagtagaaagaatggagaactattaactgcctttcttctgtgggctgtgattttcagaggggaatgctaagaggtgattttcaatgttgggactcaaaggtgaagacactgaaggacagaatttttggcagaggaaagatcttcttcggtcaccatacttgagttagctctagggaagtggaggtttccatttggaattctatagcttcttccaggtcatagtgtctgccccccaccttccagtatctcctgatatgcagcatgaatgaaaatggcaagtttcctggccttccttctgctcaactttcgtgtctgcctccttttgcttcagctgctcatgcctcactcagctcagttttctgtgcttggaccctctgggcccatcctggccatggtgggtgaagacgctgatctgccctgtcacctgttcccgaccatgagtgcagagaccatggagctgaagtgggtgagttccagcctaaggcaggtggtgaacgtgtatgcagatggaaaggaagtggaagacaggcagagtgcaccgtatcgagggagaacttcgattctgcgggatggcatcactgcagggaaggctgctctccgaatacacaacgtcacagcctctgacagtggaaagtacttgtgttatttccaagatggtgacttctatgaaaaagccctggtggagctgaaggttgcagacggagtgggcctgtatgcagtagcagcatctgtgatcatgagaggcagctctggggagggtgtatcctgtaccatcagaagttccctcctcggcctggaaaagacagccagcatttccatcgcagaccccttcttcaggagcgcccagaggtggatcgccgccctggcagggaccctgcctgtcttgctgctgcttcttgggggagccggttacttcctgtggcaacagcaggaggaaaaaaagactcagttcagaaagaaaaagagagagcaagagttgagagaaatggcatggagcacaatgaagcaagaacaaagcacaagagtgaagctcctggaggaactcagatggagaagtatccagtatgcatctcggggagagagacattcagcctataatgaatggaaaaaggccctcttcaagcctgcggatgtgattctggatccaaaaacagcaaaccccatcctccttgtttctgaggaccagaggagtgtgcagcgtgccaaggagccccaggatctgccagacaaccctgagagatttaattggcattattgtgttctcggctgtgagagcttcatatcagggagacattactgggaggtggaggtaggggacaggaaagagtggcatataggggtgtgcagtaagaatgtgcagagaaaaggctgggtcaaaatgacacctgagaatggattctggactatggggctgactgatgggaataagtatcggactctaactgagcccagaaccaacctgaaacttcctaagccccctaagaaagtgggggtcttcctggactatgagactggagatatctcattctacaatgctgtggatggatcgcatattcatactttcctggacgtctccttctctgaggctctatatcctgttttcagaattttgaccttggagcccacggccctgactatttgtccagcgtgaaaagaagaagagagttcctccaattctgaccgagtgctgatcattccctagagacaccagtaaccccgggcttagctaacgaaagtggggagcctcaggctgaagtaacttttctctgcttctccctgcccagctcagagctgagggcctccccctccacagcaaccaatcacaaccataaagctacaagcacgcactgaagcactttactgatactcattcaattattcatatgacagttgtttgagtttggtaccatcttattttccccttatacagataaggaaactggggtgcagaaaagtgaattgactacaaagtagacatgactagttaacaacacagctgggatctaaacagcaataactaacattaatggag

SEQ ID NO: 112542 - DNA, 1758 bp, Homo sapiens
  Payload ID: 2020
  Gene Symbol: BTN3A1
  Gene Name: butyrophilin, subfamily 3, member A1
  Uniprot ID: O00481
  ENST ID: ENST00000476549
  CDS Start-End: 199-1257
aatcaaaaaacttattcttccaaagagagattgttattattcctcacgatgacccgacagtctctgctttctttttcctttcttccagaaggagatttaaccatagtagaaagaatggagaactattaactgcctttcttctgtgggctgtgattttcagaggggaatgctaagagtatctcctgatatgcagcatgaatgaaaatggcaagtttcctggccttccttctgctcaactttcgtgtctgcctccttttgcttcagctgctcatgcctcactcagctcagttttctgtgcttggaccctctgggcccatcctggccatggtgggtgaagacgctgatctgccctgtcacctgttcccgaccatgagtgcagagaccatggagctgaagtgggtgagttccagcctaaggcaggtggtgaacgtgtatgcagatggaaaggaagtggaagacaggcagagtgcaccgtatcgagggagaacttcgattctgcgggatggcatcactgcagggaaggctgctctccgaatacacaacgtcacagcctctgacagtggaaagtacttgtgttatttccaagatggtgacttctatgaaaaagccctggtggagctgaaggttgcagcactgggttctgatcttcacgttgatgtgaagggttacaaggatggagggatccatctggagtgcaggtccactggctggtacccccaaccccaaatacagtggagcaacaacaagggagagaacatcccgactgtggaagcacctgtggttgcagacggagtgggcctgtatgcagtagcagcatctgtgatcatgagaggcagctctggggagggtgtatcctgtaccatcagaagttccctcctcggcctggaaaagacagccagcatttccatcgcagaccccttcttcaggagcgcccagaggtggatcgccgccctggcagggaccctgcctgtcttgctgctgcttcttgggggagccggttacttcctgtggcaacagcaggaggaaaaaaagactcagttcagaaagaaaaagagagagcaagagttgagagaaatggcatggagcacaatgaagcaagaacaaagcacaagagtgaagctcctggaggaactcagatggagaagtatccagtatgcatctcggggagagagacattcagcctataatgaatggaaaaaggccctcttcaagcctggtgaggaaatgcttcagatgaggctccactttgttaaataaattggatgtatggaaaaatagactgcagaaaaggggaactcatttagctcatgagtggtcgaatgaaggttgaaaattaacctctgagtataaagcattagtgggcagagtgaatatggggagggaaacaagaaaaacgtagaaaggatccttgctgcttcctgaggccgcgtcagggtattgggttaggcagagatgctgaggcaaccctcatttcaccctcctcttcccctctggacacaagatacctgatacctggggctttctctcctgacatcgatgagagagtcacatttagggcagactagggacaccaggctttggactcagacctcctcagcatggcccaggccttgcatgctgaggctctgaaatccaggaaaaatggttgacctcatggacacttcctcaaactctctgcagcggatgtgattctggatccaaaaacagcaaaccccatcctccttgtttctgaggaccagaggagtgtgcagcgtgcca

SEQ ID NO: 112543 - DNA, 619 bp, Homo sapiens
  Payload ID: 2020
  Gene Symbol: BTN3A1
  Gene Name: butyrophilin, subfamily 3, member A1
  ENST ID: ENST00000506698
  CDS Start-End: 345-619
attcctcacgatgacccgacagtctctgctttctttttcctttcttccagaaggagatttaaccatagtagaaagaatggagaactattaactgcctttcttctgtgggctgtgattttcagaggggaatgctaagagacatgtttttacaggtgattttcaatgttgggactcaaaggtgaagacactgaaggacagaatttttggcagaggaaagatcttcttcggtcaccatacttgagttagctctagggaagtggaggtttccatttggaattctatagcttcttccaggtcatagtgtctgccccccaccttccagtatctcctgatatgcagcatgaatgaaaatggcaagtttcctggccttccttctgctcaactttcgtgtctgcctccttttgcttcagctgctcatgcctcactcagctcagttttctgtgcttggaccctctgggcccatcctggccatggtgggtgaagacgctgatctgccctgtcacctgttcccgaccatgagtgcagagaccatggagctgaagtgggtgagttccagcctaaggcaggtggtgaacgtgtatgcagatggaaaggaagtggaagacaggcagagtgcacc

SEQ ID NO: 112544 - DNA, 3017 bp, Homo sapiens
  Payload ID: 2021
  Gene Symbol: BTN3A2
  Gene Name: butyrophilin, subfamily 3, member A2
  Uniprot ID: P78410
  ENST ID: ENST00000356386
  CDS Start-End: 189-1193
atttgctttctctttttcctttcttccggatgagaggctaagccataatagaaagaatggagaattattgattgaccgtctttattctgtgggctctgattctccaatgggaataccaagggatggttttccatactggaacccaaaggtaaagacactcaaggacagacatttttggcagagcatagatgaaaatggcaagttccctggctttccttctgctcaactttcatgtctccctcctcttggtccagctgctcactccttgctcagctcagttttctgtgcttggaccctctgggcccatcctggccatggtgggtgaagacgctgatctgccctgtcacctgttcccgaccatgagtgcagagaccatggagctgaagtgggtaagttccagcctaaggcaggtggtgaacgtgtatgcagatggaaaggaagtggaagacaggcagagtgcaccgtatcgagggagaacttcgattctgcgggatggcatcactgcagggaaggctgctctccgaatacacaacgtcacagcctctgacagtggaaagtacttgtgttatttccaagatggtgacttctatgaaaaagccctggtggagctgaaggttgcagcactgggttctaatcttcacgtcgaagtgaagggttatgaggatggagggatccatctggagtgcaggtccaccggctggtacccccaaccccaaatacagtggagcaacgccaagggagagaacatcccagctgtggaagcacctgtggttgcagatggagtgggcctatatgaagtagcagcatctgtgatcatgagaggcggctccggggagggtgtatcctgcatcatcagaaattccctcctcggcctggaaaagacagccagcatttccatcgcagaccccttcttcaggagcgcccagccctggatcgcagccctggcagggaccctgcctatcttgctgctgcttctcgccggagccagttacttcttgtggagacaacagaaggaaataactgctctgtccagtgagatagaaagtgagcaagagatgaaagaaatgggatatgctgcaacagagcgggaaataagcctaagagagagcctccaggaggaactcaagaggaaaaaaatccagtacttgactcgtggagaggagtcttcgtccgataccaataagtcagcctgatgctctaatggaaaaatggccctcttcaagcctggaaaaatggctgaccccatggacacctcctcaaactctctgcagcagatgtaattctgtatccagacatggcaaatgccatcctccttgtttctgaggaccagaggagtgtacagcgtgctgaggagccccatgacctaccagacaaccctgagagatttgaatggcgttactgtgtgcttggctgtgaaagcttcatgtcagagagacactactgggaggtggaagtgggggacagaaaagagtggcatattggggtatgtagtaagaacgtggagaggaaaaaagtttgggtcaaaatgacaccggagaacggatactggactatgggcctgactgatgggaataagtatcgggctctcactgagcccagaaccaacctgaaacttcctgagcctcctaggaaagtgggggtcatcctggactatgagactggacatatctcgttctacaatgccacggatggatctcatatctacacatttctgcacgcctcttcctctgagcctctgtatcctgtattcagaattttgaccttggagcccactgccctgaccgtttgcccaataccaaaagtagagagttcccccgatcccgacctagtgcctgatcattccctggagataccactgaccccaggcttagctaatgaaagtggggagcctcaggctgaagtaacatctctgcttctccctgcccagcctggagctaagggtctcaccctccacaacagccagtcagaaccataaagctacaggcacacactgaagcactttactgatattcattcaattattccataggacagttgtttgagtttggtgccaccttattggcccctttatacagataaggaaactggggtgtagaaaagtgtattgactttacaaagcagacaggaatagtgaacaacagagctgggatctgaacaacaatgactaacattaatggagaatttaaaacgttctgagtgctgtgttatgagctttggtgggtgtcactcctttaatcctcacaacaccctgtcaggtagtctcatttggcaagtatggaagcagaggcagggcaacattaagtagcttacataactcacacggtaatttgtgcagttgggagatgttcagcttcagtccctggccaattgcccgttcttttccagcctgatttttcctgcatgggaagagcccacatgtagccctgaggttcccttcccaggacagctccaggatcgagatcactgtgagtggttgtggagttaagacccctatggactccttcccagctgattatcagagccttagacccagcactccttggattggctctgcagagtgtcttggttgagagaataacgttgcagttcccacagggcatgtgactttgaaagagactagaggccacactcagttaataatggggcacagatgtgttcccacccaacaaatgtgataagtgatcgtgcagccagagccagccttccttcagtcaaggtttccaggcagagcaaataccctagagattctctgtaatattggtaatttggatgaaggaagctagaagaattacagggatgtttttaatcccactatggactcagtctcctggaaaaggatctgtccactcctggtcattggtggatgttaaacccatattcctttcaactgctgcctgctagggaaaactgctcctcattatcatcactattattgctcaccactgtatcccctctactgggcaagtgcttgtcaagttctagttgttcaataaatttgttaataatgctgactcttc

SEQ ID NO: 112545 - DNA, 1634 bp, Homo sapiens
  Payload ID: 2021
  Gene Symbol: BTN3A2
  Gene Name: butyrophilin, subfamily 3, member A2
  Uniprot ID: P78410
  ENST ID: ENST00000377708
  CDS Start-End: 156-1160
gaggctaagccataatagaaagaatggagaattattgattgaccgtctttattctgtgggctctgattctccaatgggaataccaagggatggttttccatactggaacccaaaggtaaagacactcaaggacagacatttttggcagagcatagatgaaaatggcaagttccctggctttccttctgctcaactttcatgtctccctcctcttggtccagctgctcactccttgctcagctcagttttctgtgcttggaccctctgggcccatcctggccatggtgggtgaagacgctgatctgccctgtcacctgttcccgaccatgagtgcagagaccatggagctgaagtgggtaagttccagcctaaggcaggtggtgaacgtgtatgcagatggaaaggaagtggaagacaggcagagtgcaccgtatcgagggagaacttcgattctgcgggatggcatcactgcagggaaggctgctctccgaatacacaacgtcacagcctctgacagtggaaagtacttgtgttatttccaagatggtgacttctatgaaaaagccctggtggagctgaaggttgcagcactgggttctaatcttcacgtcgaagtgaagggttatgaggatggagggatccatctggagtgcaggtccaccggctggtacccccaaccccaaatacagtggagcaacgccaagggagagaacatcccagctgtggaagcacctgtggttgcagatggagtgggcctatatgaagtagcagcatctgtgatcatgagaggcggctccggggagggtgtatcctgcatcatcagaaattccctcctcggcctggaaaagacagccagcatttccatcgcagaccccttcttcaggagcgcccagccctggatcgcagccctggcagggaccctgcctatcttgctgctgcttctcgccggagccagttacttcttgtggagacaacagaaggaaataactgctctgtccagtgagatagaaagtgagcaagagatgaaagaaatgggatatgctgcaacagagcgggaaataagcctaagagagagcctccaggaggaactcaagaggaaaaaaatccagtacttgactcgtggagaggagtcttcgtccgataccaataagtcagcctgatgctctaatggaaaaatggccctcttcaagcctggtgaggaaatgcttcagatgaggctccaccttgttaaataaattggatgtatggaaaaatagactgcagaaaaggggaactcatttagctcacgagtggtcgagtgaagattgaaaattaacctctgagggccagcacagcagctcatgcctgtaatcctagcactttggaaggctgaggagggcggatcacaaggtcaggagatcaagaccatcctggctaacacggtgaaaccccgtctctactaaaaatacaaaaaataaaaaattagccgggcatggtgacgggcacctgtagtcccagctactcgggaggctgaggcaggagaatggcatgaacccggaaggcagagcttgcagtgagccgagatcacgccactgcactccagcctgggagacagagcgagactctgtctcaagaaaaaaaaaaaaaaaaaaaaa

SEQ ID NO: 112546 - DNA, 3672 bp, Homo sapiens
  Payload ID: 2021
  Gene Symbol: BTN3A2
  Gene Name: butyrophilin, subfamily 3, member A2
  Uniprot ID: P78410
  ENST ID: ENST00000396934
  CDS Start-End: 179-1114
acctctgagccaatcaaaaaactaattcttccaaagagcgactcttactgtttctcatggtgagaagacaatatttgctttctctttttcctttcttccggatgagaggctaagccataatagaaagaatggagaattattgattgaccgtctttattctgtgggctctgattctccaatgggaataccaagggctcagttttctgtgcttggaccctctgggcccatcctggccatggtgggtgaagacgctgatctgccctgtcacctgttcccgaccatgagtgcagagaccatggagctgaagtgggtaagttccagcctaaggcaggtggtgaacgtgtatgcagatggaaaggaagtggaagacaggcagagtgcaccgtatcgagggagaacttcgattctgcgggatggcatcactgcagggaaggctgctctccgaatacacaacgtcacagcctctgacagtggaaagtacttgtgttatttccaagatggtgacttctatgaaaaagccctggtggagctgaaggttgcagcactgggttctaatcttcacgtcgaagtgaagggttatgaggatggagggatccatctggagtgcaggtccaccggctggtacccccaaccccaaatacagtggagcaacgccaagggagagaacatcccagctgtggaagcacctgtggttgcagatggagtgggcctatatgaagtagcagcatctgtgatcatgagaggcggctccggggagggtgtatcctgcatcatcagaaattccctcctcggcctggaaaagacagccagcatttccatcgcagaccccttcttcaggagcgcccagccctggatcgcagccctggcagggaccctgcctatcttgctgctgcttctcgccggagccagttacttcttgtggagacaacagaaggaaataactgctctgtccagtgagatagaaagtgagcaagagatgaaagaaatgggatatgctgcaacagagcgggaaataagcctaagagagagcctccaggaggaactcaagaggaaaaaaatccagtacttgactcgtggagaggagtcttcgtccgataccaataagtcagcctgatgctctaatggaaaaatggccctcttcaagcctggtgaggaaatgcttcagatgaggctccaccttgttaaataaattggatgtatggaaaaatagactgcagaaaaggggaactcatttagctcacgagtggtcgagtgaagattgaaaattaacctctgagggccagcacagcagctcatgcctgtaatcctagcactttggaaggctgaggagggcggatcacaaggtcaggagatcaagaccatcctggctaacacggtgaaaccccgtctctactaaaaatacaaaaaataaaaaattagccgggcatggtgacgggcacctgtagtcccagctactcgggaggctgaggcaggagaatggcatgaacccggaaggcagagcttgcagtgagccgagatcacgccactgcactccagcctgggagacagagcgagactctgtctcaagaaaaaaaaaaaaaaaaaaaaagaaaagaaaattaacctctgagtataaagcatcagtgggcagaatcaatgtggggagggaaacaacaaaaatgtagaaagaggatccttgttgcttcttggggccgcatcagggtattgggttaggcagatactgaccttactttcatttcccctctggtcactagacccctggggctttcaccaatgacattgatgagagaatcacattcagggcaggctagggacacggggttctggaaggacctcctcagcatggcccaagccttgcatgctgtggctcttaaatccaggaaaaatggctgaccccatggacacctcctcaaactctctgcagcagatgtaattctgtatccagacatggcaaatgccatcctccttgtttctgaggaccagaggagtgtacagcgtgctgaggagccccatgacctaccagacaaccctgagagatttgaatggcgttactgtgtgcttggctgtgaaagcttcatgtcagagagacactactgggaggtggaagtgggggacagaaaagagtggcatattggggtatgtagtaagaacgtggagaggaaaaaagtttgggtcaaaatgacaccggagaacggatactggactatgggcctgactgatgggaataagtatcgggctctcactgagcccagaaccaacctgaaacttcctgagcctcctaggaaagtgggggtcatcctggactatgagactggacatatctcgttctacaatgccacggatggatctcatatctacacatttctgcacgcctcttcctctgagcctctgtatcctgtattcagaattttgaccttggagcccactgccctgaccgtttgcccaataccaaaagtagagagttcccccgatcccgacctagtgcctgatcattccctggagataccactgaccccaggcttagctaatgaaagtggggagcctcaggctgaagtaacatctctgcttctccctgcccagcctggagctaagggtctcaccctccacaacagccagtcagaaccataaagctacaggcacacactgaagcactttactgatattcattcaattattccataggacagttgtttgagtttggtgccaccttattggcccctttatacagataaggaaactggggtgtagaaaagtgtattgactttacaaagcagacaggaatagtgaacaacagagctgggatctgaacaacaatgactaacattaatggagaatttaaaacgttctgagtgctgtgttatgagctttggtgggtgtcactcctttaatcctcacaacaccctgtcaggtagtctcatttggcaagtatggaagcagaggcagggcaacattaagtagcttacataactcacacggtaatttgtgcagttgggagatgttcagcttcagtccctggccaattgcccgttcttttccagcctgatttttcctgcatgggaagagcccacatgtagccctgaggttcccttcccaggacagctccaggatcgagatcactgtgagtggttgtggagttaagacccctatggactccttcccagctgattatcagagccttagacccagcactccttggattggctctgcagagtgtcttggttgagagaataacgttgcagttcccacagggcatgtgactttgaaagagactagaggccacactcagttaataatggggcacagatgtgttcccacccaacaaatgtgataagtgatcgtgcagccagagccagccttccttcagtcaaggtttccaggcagagcaaataccctagagattctctgtaatattggtaatttggatgaaggaagctagaagaattacagggatgtttttaatcccactatggactcagtctcctggaaaaggatctgtccactcctggtcattggtggatgttaaacccatattcctttcaactgctgcctgctagggaaaactgctcctcattatcatcactattattgctcaccactgtatcccctctactgggcaagtgcttgtcaagttctagttgttcaataaatttgttaataatgctgactcttcaa

SEQ ID NO: 112547 - DNA, 1494 bp, Homo sapiens
  Payload ID: 2021
  Gene Symbol: BTN3A2
  Gene Name: butyrophilin, subfamily 3, member A2
  Uniprot ID: P78410
  ENST ID: ENST00000396948
  CDS Start-End: 154-1158
ggctaagccataatagaaagaatggagaattattgattgaccgtctttattctgtgggctctgattctccaatgggaataccaagggatggttttccatactggaacccaaaggtaaagacactcaaggacagacatttttggcagagcatagatgaaaatggcaagttccctggctttccttctgctcaactttcatgtctccctcctcttggtccagctgctcactccttgctcagctcagttttctgtgcttggaccctctgggcccatcctggccatggtgggtgaagacgctgatctgccctgtcacctgttcccgaccatgagtgcagagaccatggagctgaagtgggtaagttccagcctaaggcaggtggtgaacgtgtatgcagatggaaaggaagtggaagacaggcagagtgcaccgtatcgagggagaacttcgattctgcgggatggcatcactgcagggaaggctgctctccgaatacacaacgtcacagcctctgacagtggaaagtacttgtgttatttccaagatggtgacttctatgaaaaagccctggtggagctgaaggttgcagcactgggttctaatcttcacgtcgaagtgaagggttatgaggatggagggatccatctggagtgcaggtccaccggctggtacccccaaccccaaatacagtggagcaacgccaagggagagaacatcccagctgtggaagcacctgtggttgcagatggagtgggcctatatgaagtagcagcatctgtgatcatgagaggcggctccggggagggtgtatcctgcatcatcagaaattccctcctcggcctggaaaagacagccagcatttccatcgcagaccccttcttcaggagcgcccagccctggatcgcagccctggcagggaccctgcctatcttgctgctgcttctcgccggagccagttacttcttgtggagacaacagaaggaaataactgctctgtccagtgagatagaaagtgagcaagagatgaaagaaatgggatatgctgcaacagagcgggaaataagcctaagagagagcctccaggaggaactcaagaggaaaaaaatccagtacttgactcgtggagaggagtcttcgtccgataccaataagtcagcctgatgctctaatggaaaaatggccctcttcaagcctgggcctcccattggccaaacacagcagcaaaccagaggacaagggagcccagtggcactgtccatagaggacagattcctggggtccagaagagggtggagaaagctgaaggctggagagtgaatctagggcatataaggccccacacagagcccagcacagagacggccttgcagctatcaggaagatgaggagcttccttcatggcctgctgtgggctgagtaaataatatgattgccttctacagcgctagagattcatatgtttatccccatttttcaggtgaggaaatgcttcagatg

SEQ ID NO: 112548 - DNA, 1460 bp, Homo sapiens
  Payload ID: 2021
  Gene Symbol: BTN3A2
  Gene Name: butyrophilin, subfamily 3, member A2
  Uniprot ID: P78410
  ENST ID: ENST00000527422
  CDS Start-End: 199-1203
atttgctttctctttttcctttcttccggatgagaggctaagccataatagaaagaatggagaattattgattgaccgtctttattctgtgggctctgattctccaatgggaataccaagggatattatttttacagatggttttccatactggaacccaaaggtaaagacactcaaggacagacatttttggcagagatgaaaatggcaagttccctggctttccttctgctcaactttcatgtctccctcctcttggtccagctgctcactccttgctcagctcagttttctgtgcttggaccctctgggcccatcctggccatggtgggtgaagacgctgatctgccctgtcacctgttcccgaccatgagtgcagagaccatggagctgaagtgggtaagttccagcctaaggcaggtggtgaacgtgtatgcagatggaaaggaagtggaagacaggcagagtgcaccgtatcgagggagaacttcgattctgcgggatggcatcactgcagggaaggctgctctccgaatacacaacgtcacagcctctgacagtggaaagtacttgtgttatttccaagatggtgacttctatgaaaaagccctggtggagctgaaggttgcagcactgggttctaatcttcacgtcgaagtgaagggttatgaggatggagggatccatctggagtgcaggtccaccggctggtacccccaaccccaaatacagtggagcaacgccaagggagagaacatcccagctgtggaagcacctgtggttgcagatggagtgggcctatatgaagtagcagcatctgtgatcatgagaggcggctccggggagggtgtatcctgcatcatcagaaattccctcctcggcctggaaaagacagccagcatttccatcgcagaccccttcttcaggagcgcccagccctggatcgcagccctggcagggaccctgcctatcttgctgctgcttctcgccggagccagttacttcttgtggagacaacagaaggaaataactgctctgtccagtgagatagaaagtgagcaagagatgaaagaaatgggatatgctgcaacagagcgggaaataagcctaagagagagcctccaggaggaactcaagaggaaaaaaatccagtacttgactcgtggagaggagtcttcgtccgataccaataagtcagcctgatgctctaatggaaaaatggccctcttcaagcctgggcctcccattggccaaacacagcagcaaaccagaggacaagggagcccagtggcactgtccatagaggacagattcctggggtccagaagagggtggagaaagctgaaggctggagagtgaatctagggcatataaggccccacacagagcccagcacagagacggccttgcagctatcaggaagatgaggagcttccttcatggcctgctgtgggctgagt

SEQ ID NO: 112549 - DNA, 593 bp, Homo sapiens
  Payload ID: 2021
  Gene Symbol: BTN3A2
  Gene Name: butyrophilin, subfamily 3, member A2
  ENST ID: ENST00000527417
  CDS Start-End: 115-593
aatcaaaaaactaattcttccaaagagcgactcttactgtttctcatgatggttttccatactggaacccaaaggtaaagacactcaaggacagacatttttggcagagcatagatgaaaatggcaagttccctggctttccttctgctcaactttcatgtctccctcctcttggtccagctgctcactccttgctcagctcagttttctgtgcttggaccctctgggcccatcctggccatggtgggtgaagacgctgatctgccctgtcacctgttcccgaccatgagtgcagagaccatggagctgaagtgggtaagttccagcctaaggcaggtggtgaacgtgtatgcagatggaaaggaagtggaagacaggcagagtgcaccgtatcgagggagaacttcgattctgcgggatggcatcactgcagggaaggctgctctccgaatacacaacgtcacagcctctgacagtggaaagtacttgtgttatttccaagatggtgacttctatgaaaaagccctggtggagctgaaggttgcagaccccttcttcaggagcgcccagccctggatcgcagccctggcagg

SEQ ID NO: 112550 - DNA, 515 bp, Homo sapiens
  Payload ID: 2021
  Gene Symbol: BTN3A2
  Gene Name: butyrophilin, subfamily 3, member A2
  ENST ID: ENST00000524459
  CDS Start-End: 192-323
aatatttgctttctctttttcctttcttccggatgagaggctaagccataatagaaagaatggagaattattgattgaccgtctttattctgtgggctctgattctccaatgggaataccaagggatggttttccatactggaacccaaaggtaaagacactcaaggacagacatttttggcagagcatagatgaaaatggcaagttccctggctttccttctgctcaactttcatgtctccctcctcttggtccagctgctcactccttgctcaggattgtgttcccctctaggttctctgtatctcgccttccctgtctgagaaggacccttcctctcatgaccccaactccaaaaccctctgatggagcttcccccttgtgctgacagctcagttttctgtgcttggaccctctgggcccatcctggccatgatggaaaggaagtggaagacaggcagagtgcaccgtatcgagggagaacttcgattctgcgggatggcatcactgcaggg

SEQ ID NO: 112551 - DNA, 496 bp, Homo sapiens
  Payload ID: 2021
  Gene Symbol: BTN3A2
  Gene Name: butyrophilin, subfamily 3, member A2
  ENST ID: ENST00000530653
  CDS Start-End: 151-496
aatcaaaaaactaattcttccaaagagcgactcttactgtttctcatgatggttttccatactggaacccaaaggtaaagacactcaaggacagacatttttggcagagctcagttttctgtgcttggaccctctgggcccatcctggccatggtgggtgaagacgctgatctgccctgtcacctgttcccgaccatgagtgcagagaccatggagctgaagtgggtaagttccagcctaaggcaggtggtgaacgtgtatgcagatggaaaggaagtggaagacaggcagagtgcaccgtatcgagggagaacttcgattctgcgggatggcatcactgcagggaaggctgctctccgaatacacaacgtcacagcctctgacagtggaaagtacttgtgttatttccaagatggtgacttctatgaaaaagccctggtggagctgaaggttgcagcactgggttctaatcttcacgtcgaagtgaagggttatg

SEQ ID NO: 112552 - DNA, 885 bp, Homo sapiens
  Payload ID: 2021
  Gene Symbol: BTN3A2
  Gene Name: butyrophilin, subfamily 3, member A2
  ENST ID: ENST00000532865
  CDS Start-End: 297-885
acctctgagccaatcaaaaaactaattcttccaaagagcgactcttactgtttctcatggtgagaagacaatatttgctttctctttttcctttcttccggatgagaggctaagccataatagaaagaatggagaattattgattgaccgtctttattctgtgggctctgattctccaatgggaataccaagggatggttttccatactggaacccaaaggtaaagacactcaaggacagacatttttggcagagctcagttttctgtgcttggaccctctgggcccatcctggccatggtgggtgaagacgctgatctgccctgtcacctgttcccgaccatgagtgcagagaccatggagctgaagtgggtaagttccagcctaaggcaggtggtgaacgtgtatgcagatggaaaggaagtggaagacaggcagagtgcaccgtatcgagggagaacttcgattctgcgggatggcatcactgcagggaaggctgctctccgaatacacaacgtcacagcctctgacagtggaaagtacttgtgttatttccaagatggtgacttctatgaaaaagccctggtggagctgaaggttgcagcactgggttctaatcttcacgtcgaagtgaagggttatgaggatggagggatccatctggagtgcaggtccaccggctggtacccccaaccccaaatacagtggagcaacgccaagggagagaacatcccagctgtggaagcacctgtggttgcagatggagtgggcctatatgaagtagcagcatctgtgatcatgagaggcggctccggggagggtgtatcctgcatcatcagaaattccctcctcggcctggaaaagacagccagcatttccatcgcag

SEQ ID NO: 112553 - DNA, 3733 bp, Homo sapiens
  Payload ID: 2021
  Gene Symbol: BTN3A2
  Gene Name: butyrophilin, subfamily 3, member A2
  Uniprot ID: P78410
  ENST ID: ENST00000508906
  CDS Start-End: 297-1175
acctctgagccaatcaaaaaactaattcttccaaagagcgactcttactgtttctcatggtgagaagacaatatttgctttctctttttcctttcttccggatgagaggctaagccataatagaaagaatggagaattattgattgaccgtctttattctgtgggctctgattctccaatgggaataccaagggatggttttccatactggaacccaaaggtaaagacactcaaggacagacatttttggcagagctcagttttctgtgcttggaccctctgggcccatcctggccatggtgggtgaagacgctgatctgccctgtcacctgttcccgaccatgagtgcagagaccatggagctgaagtgggtaagttccagcctaaggcaggtggtgaacgtgtatgcagatggaaaggaagtggaagacaggcagagtgcaccgtatcgagggagaacttcgattctgcgggatggcatcactgcagggaaggctgctctccgaatacacaacgtcacagcctctgacagtggaaagtacttgtgttatttccaagatggtgacttctatgaaaaagccctggtggagctgaaggttgcagcactgggttctaatcttcacgtcgaagtgaagggttatgaggatggagggatccatctggagtgcaggtccaccggctggtacccccaaccccaaatacagtggagcaacgccaagggagagaacatcccagctgtggaagcacctgtggttgcagatggagtgggcctatatgaagtagcagcatctgtgatcatgagaggcggctccggggagggtgtatcctgcatcatcagaaattccctcctcggcctggaaaagacagccagcatttccatcgcagaccccttcttcaggagcgcccagccctggatcgcagccctggcagggaccctgcctatcttgctgctgcttctcgccggagccagttacttcttgtggagacaacagaaggaaataactgctctgtccagtgagatagaaagtgagcaagagatgaaagaaatgggatatgctgcaacagagcgggaaataagcctaagagagagcctccaggaggaactcaagaggaaaaaaatccagtacttgactcgtggagaggagtcttcgtccgataccaataagtcagcctgatgctctaatggaaaaatggccctcttcaagcctggtgaggaaatgcttcagatgaggctccaccttgttaaataaattggatgtatggaaaaatagactgcagaaaaggggaactcatttagctcacgagtggtcgagtgaagattgaaaattaacctctgagggccagcacagcagctcatgcctgtaatcctagcactttggaaggctgaggagggcggatcacaaggtcaggagatcaagaccatcctggctaacacggtgaaaccccgtctctactaaaaatacaaaaaataaaaaattagccgggcatggtgacgggcacctgtagtcccagctactcgggaggctgaggcaggagaatggcatgaacccggaaggcagagcttgcagtgagccgagatcacgccactgcactccagcctgggagacagagcgagactctgtctcaagaaaaaaaaaaaaaaaaaaaaagaaaagaaaattaacctctgagtataaagcatcagtgggcagaatcaatgtggggagggaaacaacaaaaatgtagaaagaggatccttgttgcttcttggggccgcatcagggtattgggttaggcagatactgaccttactttcatttcccctctggtcactagacccctggggctttcaccaatgacattgatgagagaatcacattcagggcaggctagggacacggggttctggaaggacctcctcagcatggcccaagccttgcatgctgtggctcttaaatccaggaaaaatggctgaccccatggacacctcctcaaactctctgcagcagatgtaattctgtatccagacatggcaaatgccatcctccttgtttctgaggaccagaggagtgtacagcgtgctgaggagccccatgacctaccagacaaccctgagagatttgaatggcgttactgtgtgcttggctgtgaaagcttcatgtcagagagacactactgggaggtggaagtgggggacagaaaagagtggcatattggggtatgtagtaagaacgtggagaggaaaaaagtttgggtcaaaatgacaccggagaacggatactggactatgggcctgactgatgggaataagtatcgggctctcactgagcccagaaccaacctgaaacttcctgagcctcctaggaaagtgggggtcatcctggactatgagactggacatatctcgttctacaatgccacggatggatctcatatctacacatttctgcacgcctcttcctctgagcctctgtatcctgtattcagaattttgaccttggagcccactgccctgaccgtttgcccaataccaaaagtagagagttcccccgatcccgacctagtgcctgatcattccctggagataccactgaccccaggcttagctaatgaaagtggggagcctcaggctgaagtaacatctctgcttctccctgcccagcctggagctaagggtctcaccctccacaacagccagtcagaaccataaagctacaggcacacactgaagcactttactgatattcattcaattattccataggacagttgtttgagtttggtgccaccttattggcccctttatacagataaggaaactggggtgtagaaaagtgtattgactttacaaagcagacaggaatagtgaacaacagagctgggatctgaacaacaatgactaacattaatggagaatttaaaacgttctgagtgctgtgttatgagctttggtgggtgtcactcctttaatcctcacaacaccctgtcaggtagtctcatttggcaagtatggaagcagaggcagggcaacattaagtagcttacataactcacacggtaatttgtgcagttgggagatgttcagcttcagtccctggccaattgcccgttcttttccagcctgatttttcctgcatgggaagagcccacatgtagccctgaggttcccttcccaggacagctccaggatcgagatcactgtgagtggttgtggagttaagacccctatggactccttcccagctgattatcagagccttagacccagcactccttggattggctctgcagagtgtcttggttgagagaataacgttgcagttcccacagggcatgtgactttgaaagagactagaggccacactcagttaataatggggcacagatgtgttcccacccaacaaatgtgataagtgatcgtgcagccagagccagccttccttcagtcaaggtttccaggcagagcaaataccctagagattctctgtaatattggtaatttggatgaaggaagctagaagaattacagggatgtttttaatcccactatggactcagtctcctggaaaaggatctgtccactcctggtcattggtggatgttaaacccatattcctttcaactgctgcctgctagggaaaactgctcctcattatcatcactattattgctcaccactgtatcccctctactgggcaagtgcttgtcaagttctagttgttcaataaatttgttaataatgctgactcttcaa

SEQ ID NO: 112554 - DNA, 509 bp, Homo sapiens
  Payload ID: 2021
  Gene Symbol: BTN3A2
  Gene Name: butyrophilin, subfamily 3, member A2
  ENST ID: ENST00000527639
  CDS Start-End: 1-348
agaggcggctccggggagggtgtatcctgcatcatcagaaattccctcctcggcctggaaaagacagccagcatttccatcgcagaccccttcttcaggagcgcccagccctggatcgcagccctggcagggaccctgcctatcttgctgctgcttctcgccggagccagttacttcttgtggagacaacagaaggaaataactgctctgtccagtgagatagaaagtgagcaagagatgaaagaaatgggatatgctgcaacagagcgggaaataagcctaagagagagcctccaggaggaactcaagaggaaaaaaatccagtacttgactcgtgagtggctttgacattttctctgaattcaaatctgttactctctctctgcttcattattttccagcccataagtcatagcccagggttgaaaagtggtcttggatccctttacccagaaaaagaaaacaagtgtggctctttggagaaaccacccagtgctttttctctctag

SEQ ID NO: 112555 - DNA, 3002 bp, Homo sapiens
  Payload ID: 2022
  Gene Symbol: BTN3A3
  Gene Name: butyrophilin, subfamily 3, member A3
  Uniprot ID: O00478
  ENST ID: ENST00000244519
  CDS Start-End: 244-1998
aatcaaaaaactaattcttccaaaaagagattgttattattcctcacaataaccagatagcctctgctttctttttcctttcttcggaatgagagactcaaccataatagaaagaatggagaactattaaccaccattcttcagtgggctgtgattttcagaggggaatactaagaaatggttttccatactggaacccaaaggtaaagacactcaaggacagacatttttggcagagcatagatgaaaatggcaagttccctggctttccttctgctcaactttcatgtctccctcttcttggtccagctgctcactccttgctcagctcagttttctgtgcttggaccctctgggcccatcctggccatggtgggtgaagacgctgatctgccctgtcacctgttcccgaccatgagtgcagagaccatggagctgaggtgggtgagttccagcctaaggcaggtggtgaacgtgtatgcagatggaaaggaagtggaagacaggcagagtgcaccgtatcgagggagaacttcgattctgcgggatggcatcactgcagggaaggctgctctccgaatacacaacgtcacagcctctgacagtggaaagtacttgtgttatttccaagatggtgacttctacgaaaaagccctggtggagctgaaggttgcagcattgggttctgatcttcacattgaagtgaagggttatgaggatggagggatccatctggagtgcaggtccactggctggtacccccaaccccaaataaagtggagcgacaccaagggagagaacatcccggctgtggaagcacctgtggttgcagatggagtgggcctgtatgcagtagcagcatctgtgatcatgagaggcagctctggtgggggtgtatcctgcatcatcagaaattccctcctcggcctggaaaagacagccagcatatccatcgcagaccccttcttcaggagcgcccagccctggatcgcggccctggcagggaccctgcctatctcgttgctgcttctcgcaggagccagttacttcttgtggagacaacagaaggaaaaaattgctctgtccagggagacagaaagagagcgagagatgaaagaaatgggatacgctgcaacagagcaagaaataagcctaagagagaagctccaggaggaactcaagtggaggaaaatccagtacatggctcgtggagagaagtctttggcctatcatgaatggaaaatggccctcttcaaacctgcggatgtgattctggatccagacacggcaaacgccatcctccttgtttctgaggaccagaggagtgtgcagcgtgctgaagagccgcgggatctgccagacaaccctgagagatttgaatggcgttactgtgtccttggctgtgaaaacttcacatcagggagacattactgggaggtggaagtgggggacagaaaagagtggcatattggggtatgtagtaagaacgtggagaggaaaaaaggttgggtcaaaatgacaccggagaacggatactggactatgggcctgactgatgggaataagtatcgggctctcactgagcccagaaccaacctgaaacttcctgagcctcctaggaaagtggggatcttcctggactatgagactggagagatctcgttctataatgccacagatggatctcatatctacacctttccgcacgcctctttctctgagcctctatatcctgttttcagaattttgaccttggagcccactgccctgaccatttgcccaataccaaaagaagtagagagttcccccgatcctgacctagtgcctgatcattccctggagacaccactgaccccgggcttagctaatgaaagtggggagcctcaggctgaagtaacatctctgcttctccctgcccaccctggagctgaggtctccccttctgcaacaaccaatcagaaccataagctacaggcacgcactgaagcactttactgatattcattccattattccatatgacagttgttttgagtttcgtaccaccttattgtccccttatacagataaggaaactggggtgcagaaaggtgaattaactttacaaagtagacatgacaagtgaacagcagagctgggatctaaacagcaataactaacattaacagagaatttaaaatgttcttagtgctgtgttataagctttggtggatgtcactcctttaatcctcacaacaccctgtcgggtagtcatattttgcaagtatggaagctgaggcagggcaacatgaagtaacttacataactcatacagtaatttgtgcagttgggagatgttcagccttagtccctggctaattgcctgttcttttccagcctgattttttttcccacaggaagagcccacatgtagccctgaggtttccttcccaggacagctgcagggtagagatcattttaagtgcttgtggagttgacatccctattgactctttcccagctgatatcagagacttagacccagcactccttggattagctctgcagagtgtcttggttgagagaataacctcatagtaccaacatgacatgtgacttggaaagagactagaggccacacttgataaatcatggggcacagatatgttcccacccaacaaatgtgataagtgattgtgcagccagagccagccttccttcaatcaaggtttccaggcagagcaaataccctagagattctctgtgatataggaaatttggatcaaggaagctaaaagaattacagggatgtttttaatcccactatggactcagtctcctggaaataggtctgtccactcctggtcattggtggatgttaaacccatattcctttcaactgctgcctgctagggaaaactgctcctcattatcatcactattattgctcaccactgtatcccctctacttggcaagtggttgtcaagttctagttgttcaataaatgtgttaataatgctta

SEQ ID NO: 112556 - DNA, 2294 bp, Homo sapiens
  Payload ID: 2022
  Gene Symbol: BTN3A3
  Gene Name: butyrophilin, subfamily 3, member A3
  Uniprot ID: O00478
  ENST ID: ENST00000361232
  CDS Start-End: 283-1890
cttccaaaaagagattgttattattcctcacaataaccagatagcctctgctttctttttcctttcttcggaatgagagactcaaccataatagaaagaatggagaactattaaccaccattcttcagtgggctgtgattttcagaggggaatactaagaaatggttttccatactggaacccaaaggtaaagacactcaaggacagacatttttggcagagctgctcactccttgctcagctcagttttctgtgcttggaccctctgggcccatcctggccatggtgggtgaagacgctgatctgccctgtcacctgttcccgaccatgagtgcagagaccatggagctgaggtgggtgagttccagcctaaggcaggtggtgaacgtgtatgcagatggaaaggaagtggaagacaggcagagtgcaccgtatcgagggagaacttcgattctgcgggatggcatcactgcagggaaggctgctctccgaatacacaacgtcacagcctctgacagtggaaagtacttgtgttatttccaagatggtgacttctacgaaaaagccctggtggagctgaaggttgcagcattgggttctgatcttcacattgaagtgaagggttatgaggatggagggatccatctggagtgcaggtccactggctggtacccccaaccccaaataaagtggagcgacaccaagggagagaacatcccggctgtggaagcacctgtggttgcagatggagtgggcctgtatgcagtagcagcatctgtgatcatgagaggcagctctggtgggggtgtatcctgcatcatcagaaattccctcctcggcctggaaaagacagccagcatatccatcgcagaccccttcttcaggagcgcccagccctggatcgcggccctggcagggaccctgcctatctcgttgctgcttctcgcaggagccagttacttcttgtggagacaacagaaggaaaaaattgctctgtccagggagacagaaagagagcgagagatgaaagaaatgggatacgctgcaacagagcaagaaataagcctaagagagtggaggaaaatccagtacatggctcgtggagagaagtctttggcctatcatgaatggaaaatggccctcttcaaacctgcggatgtgattctggatccagacacggcaaacgccatcctccttgtttctgaggaccagaggagtgtgcagcgtgctgaagagccgcgggatctgccagacaaccctgagagatttgaatggcgttactgtgtccttggctgtgaaaacttcacatcagggagacattactgggaggtggaagtgggggacagaaaagagtggcatattggggtatgtagtaagaacgtggagaggaaaaaaggttgggtcaaaatgacaccggagaacggatactggactatgggcctgactgatgggaataagtatcgggctctcactgagcccagaaccaacctgaaacttcctgagcctcctaggaaagtggggatcttcctggactatgagactggagagatctcgttctataatgccacagatggatctcatatctacacctttccgcacgcctctttctctgagcctctatatcctgttttcagaattttgaccttggagcccactgccctgaccatttgcccaataccaaaagaagtagagagttcccccgatcctgacctagtgcctgatcattccctggagacaccactgaccccgggcttagctaatgaaagtggggagcctcaggctgaagtaacatctctgcttctccctgcccaccctggagctgaggtctccccttctgcaacaaccaatcagaaccataagctacaggcacgcactgaagcactttactgatattcattccattattccatatgacagttgttttgagtttcgtaccaccttattgtccccttatacagataaggaaactggggtgcagaaaggtgaattaactttacaaagtagacatgacaagtgaacagcagagctgggatctaaacagcaataactaacattaacagagaatttaaaatgttcttagtgctgtgttataagctttggtggatgtcactcctttaatcctcacaacaccctgtcgggtagtcatattttgcaagtatggaagctgaggcagggcaacatgaagtaacttacataactcatacagtaatttgtgcagttgggagatgttcagccttagtccctggctaattgcctgttcttttccagcctgattttttttcccacaggaagag

SEQ ID NO: 112557 - DNA, 671 bp, Homo sapiens
  Payload ID: 2022
  Gene Symbol: BTN3A3
  Gene Name: butyrophilin, subfamily 3, member A3
  ENST ID: ENST00000494393
  CDS Start-End: 259-671
aatcaaaaaactaattcttccaaaaagagattgttattattcctcacaataaccagatagcctctgctttctttttcctttcttcggaatgagagactcaaccataatagaaagaatggagaactattaaccaccattcttcagtgggctgtgattttcagaggggaatactaagaaatattatttttacagatggttttccatactggaacccaaaggtaaagacactcaaggacagacatttttggcagagcatagatgaaaatggcaagttccctggctttccttctgctcaactttcatgtctccctcttcttggtccagctgctcactccttgctcagctcagttttctgtgcttggaccctctgggcccatcctggccatggtgggtgaagacgctgatctgccctgtcacctgttcccgaccatgagtgcagagaccatggagctgaggtgggtgagttccagcctaaggcaggtggtgaacgtgtatgcagatggaaaggaagtggaagacaggcagagtgcaccgtatcgagggagaacttcgattctgcgggatggcatcactgcagggaaggctgctctccgaatacacaacgtcacagcctctgacagtggaaagtacttgtgttatttccaagatggtgacttctacgaaaaagccct

SEQ ID NO: 112558 - DNA, 697 bp, Homo sapiens
  Payload ID: 2022
  Gene Symbol: BTN3A3
  Gene Name: butyrophilin, subfamily 3, member A3
  ENST ID: ENST00000471353
  CDS Start-End: 276-697
aaaaaactaattcttccaaaaagagattgttattattcctcacaataaccagatagcctctgctttctttttcctttcttcggaatgagagactcaaccataatagaaagaatggagaactattaaccaccattcttcagtgggctgtgattttcagaggggaatactaagaaatggttttccatactggaacccaaaggtaaagacactcaaggacagacatttttggcagagctcagttttctgtgcttggaccctctgggcccatcctggccatggtgggtgaagacgctgatctgccctgtcacctgttcccgaccatgagtgcagagaccatggagctgaggtgggtgagttccagcctaaggcaggtggtgaacgtgtatgcagatggaaaggaagtggaagacaggcagagtgcaccgtatcgagggagaacttcgattctgcgggatggcatcactgcagggaaggctgctctccgaatacacaacgtcacagcctctgacagtggaaagtacttgtgttatttccaagatggtgacttctacgaaaaagccctggtggagctgaaggttgcagcattgggttctgatcttcacattgaagtgaagggttatgaggatggagggatccatctggagtgcaggtccactggctggtacccccaaccccaaataaagtggagcgacaccaa

SEQ ID NO: 112559 - DNA, 626 bp, Homo sapiens
  Payload ID: 2022
  Gene Symbol: BTN3A3
  Gene Name: butyrophilin, subfamily 3, member A3
  ENST ID: ENST00000482451
  CDS Start-End: 244-626
aatcaaaaaactaattcttccaaaaagagattgttattattcctcacaataaccagatagcctctgctttctttttcctttcttcggaatgagagactcaaccataatagaaagaatggagaactattaaccaccattcttcagtgggctgtgattttcagaggggaatactaagaaatggttttccatactggaacccaaaggtaaagacactcaaggacagacatttttggcagagcatagatgaaaatggcaagttccctggctttccttctgctcaactttcatgtctccctcttcttggtccagctgctcactccttgctcagacgctgatctgccctgtcacctgttcccgaccatgagtgcagagaccatggagctgaggtgggtgagttccagcctaaggcaggtggtgaacgtgtatgcagatggaaaggaagtggaagacaggcagagtgcaccgtatcgagggagaacttcgattctgcgggatggcatcactgcagggaaggctgctctccgaatacacaacgtcacagcctctgacagtggaaagtacttgtgttatttccaagatggtgacttctacgaaaaagccctggtggagctgaaggttgcagcatt

SEQ ID NO: 112560 - DNA, 883 bp, Homo sapiens
  Payload ID: 2022
  Gene Symbol: BTN3A3
  Gene Name: butyrophilin, subfamily 3, member A3
  ENST ID: ENST00000487272
  CDS Start-End: 133-883
gaatgagagactcaaccataatagaaagaatggagaactattaaccaccattcttcagtgggctgtgattttcagaggggaatactaagaactcagttttctgtgcttggaccctctgggcccatcctggccatggtgggtgaagacgctgatctgccctgtcacctgttcccgaccatgagtgcagagaccatggagctgaggtgggtgagttccagcctaaggcaggtggtgaacgtgtatgcagatggaaaggaagtggaagacaggcagagtgcaccgtatcgagggagaacttcgattctgcgggatggcatcactgcagggaaggctgctctccgaatacacaacgtcacagcctctgacagtggaaagtacttgtgttatttccaagatggtgacttctacgaaaaagccctggtggagctgaaggttgcagcattgggttctgatcttcacattgaagtgaagggttatgaggatggagggatccatctggagtgcaggtccactggctggtacccccaaccccaaataaagtggagcgacaccaagggagagaacatcccggctgtggaagcacctgtggttgcagatggagtgggcctgtatgcagtagcagcatctgtgatcatgagaggcagctctggtgggggtgtatcctgcatcatcagaaattccctcctcggcctggaaaagacagccagcatatccatcgcagaccccttcttcaggagcgcccagccctggatcgcggccctggcagggaccctgcctatctcgttgctgcttctcgcaggagccagttacttcttgtggagacaacagaaggaaaaaattgctctgtccagggagacagaaagagagcgagagatgaaagaaa

SEQ ID NO: 112561 - DNA, 765 bp, Homo sapiens
  Payload ID: 2022
  Gene Symbol: BTN3A3
  Gene Name: butyrophilin, subfamily 3, member A3
  ENST ID: ENST00000490254
  CDS Start-End: 135-765
cggaatgagagactcaaccataatagaaagaatggagaactattaaccaccattcttcagtgggctgtgattttcagaggggaatactaagaactcagttttctgtgcttggaccctctgggcccatcctggccatggtgggtgaagacgctgatctgccctgtcacctgttcccgaccatgagtgcagagaccatggagctgaggtgggtgagttccagcctaaggcaggtggtgaacgtgtatgcagatggaaaggaagtggaagacaggcagagtgcaccgtatcgagggagaacttcgattctgcgggatggcatcactgcagggaaggctgctctccgaatacacaacgtcacagcctctgacagtggaaagtacttgtgttatttccaagatggtgacttctacgaaaaagccctggtggagctgaaggttgcagagtggaggaaaatccagtacatggctcgtggagagaagtctttggcctatcatgaatggaaaatggccctcttcaaacctgcggatgtgattctggatccagacacggcaaacgccatcctccttgtttctgaggaccagaggagtgtgcagcgtgctgaagagccgcgggatctgccagacaaccctgagagatttgaatggcgttactgtgtccttggctgtgaaaacttcacatcagggagacattactgggaggtggaagtgggggacagaaaagagtggcatattggggtatgtagtaagaacgtggagaggaaaaaag

SEQ ID NO: 112562 - DNA, 1002 bp, Homo sapiens
  Payload ID: 2022
  Gene Symbol: BTN3A3
  Gene Name: butyrophilin, subfamily 3, member A3
  ENST ID: ENST00000496719
  CDS Start-End: 290-1002
agagattgttattattcctcacaataaccagatagcctctgctttctttttcctttcttcggaatgagagactcaaccataatagaaagaatggagaactattaaccaccattcttcagtgggctgtgattttcagaggggaatactaagaagtaagtggggaatgttgattagagcctgggctacaatgcctgggaggacaagagctgaatcgctgagagtgatggttttccatactggaacccaaaggtaaagacactcaaggacagacatttttggcagagcatagatgaaaatggcaagttccctggctttccttctgctcaactttcatgtctccctcttcttggtccagctgctcactccttgctcagctcagttttctgtgcttggaccctctgggcccatcctggccatggtgggtgaagacgctgatctgccctgtcacctgttcccgaccatgagtgcagagaccatggagctgaggtgggtgagttccagcctaaggcaggtggtgaacgtgtatgcagatggaaaggaagtggaagacaggcagagtgcaccgtatcgagggagaacttcgattctgcgggatggcatcactgcagggaaggctgctctccgaatacacaacgtcacagcctctgacagtggaaagtacttgtgttatttccaagatggtgacttctacgaaaaagccctggtggagctgaaggttgcagcattgggttctgatcttcacattgaagtgaagggttatgaggatggagggatccatctggagtgcaggtccactggctggtacccccaaccccaaataaagtggagcgacaccaagggagagaacatcccggctgtggaagcacctgtggttgcagatggagtgggcctgtatgcagtagcagcatctgtgatcatgagaggcagctctggtgggggtgtatcctgcatcatcagaaattccctcctcggcctggaaaagacagccagcatatccatcgc

SEQ ID NO: 112563 - DNA, 626 bp, Homo sapiens
  Payload ID: 2022
  Gene Symbol: BTN3A3
  Gene Name: butyrophilin, subfamily 3, member A3
  ENST ID: ENST00000487627
  CDS Start-End: 326-626
agagattgttattattcctcacaataaccagatagcctctgctttctttttcctttcttcggaatgagagactcaaccataatagaaagaatggagaactattaaccaccattcttcagtgggctgtgattttcagaggggaatactaagaagtaagtggggaatgttgattagagcctgggctacaatgcctgggaggacaagagctgaatcgctgagagtgatggttttccatactggaacccaaaggtaaagacactcaaggacagacatttttggcagagctcagttttctgtgcttggaccctctgggcccatcctggccatggtgggtgaagacgctgatctgccctgtcacctgttcccgaccatgagtgcagagaccatggagctgaggtgggtgagttccagcctaaggcaggtggtgaacgtgtatgcagatggaaaggaagtggaagacaggcagagtgcaccgtatcgagggagaacttcgattctgcgggatggcatcactgcagggaaggctgctctccgaatacacaacgtcacagcctctgacagtggaaagtacttgtgttatttccaagatggtgacttctacgaaaaagccctggtggagctgaagg

SEQ ID NO: 112564 - DNA, 1368 bp, Homo sapiens
  Payload ID: 2023
  Gene Symbol: BTNL2
  Gene Name: butyrophilin-like 2
  Uniprot ID: Q9UIR0
  ENST ID: ENST00000374993
  CDS Start-End: 1-1368
atggtggattttccaggctacaatctgtctggtgcagtcgcctccttcctattcatcctgctgacaatgaagcagtcagaagactttagagtcattggccctgctcatcctatcctggccggggttggggaagatgccctgttaacctgccagctactccccaagaggaccacaatgcacgtggaggtgaggtggtaccgctcagagcccagcacacctgtgtttgtgcacagggatggagtggaggtgactgagatgcagatggaggagtacagaggctgggtagagtggatagagaatggcattgcaaagggaaatgtggcactgaagatacacaacatccagccctccgacaatggacaatactggtgccatttccaggatgggaactactgtggagaaacaagcttgctgctcaaagtagcaggtctggggtctgcccctagcatccacatggagggacctggggagagtggagtccagcttgtgtgcactgcaaggggctggttcccagagccccaggtgtattgggaagacatccggggagagaagctgctggccgtgtctgagcatcgcatccaagataaagatggcctgttctatgcggaagccaccctggtggtcaggaacgcctctgcagagtctgtgtcctgcttggtccacaaccccgtcctcactgaggagaaggggtcggtcatcagcctcccagagaaactccagactgagctggcttctttaaaagtgaatggaccttcccagcccatcctcgtcagagtgggagaagatatacagctaacctgttacctgtcccccaaggcgaatgcacagagcatggaggtgaggtgggaccgatcccaccgttaccctgctgtgcatgtgtatatggatggggaccatgtggctggagagcagatggcagagtacagagggaggactgtactggtgagtgacgccattgacgagggcagactgaccctgcagatactcagtgccagaccttcggacgacgggcagtaccgctgcctttttgaaaaagatgatgtctaccaggaggccagtttggatctgaaggtggtaagtctgggttcttccccactgatcactgtggaggggcaagaagatggagaaatgcagccgatgtgctcttcagatgggtggttcccacagccccacgtgccatggagggacatggaaggaaagacgataccatcatcttcccaggccctgactcaaggcagccacgggctgttccacgtgcagacattgctaagggtcacaaacatctccgctgtggacgtcacttgttccatcagcatcccctttttgggcgaggagaaaatcgcaactttttctctctcaggttggtga

SEQ ID NO: 112565 - DNA, 333 bp, Homo sapiens
  Payload ID: 2023
  Gene Symbol: BTNL2
  Gene Name: butyrophilin-like 2
  ENST ID: ENST00000433988
  CDS Start-End: 8-333
agggaggatggtggattttccaggctacaatctgtctggtgcagtcgcctccttcctattcatcctgctgacaatgaagcagtcagactttagagtcattggccctgctcatcctatcctggccggggttggggaagatgccctgttaacctgccagctactccccaagaggaccacaatgcacgtggaggtgaggtggtaccgctcagagcccagcacacctgtgtttgtgcacagggatggagtggaggtgactgagatgcagatggaggagtacagaggctgggtagagtggatagagaatggcattgcaaagggaaatgtggcactgaa

SEQ ID NO: 112566 - DNA, 331 bp, Homo sapiens
  Payload ID: 2023
  Gene Symbol: BTNL2
  Gene Name: butyrophilin-like 2
  ENST ID: ENST00000446536
  CDS Start-End: 6-331
ggaggatggtggattttccaggctacaatctgtctggtgcagtcgcctccttcctattcatcctgctgacaatgaagcagtcagactttagagtcattggccctgctcatcctatcctggccggggttggggaagatgccctgttaacctgccagctactccccaagaggaccacaatgcacgtggaggtgaggtggtaccgctcagagcccagcacacctgtgtttgtgcacagggatggagtggaggtgactgagatgcagatggaggagtacagaggctgggtagagtggatagagaatggcattgcaaagggaaatgtggcactgaa

SEQ ID NO: 112567 - DNA, 1460 bp, Homo sapiens
  Payload ID: 2023
  Gene Symbol: BTNL2
  Gene Name: butyrophilin-like 2
  ENST ID: ENST00000454136
  CDS Start-End: 6-1454
ggaggatggtggattttccaggctacaatctgtctggtgcagtcgcctccttcctattcatcctgctgacaatgaagcagtcagaagactttagagtcattggccctgctcatcctatcctggccggggttggggaagatgccctgttaacctgccagctactccccaagaggaccacaatgcacgtggaggtgaggtggtaccgctcagagcccagcacacctgtgtttgtgcacagggatggagtggaggtgactgagatgcagatggaggagtacagaggctgggtagagtggatagagaatggcattgcaaagggaaatgtggcactgaagatacacaacatccagccctccgacaatggacaatactggtgccatttccaggatgggaactactgtggagaaacaagcttgctgctcaaagtagcaggtctggggtctgcccctagcatccacatggagggacctggggagagtggagtccagcttgtgtgcactgcaaggggctggttcccagagccccaggtgtattgggaagacatccggggagagaagctgctggccgtgtctgagcatcgcatccaagataaagatggcctgttctatgcggaagccaccctggtggtcaggaacgcctctgcagagtctgtgtcctgcttggtccacaaccccgtcctcactgaggagaaggggtcggtcatcagcctcccagagaaactccagactgagctggcttctttaaaagtgaatggaccttcccagcccatcctcgtcagagtgggagaagatatacagctaacctgttacctgtcccccaaggcgaatgcacagagcatggaggtgaggtgggaccgatcccaccgttaccctgctgtgcatgtgtatatggatggggaccatgtggctggagagcagatggcagagtacagagggaggactgtactggtgagtgacgccattgacgagggcagactgaccctgcagatactcagtgccagaccttcggacgacgggcagtaccgctgcctttttgaaaaagatgatgtctaccaggaggccagtttggatctgaaggtggtaagtctgggttcttccccactgatcactgtggaggggcaagaagatggagaaatgcagccgatgtgctcttcagatgggtggttcccacagccccacgtgccatggagggacatggaaggaaagacgataccatcatcttcccaggccctgactcaaggcagccacgggctgttccacgtgcagacattgctaagggtcacaaacatctccgctgtggacgtcacttgttccatcagcatcccctttttgggcgaggagaaaatcgcaactttttctctctcagagtccaggatgacgtttttgtggaaaacactgcttgtttggggattgcttcttgctgtggctgtaggcctgcccaggaagaggagctgaaaagag

SEQ ID NO: 112568 - DNA, 846 bp, Homo sapiens
  Payload ID: 2023
  Gene Symbol: BTNL2
  Gene Name: butyrophilin-like 2
  ENST ID: ENST00000435335
  CDS Start-End: 1-207
atggtggattttccaggctacaatctgtctggtgcagtcgcctccttcctattcatcctgctgacaatgaagcagtcagaagactttagagtcattggccctgctcatcctatcctggccggggttggggaagatgccctgttaacctgccagctactccccaagaggaccacaatgcacgtggaggtgagagaaactccagactgagctggcttctttaaaagtgaatggaccttcccagcccatcctcgtcagagtgggagaagatatacagctaacctgttacctgtcccccaaggcgaatgcacagagcatggaggtgaggtgggaccgatcccaccgttaccctgctgtgcatgtgtatatggatggggaccatgtggctggagagcagatggcagagtacagagggaggactgtgctggtgagtgacgccattgacgagggcagactgaccctgcagatactcagtgccagaccttcggacgacgggcagtaccgctgcctttttgaaaaagatgatgtctaccaagaggccagtttggatctgaaggtggtctgggttcttccccactgatcactgtggaggggcaagaagatggagaaatgcagccgatgtgctcttcagatgggtggttcccacagccccacgtgccatggagggacatggaaggaaagacgataccatcatcttcccaggccctgactcaaggcagccacgggctgttccacgtgcagacattgctaagggtcacaaacatctccgctgtggacgtcacttgttccatcagcatcccctttttgggcgaggagaaaatcgcaactttttctctctcaggttggtga

SEQ ID NO: 112569 - DNA, 846 bp, Homo sapiens; identical to SEQ ID NO: 112568
  Payload ID: 2023
  Gene Symbol: BTNL2
  Gene Name: butyrophilin-like 2
  ENST ID: ENST00000427760
  CDS Start-End: 1-207

SEQ ID NO: 112570 - DNA, 333 bp, Homo sapiens; identical to SEQ ID NO: 112565
  Payload ID: 2023
  Gene Symbol: BTNL2
  Gene Name: butyrophilin-like 2
  ENST ID: ENST00000429303
  CDS Start-End: 8-333

SEQ ID NO: 112571 - DNA, 846 bp, Homo sapiens
  Payload ID: 2023
  Gene Symbol: BTNL2
  Gene Name: butyrophilin-like 2
  ENST ID: ENST00000457589
  CDS Start-End: 1-207
atggtggattttccaggctacaatctgtctggtgcagtcgcctccttcctattcatcctgctgacaatgaagcagtcagaagactttagagtcattggccctgctcatcctatcctggccggggttggggaagatgccctgttaacctgccagctactccccaagaggaccacaatgcacgtggaggtgagagaaactccagactgagctggcttctttaaaagtgaatggaccttcccagcccatcctcgtcagagtgggagaagatatacagctaacctgttacctgtcccccaaggcgaatgcacagagcatggaggtgaggtgggaccgatcccaccgttaccctgctgtgcatgtgtatatggatggggaccatgtggctggagagcagatggcagagtacagagggaggactgtactggtgagtgacgccattgacgagggcagactgaccctgcagatactcagtgccagaccttcggacgacgggcagtaccgctgcctttttgaaaaagatgatgtctaccaggaggccagtttggatctgaaggtggtctgggttcttccccactgatcactgtggaggggcaagaagatggagaaatgcagccgatgtgctcttcagatgggtggttcccacagccccacgtgccatggagggacatggaaggaaagacgataccatcatcttcccaggccctgactcaaggcagccacgggctgttccacgtgcagacattgctaagggtcacaaacatctccgctgtggacgtcacttgttccatcagcatcccctttttgggcgaggagaaaatcgcaactttttctctctcaggttggtga

SEQ ID NO: 112572 - DNA, 846 bp, Homo sapiens; identical to SEQ ID NO: 112571
  Payload ID: 2023
  Gene Symbol: BTNL2
  Gene Name: butyrophilin-like 2
  ENST ID: ENST00000452747
  CDS Start-End: 1-207

SEQ ID NO: 112573 - DNA, 1462 bp, Homo sapiens
  Payload ID: 2023
  Gene Symbol: BTNL2
  Gene Name: butyrophilin-like 2
  ENST ID: ENST00000445928
  CDS Start-End: 8-1456
agggaggatggtggattttccaggctacaatctgtctggtgcagtcgcctccttcctattcatcctgctgacaatgaagcagtcagaagactttagagtcattggccctgctcatcctatcctggccggggttggggaagatgccctgttaacctgccagctactccccaagaggaccacaatgcacgtggaggtgaggtggtaccgctcagagcccagcacacctgtgtttgtgcacagggatggagtggaggtgactgagatgcagatggaggagtacagaggctgggtagagtggatagagaatggcattgcaaagggaaatgtggcactgaagatacacaacatccagccctccgacaatggacaatactggtgccatttccaggatgggaactactgtggagaaacaagcttgctgctcaaagtagcaggtctggggtctgcccctagcatccacatggagggacctggggagagtggagtccagcttgtgtgcactgcaaggggctggttcccagagccccaggtgtattgggaagacatccggggagagaagctgctggccgtgtctgagcatcgcatccaagataaagatggcctgttctatgcggaagccaccctggtggtcaggaacgcctctgcagagtctgtgtcctgcttggtccacaaccccgtcctcactgaggagaaggggtcggtcatcagcctcccagagaaactccagactgagctggcttctttaaaagtgaatggaccttcccagcccatcctcgtcagagtgggagaagatatacagctaacctgttacctgtcccccaaggcgaatgcacagagcatggaggtgaggtgggaccgatcccaccgttaccctgctgtgcatgtgtatatggatggggaccatgtggctggagagcagatggcagagtacagagggaggactgtactggtgagtgacgccattgacgagggcagactgaccctgcagatactcagtgccagaccttcggacgacgggcagtaccgctgcctttttgaaaaagatgatgtctaccaggaggccagtttggatctgaaggtggtaagtctgggttcttccccactgatcactgtggaggggcaagaagatggagaaatgcagccgatgtgctcttcagatgggtggttcccacagccccacgtgccatggagggacatggaaggaaagacgataccatcatcttcccaggccctgactcaaggcagccacgggctgttccacgtgcagacattgctaagggtcacaaacatctccgctgtggacgtcacttgttccatcagcatcccctttttgggcgaggagaaaatcgcaactttttctctctcagagtccaggatgacgtttttgtggaaaacactgcttgtttggggattgcttcttgctgtggctgtaggcctgcccaggaagaggagctgaaaagag

SEQ ID NO: 112574 - DNA, 1462 bp, Homo sapiens
  Payload ID: 2023
  Gene Symbol: BTNL2
  Gene Name: butyrophilin-like 2
  ENST ID: ENST00000416387
  CDS Start-End: 8-1456
agggaggatggtggattttccaggctacaatctgtctggtgcagtcgcctccttcctattcatcctgctgacaatgaagcagtcagaagactttagagtcattggccctgctcatcctatcctggccggggttggggaagatgccctgttaacctgccagctactccccaagaggaccacaatgcacgtggaggtgaggtggtaccgctcagagcccagcacacctgtgtttgtgcacagggatggagtggaggtgactgagatgcagatggaggagtacagaggctgggtagagtggatagagaatggcattgcaaagggaaatgtggcactgaagatacacaacatccagccctccgacaatggacaatactggtgccatttccaggatgggaactactgtggagaaacaagcttgctgctcaaagtagcaggtctggggtctgcccctagcatccacatggagggacctggggagagtggagtccagcttgtgtgcactgcaaggggctggttcccagagccccaggtgtattgggaagacatccggggagagaagctgctggccgtgtctgagcatcgcatccaagatgaagatggcctgttctatgcggaagccaccctggtggtcaggaacgcctctgcagagtctgtgtcctgcttggtccacaaccccgtcctcactgaggagaaggggtcggtcatcagcctcccagagaaactccagactgagctggcttctttaaaagtgaatggaccttcccagcccatcctcgtcagagtgggagaagatatacagctaacctgttacctgtcccccaaggcgaatgcacagagcatggaggtgaggtgggaccgatcccaccgttaccctgctgtgcatgtgtatatggatggggaccatgtggctggagagcagatggcagagtacagagggaggactgtgctggtgagtgacgccattgacgagggcagactgaccctgcagatactcagtgccagaccttcggacgacgggcagtaccgctgcctttttgaaaaagatgatgtctaccaagaggccagtttggatctgaaggtggtaggtctgggttcttccccactgatcactgtggaggggcaagaagatggagaaatgcagccgatgtgctcttcagatgggtggttcccacagccccacgtgccatggagggacatggaaggaaagacgataccatcatcttcccaggccctgactcaaggcagccacgggctgttccacgtgcagacattgctaagggtcacaaacatctccgctgtggacgtcacttgttccatcagcatcccctttttgggcgaggagaaaatcgcaactttttctctctcagagtccaggatgacgtttttgtggaaaacactgcttgtttggggattgcttcttgctgtggctgtaggcctgcccaggaagaggagctgaaaagag

SEQ ID NO: 112575 - DNA, 1462 bp, Homo sapiens; identical to SEQ ID NO: 112574
  Payload ID: 2023
  Gene Symbol: BTNL2
  Gene Name: butyrophilin-like 2
  ENST ID: ENST00000443091
  CDS Start-End: 8-1456

SEQ ID NO: 112576 - DNA, 846 bp, Homo sapiens; identical to SEQ ID NO: 112568
  Payload ID: 2023
  Gene Symbol: BTNL2
  Gene Name: butyrophilin-like 2
  ENST ID: ENST00000451625
  CDS Start-End: 1-207

SEQ ID NO: 112577 - DNA, 333 bp, Homo sapiens; identical to SEQ ID NO: 112565
  Payload ID: 2023
  Gene Symbol: BTNL2
  Gene Name: butyrophilin-like 2
  ENST ID: ENST00000458467
  CDS Start-End: 8-333

SEQ ID NO: 112578 - DNA, 333 bp, Homo sapiens; identical to SEQ ID NO: 112565
  Payload ID: 2023
  Gene Symbol: BTNL2
  Gene Name: butyrophilin-like 2
  ENST ID: ENST00000425482
  CDS Start-End: 8-333

SEQ ID NO: 112579 - DNA, 333 bp, Homo sapiens; identical to SEQ ID NO: 112565
  Payload ID: 2023
  Gene Symbol: BTNL2
  Gene Name: butyrophilin-like 2
  ENST ID: ENST00000424222
  CDS Start-End: 8-333

SEQ ID NO: 112580 - DNA, 333 bp, Homo sapiens; identical to SEQ ID NO: 112565
  Payload ID: 2023
  Gene Symbol: BTNL2
  Gene Name: butyrophilin-like 2
  ENST ID: ENST00000446311
  CDS Start-End: 8-333

SEQ ID NO: 112581 - DNA, 846 bp, Homo sapiens; identical to SEQ ID NO: 112571
  Payload ID: 2023
  Gene Symbol: BTNL2
  Gene Name: butyrophilin-like 2
  ENST ID: ENST00000418649
  CDS Start-End: 1-207

SEQ ID NO: 112582 - DNA, 1466 bp, Homo sapiens
  Payload ID: 2023
  Gene Symbol: BTNL2
  Gene Name: butyrophilin-like 2
  ENST ID: ENST00000433826
  CDS Start-End: 8-1456
agggaggatggtggattttccaggctacaatctgtctggtgcagtcgcctccttcctattcatcctgctgacaatgaagcagtcagaagactttagagtcattggccctgctcatcctatcctggccggggttggggaagatgccctgttaacctgccagctactccccaagaggaccacaatgcacgtggaggtgaggtggtaccgctcagagcccagcacacctgtgtttgtgcacagggatggagtggaggtgactgagatgcagatggaggagtacagaggctgggtagagtggatagagaatggcattgcaaagggaaatgtggcactgaagatacacaacatccagccctccgacaatggacaatactggtgccatttccaggatgggaactactgtggagaaacaagcttgctgctcaaagtagcaggtctggggtctgcccctagcatccacatggagggacctggggagagtggagtccagcttgtgtgcactgcaaggggctggttcccagagccccaggtgtattgggaagacatccggggagagaagctgctggccgtgtctgagcatcgcatccaagatgaagatggcctgttctatgcggaagccaccctggtggtcaggaacgcctctgcagagtctgtgtcctgcttggtccacaaccccgtcctcactgaggagaaggggtcggtcatcagcctcccagagaaactccagactgagctggcttctttaaaagtgaatggaccttcccagcccatcctcgtcagagtgggagaagatatacagctaacctgttacctgtcccccaaggcgaatgcacagagcatggaggtgaggtgggaccgatcccaccgttaccctgctgtgcatgtgtatatggatggggaccatgtggctggagagcagatggcagagtacagagggaggactgtgctggtgagtgacgccattgacgagggcagactgaccctgcagatactcagtgccagaccttcggacgacgggcagtaccgctgcctttttgaaaaagatgatgtctaccaagaggccagtttggatctgaaggtggtaggtctgggttcttccccactgatcactgtggaggggcaagaagatggagaaatgcagccgatgtgctcttcagatgggtggttcccacagccccacgtgccatggagggacatggaaggaaagacgataccatcatcttcccaggccctgactcaaggcagccacgggctgttccacgtgcagacattgctaagggtcacaaacatctccgctgtggacgtcacttgttccatcagcatcccctttttgggcgaggagaaaatcgcaactttttctctctcagagtccaggatgacgtttttgtggaaaacactgcttgtttggggattgcttcttgctgtggctgtaggcctgcccaggaagaggagctgaaaagaggtaa

SEQ ID NO: 112583 - DNA, 1462 bp, Homo sapiens; identical to SEQ ID NO: 112573
  Payload ID: 2023
  Gene Symbol: BTNL2
  Gene Name: butyrophilin-like 2
  ENST ID: ENST00000447918
  CDS Start-End: 8-1456

SEQ ID NO: 112584 - DNA, 1462 bp, Homo sapiens
  Payload ID: 2023
  Gene Symbol: BTNL2
  Gene Name: butyrophilin-like 2
  ENST ID: ENST00000416597
  CDS Start-End: 8-1456
agggaggatggtggattttccaggctacaatctgtctggtgcagtcgcctccttcctattcatcctgctgacaatgaagcagtcagaagactttagagtcattggccctgctcatcctatcctggccggggttggggaagatgccctgttaacctgccagctactccccaagaggaccacaatgcacgtggaggtgaggtggtaccgctcagagcccagcacacctgtgtttgtgcacagggatggagtggaggtgactgagatgcagatggaggagtacagaggctgggtagagtggatagagaatggcattgcaaagggaaatgtggcactgaagatacacaacatccagccctccgacaatggacaatactggtgccatttccaggatgggaactactgtggagaaacaagcttgctgctcaaagtagcaggtctggggtctgcccctagcatccacatggagggacctggggagagtggagtccagcttgtgtgcactgcaaggggctggttcccagagccccaggtgtattgggaagacatccggggagagaagctgctggccgtgtctgagcatcgcatccaagataaagatggcctgttctatgcggaagccaccctggtggtcaggaacgcctctgcagagtctgtgtcctgcttggtccacaaccccgtcctcactgaggagaaggggtcggtcatcagcctcccagagaaactccagactgagctggcttctttaaaagtgaatggaccttcccagcccatcctcgtcagagtgggagaagatatacagctaacctgttacctgtcccccaaggcgaatgcacagagcatggaggtgaggtgggaccgatcccaccgttaccctgctgtgcatgtgtatatggatggggaccatgtggctggagagcagatggcagagtacagagggaggactgtactggtgagtgacgccattgacgagggcagactgaccctgcagatactcagtgccagaccttcggacgacgggcagtaccgctgcctttttgaaaaagatgatgtctaccaggaggccagtttggatctgaaggtggtaagtctgggttcttccccactgatcactgtggaggggcaagaagatggagaaatgcagccgatgtgctcttcagatgggtggttcccacagccccacgtgccatggagggacatggaaggaaagacgataccatcatcttcccaggccctgactcaaggcagccacgggctgttccacgtgcagacattgctaagggtcacaaacatctccgctgtggacgtcacttgttccatcagcatcccctttttgggcgaggagaaaatcgcaactttttctctctcagagtccaggatgacatttttgtggaaaacactgcttgtttggggattgcttcttgctgtggctgtaggcctgcccaggaagaggagctgaaaagag

SEQ ID NO: 112585 - DNA, 1462 bp, Homo sapiens; identical to SEQ ID NO: 112573
  Payload ID: 2023
  Gene Symbol: BTNL2
  Gene Name: butyrophilin-like 2
  ENST ID: ENST00000422056
  CDS Start-End: 8-1456

SEQ ID NO: 112586 - DNA, 333 bp, Homo sapiens; identical to SEQ ID NO: 112565
  Payload ID: 2023
  Gene Symbol: BTNL2
  Gene Name: butyrophilin-like 2
  ENST ID: ENST00000415239
  CDS Start-End: 8-333

SEQ ID NO: 112587 - DNA, 846 bp, Homo sapiens; identical to SEQ ID NO: 112571
  Payload ID: 2023
  Gene Symbol: BTNL2
  Gene Name: butyrophilin-like 2
  ENST ID: ENST00000465865
  CDS Start-End: 1-207

SEQ ID NO: 112588 - DNA, 845 bp, Homo sapiens
  Payload ID: 2023
  Gene Symbol: BTNL2
  Gene Name: butyrophilin-like 2
  Uniprot ID: Q9UIR0
  ENST ID: ENST00000544175
  CDS Start-End: 309-845
atggtggattttccaggctacaatctgtctggtgcagtcgcctccttcctattcatcctgctgacaatgaagcagtcagaagactttagagtcattggccctgctcatcctatcctggccggggttggggaagatgccctgttaacctgccagctactccccaagaggaccacaatgcacgtggagagaaactccagactgagctggcttctttaaaagtgaatggaccttcccagcccatcctcgtcagagtgggagaagatatacagctaacctgttacctgtcccccaaggcgaatgcacagagcatggaggtgaggtgggaccgatcccaccgttaccctgctgtgcatgtgtatatggatggggaccatgtggctggagagcagatggcagagtacagagggaggactgtactggtgagtgacgccattgacgagggcagactgaccctgcagatactcagtgccagaccttcggacgacgggcagtaccgctgcctttttgaaaaagatgatgtctaccaggaggccagtttggatctgaaggtggtaagtctgggttcttccccactgatcactgtggaggggcaagaagatggagaaatgcagccgatgtgctcttcagatgggtggttcccacagccccacgtgccatggagggacatggaaggaaagacgataccatcatcttcccaggccctgactcaaggcagccacgggctgttccacgtgcagacattgctaagggtcacaaacatctccgctgtggacgtcacttgttccatcagcatcccctttttgggcgaggagaaaatcgcaactttttctctctcaggttggtga

SEQ ID NO: 112589 - DNA, 845 bp, Homo sapiens
  Payload ID: 2023
  Gene Symbol: BTNL2
  Gene Name: butyrophilin-like 2
  Uniprot ID: Q9UIR0
  ENST ID: ENST00000551669
  CDS Start-End: 309-845
atggtggattttccaggctacaatctgtctggtgcagtcgcctccttcctattcatcctgctgacaatgaagcagtcagaagactttagagtcattggccctgctcatcctatcctggccggggttggggaagatgccctgttaacctgccagctactccccaagaggaccacaatgcacgtggagagaaactccagactgagctggcttctttaaaagtgaatggaccttcccagcccatcctcgtcagagtgggagaagatatacagctaacctgttacctgtcccccaaggcgaatgcacagagcatggaggtgaggtgggaccgatcccaccgttaccctgctgtgcatgtgtatatggatggggaccatgtggctggagagcagatggcagagtacagagggaggactgtgctggtgagtgacgccattgacgagggcagactgaccctgcagatactcagtgccagaccttcggacgacgggcagtaccgctgcctttttgaaaaagatgatgtctaccaagaggccagtttggatctgaaggtggtaggtctgggttcttccccactgatcactgtggaggggcaagaagatggagaaatgcagccgatgtgctcttcagatgggtggttcccacagccccacgtgccatggagggacatggaaggaaagacgataccatcatcttcccaggccctgactcaaggcagccacgggctgttccacgtgcagacattgctaagggtcacaaacatctccgctgtggacgtcacttgttccatcagcatcccctttttgggcgaggagaaaatcgcaactttttctctctcaggttggtga

SEQ ID NO: 112590 - DNA, 845 bp, Homo sapiens; identical to SEQ ID NO: 112589
  Payload ID: 2023
  Gene Symbol: BTNL2
  Gene Name: butyrophilin-like 2
  Uniprot ID: Q9UIR0
  ENST ID: ENST00000549852
  CDS Start-End: 309-845

SEQ ID NO: 112591 - DNA, 845 bp, Homo sapiens; identical to SEQ ID NO: 112588
  Payload ID: 2023
  Gene Symbol: BTNL2
  Gene Name: butyrophilin-like 2
  Uniprot ID: Q9UIR0
  ENST ID: ENST00000553032
  CDS Start-End: 309-845

SEQ ID NO: 112592 - DNA, 845 bp, Homo sapiens; identical to SEQ ID NO: 112588
  Payload ID: 2023
  Gene Symbol: BTNL2
  Gene Name: butyrophilin-like 2
  Uniprot ID: Q9UIR0
  ENST ID: ENST00000550698
  CDS Start-End: 309-845

SEQ ID NO: 112593 - DNA, 738 bp, Homo sapiens
  Payload ID: 2023
  Gene Symbol: BTNL2
  Gene Name: butyrophilin-like 2
  Uniprot ID: Q9UIR0
  ENST ID: ENST00000548253
  CDS Start-End: 1-738
atggtggattttccaggctacaatctgtctggtgcagtcgcctccttcctattcatcctgctgacaatgaagcagtcagagaaactccagactgagctggcttctttaaaagtgaatggaccttcccagcccatcctcgtcagagtgggagaagatatacagctaacctgttacctgtcccccaaggcgaatgcacagagcatggaggtgaggtgggaccgatcccaccgttaccctgctgtgcatgtgtatatggatggggaccatgtggctggagagcagatggcagagtacagagggaggactgtgctggtgagtgacgccattgacgagggcagactgaccctgcagatactcagtgccagaccttcggacgacgggcagtaccgctgcctttttgaaaaagatgatgtctaccaagaggccagtttggatctgaaggtggtaggtctgggttcttccccactgatcactgtggaggggcaagaagatggagaaatgcagccgatgtgctcttcagatgggtggttcccacagccccacgtgccatggagggacatggaaggaaagacgataccatcatcttcccaggccctgactcaaggcagccacgggctgttccacgtgcagacattgctaagggtcacaaacatctccgctgtggacgtcacttgttccatcagcatcccctttttgggcgaggagaaaatcgcaactttttctctctcaggttggtga

SEQ ID NO: 112594 - DNA, 1368 bp, Homo sapiens; identical to SEQ ID NO: 112564
  Payload ID: 2023
  Gene Symbol: BTNL2
  Gene Name: butyrophilin-like 2
  Uniprot ID: Q9UIR0
  ENST ID: ENST00000550327
  CDS Start-End: 1-1368

SEQ ID NO: 112595 - DNA, 1368 bp, Homo sapiens; identical to SEQ ID NO: 112564
  Payload ID: 2023
  Gene Symbol: BTNL2
  Gene Name: butyrophilin-like 2
  Uniprot ID: Q9UIR0
  ENST ID: ENST00000550531
  CDS Start-End: 1-1368

SEQ ID NO: 112596 - DNA, 1368 bp, Homo sapiens
  Payload ID: 2023
  Gene Symbol: BTNL2
  Gene Name: butyrophilin-like 2
  ENST ID: ENST00000551471
  CDS Start-End: 1-1368
atggtggattttccaggctacaatctgtctggtgcagtcgcctccttcctattcatcctgctgacaatgaagcagtcagaagactttagagtcattggccctgctcatcctatcctggccggggttggggaagatgccctgttaacctgccagctactccccaagaggaccacaatgcacgtggaggtgaggtggtaccgctcagagcccagcacacctgtgtttgtgcacagggatggagtggaggtgactgagatgcagatggaggagtacagaggctgggtagagtggatagagaatggcattgcaaagggaaatgtggcactgaagatacacaacatccagccctccgacaatggacaatactggtgccatttccaggatgggaactactgtggagaaacaagcttgctgctcaaagtagcaggtctggggtctgcccctagcatccacatggagggacctggggagagtggagtccagcttgtgtgcactgcaaggggctggttcccagagccccaggtgtattgggaagacatccggggagagaagctgctggccgtgtctgagcatcgcatccaagatgaagatggcctgttctatgcggaagccaccctggtggtcaggaacgcctctgcagagtctgtgtcctgcttggtccacaaccccgtcctcactgaggagaaggggtcggtcatcagcctcccagagaaactccagactgagctggcttctttaaaagtgaatggaccttcccagcccatcctcgtcagagtgggagaagatatacagctaacctgttacctgtcccccaaggcgaatgcacagagcatggaggtgaggtgggaccgatcccaccgttaccctgctgtgcatgtgtatatggatggggaccatgtggctggagagcagatggcagagtacagagggaggactgtgctggtgagtgacgccattgacgagggcagactgaccctgcagatactcagtgccagaccttcggacgacgggcagtaccgctgcctttttgaaaaagatgatgtctaccaagaggccagtttggatctgaaggtggtaggtctgggttcttccccactgatcactgtggaggggcaagaagatggagaaatgcagccgatgtgctcttcagatgggtggttcccacagccccacgtgccatggagggacatggaaggaaagacgataccatcatcttcccaggccctgactcaaggcagccacgggctgttccacgtgcagacattgctaagggtcacaaacatctccgctgtggacgtcacttgttccatcagcatcccctttttgggcgaggagaaaatcgcaactttttctctctcaggttggtga

SEQ ID NO: 112597 - DNA, 845 bp, Homo sapiens; identical to SEQ ID NO: 112588
  Payload ID: 2023
  Gene Symbol: BTNL2
  Gene Name: butyrophilin-like 2
  Uniprot ID: Q9UIR0
  ENST ID: ENST00000549560
  CDS Start-End: 309-845

SEQ ID NO: 112598 - DNA, 738 bp, Homo sapiens
  Payload ID: 2023
  Gene Symbol: BTNL2
  Gene Name: butyrophilin-like 2
  Uniprot ID: Q9UIR0
  ENST ID: ENST00000548832
  CDS Start-End: 1-738
atggtggattttccaggctacaatctgtctggtgcagtcgcctccttcctattcatcctgctgacaatgaagcagtcagagaaactccagactgagctggcttctttaaaagtgaatggaccttcccagcccatcctcgtcagagtgggagaagatatacagctaacctgttacctgtcccccaaggcgaatgcacagagcatggaggtgaggtgggaccgatcccaccgttaccctgctgtgcatgtgtatatggatggggaccatgtggctggagagcagatggcagagtacagagggaggactgtactggtgagtgacgccattgacgagggcagactgaccctgcagatactcagtgccagaccttcggacgacgggcagtaccgctgcctttttgaaaaagatgatgtctaccaggaggccagtttggatctgaaggtggtaagtctgggttcttccccactgatcactgtggaggggcaagaagatggagaaatgcagccgatgtgctcttcagatgggtggttcccacagccccacgtgccatggagggacatggaaggaaagacgataccatcatcttcccaggccctgactcaaggcagccacgggctgttccacgtgcagacattgctaagggtcacaaacatctccgctgtggacgtcacttgttccatcagcatcccctttttgggcgaggagaaaatcgcaactttttctctctcaggttggtga

SEQ ID NO: 112599 - DNA, 1368 bp, Homo sapiens; identical to SEQ ID NO: 112596
  Payload ID: 2023
  Gene Symbol: BTNL2
  Gene Name: butyrophilin-like 2
  ENST ID: ENST00000551409
  CDS Start-End: 1-1368

SEQ ID NO: 112600 - DNA, 1368 bp, Homo sapiens; identical to SEQ ID NO: 112596
  Payload ID: 2023
  Gene Symbol: BTNL2
  Gene Name: butyrophilin-like 2
  ENST ID: ENST00000548835
  CDS Start-End: 1-1368

SEQ ID NO: 112601 - DNA, 845 bp, Homo sapiens; identical to SEQ ID NO: 112589
  Payload ID: 2023
  Gene Symbol: BTNL2
  Gene Name: butyrophilin-like 2
  Uniprot ID: Q9UIR0
  ENST ID: ENST00000548717
  CDS Start-End: 309-845

SEQ ID NO: 112602 - DNA, 1368 bp, Homo sapiens; identical to SEQ ID NO: 112564
  Payload ID: 2023
  Gene Symbol: BTNL2
  Gene Name: butyrophilin-like 2
  Uniprot ID: Q9UIR0
  ENST ID: ENST00000552479
  CDS Start-End: 1-1368

SEQ ID NO: 112603 - DNA, 1368 bp, Homo sapiens; identical to SEQ ID NO: 112564
  Payload ID: 2023
  Gene Symbol: BTNL2
  Gene Name: butyrophilin-like 2
  Uniprot ID: Q9UIR0
  ENST ID: ENST00000551095
  CDS Start-End: 1-1368

SEQ ID NO: 112604 - DNA, 845 bp, Homo sapiens; identical to SEQ ID NO: 112588
  Payload ID: 2023
  Gene Symbol: BTNL2
  Gene Name: butyrophilin-like 2
  Uniprot ID: Q9UIR0
  ENST ID: ENST00000549943
  CDS Start-End: 309-845

SEQ ID NO: 112605 - DNA, 738 bp, Homo sapiens; identical to SEQ ID NO: 112593
  Payload ID: 2023
  Gene Symbol: BTNL2
  Gene Name: butyrophilin-like 2
  Uniprot ID: Q9UIR0
  ENST ID: ENST00000551686
  CDS Start-End: 1-738

SEQ ID NO: 112606 - DNA, 845 bp, Homo sapiens
  Payload ID: 2023
  Gene Symbol: BTNL2
  Gene Name: butyrophilin-like 2
  ENST ID: ENST00000618142
  CDS Start-End: 309-845
atggtggattttccaggctacaatctgtctggtgcagtcgcctccttcctattcatcctgctgacaatgaagcagtcagaagactttagagtcattggccctgctcatcctatcctggccggggttggggaagatgccctgttaacctgccagctactccccaagaggaccacaatgcacgtggagagaaactccagactgagctggcttctttaaaagtgaatggaccttcccagcccatcctcgtcagagtgggagaagatatacagctaacctgttacctgtcccccaaggcgaatgcacagagcatggaggtgaggtgggaccgatcccaccgttaccctgctgtgcatgtgtatatggatggggaccatgtggctggagagcagatggcagagtacagagggaggactgtgctggtgagtgacgccattgacgagggcagactgaccctgcagatactcagtgccagaccttcggacgacgggcagtaccgctgcctttttgaaaaagatgatgtctaccaggaggccagtttggatctgaaggtggtaggtctgggttcttccccactgatcactgtggaggggcaagaagatggagaaatgcagctgatatgctcttcagatgggtggttcccacagccccacgtgcagtggagggacatggaaggaaagacgataccatcctcttcccaggccctgactcaaggcagccatgggctgttccacgtgcagacattgctaagggtcacaaacatctccgctgtggacgtcacttgttccatcagcatcccctttttgggcgaggagaaaatcgcaactttttctctctcaggttggtga

SEQ ID NO: 112607 - DNA, 1368 bp, Homo sapiens
  Payload ID: 2023
  Gene Symbol: BTNL2
  Gene Name: butyrophilin-like 2
  ENST ID: ENST00000613156
  CDS Start-End: 1-1368
atggtggattttccaggctacaatctgtctggtgcagtcgcctccttcctattcatcctgctgacaatgaagcagtcagaagactttagagtcattggccctgctcatcctatcctggccggggttggggaagatgccctgttaacctgccagctactccccaagaggaccacaatgcacgtggaggtgaggtggtaccgctcagagcccagcacacctgtgtttgtgcacagggatggagtggaggtgactgagatgcagatggaggagtacagaggctgggtagagtggatagagaatggcattgcaaagggaaatgtggcactgaagatacacaacatccagccctccgacaatggacaatactggtgccatttccaggatgggaactactgtggagaaacaagcttgctgctcaaagtagcaggtctggggtctgcccctagcatccacatggagggacctggggagagtggagtccagcttgtgtgcactgcaaggggctggttcccagagccccaggtgtattgggaagacatccggggagagaagctgctggccgtgtctgagcatcgcatccaagataaagatggcctgttctatgcggaagccaccctggtggtcaggaacgcctctgcagagtctgtgtcctgcttggtccacaaccccgtcctcactgaggagaaggggtcggtcatcagcctcccagagaaactccagactgagctggcttctttaaaagtgaatggaccttcccagcccatcctcgtcagagtgggagaagatatacagctaacctgttacctgtcccccaaggcgaatgcacagagcatggaggtgaggtgggaccgatcccaccgttaccctgctgtgcatgtgtatatggatggggaccatgtggctggagagcagatggcagagtacagagggaggactgtgctggtgagtgacgccattgacgagggcagactgaccctgcagatactcagtgccagaccttcggacgacgggcagtaccgctgcctttttgaaaaagatgatgtctaccaggaggccagtttggatctgaaggtggtaggtctgggttcttccccactgatcactgtggaggggcaagaagatggagaaatgcagctgatatgctcttcagatgggtggttcccacagccccacgtgcagtggagggacatggaaggaaagacgataccatcctcttcccaggccctgactcaaggcagccatgggctgttccacgtgcagacattgctaagggtcacaaacatctccgctgtggacgtcacttgttccatcagcatcccctttttgggcgaggagaaaatcgcaactttttctctctcaggttggtga

SEQ ID NO: 112608 - DNA, 2440 bp, Homo sapiens
  Payload ID: 2024
  Gene Symbol: BTNL3
  Gene Name: butyrophilin-like 3
  Uniprot ID: Q6UXE8
  ENST ID: ENST00000342868
  CDS Start-End: 185-1585
catactcctcattcatacagccatgtttagggaggctctagggagaaatgcacagtttgacatcgttcatgaagagcctctccacggctcctgcgcctgagacagctggcctgacctccaaatcatccatccacccctgctgtcatctgttttcatagtgtgagatcaacccacaggaatatccatggcttttgtgctcattttggttctcagtttctacgagctggtgtcaggacagtggcaagtcactggaccgggcaagtttgtccaggccttggtgggggaggacgccgtgttctcctgctccctctttcctgagaccagtgcagaggctatggaagtgcggttcttcaggaatcagttccatgctgtggtccacctctacagagatggggaagactgggaatctaagcagatgccacagtatcgagggagaactgagtttgtgaaggactccattgcaggggggcgtgtctctctaaggctaaaaaacatcactccctcggacatcggcctgtatgggtgctggttcagttcccagatttacgatgaggaggccacctgggagctgcgggtggcagcactgggctcacttcctctcatttccatcgtgggatatgttgacggaggtatccagttactctgcctgtcctcaggctggttcccccagcccacagccaagtggaaaggtccacaaggacaggatttgtcttcagactccagagcaaatgcagatgggtacagcctgtatgatgtggagatctccattatagtccaggaaaatgctgggagcatattgtgttccatccaccttgctgagcagagtcatgaggtggaatccaaggtattgataggagagacgtttttccagccctcaccttggcgcctggcttctattttactcgggttactctgtggtgccctgtgtggtgttgtcatggggatgataattgttttcttcaaatccaaagggaaaatccaggcggaactggactggagaagaaagcacggacaggcagaattgagagacgcccggaaacacgcagtggaggtgactctggatccagagacggctcacccgaagctctgcgtttctgatctgaaaactgtaacccatagaaaagctccccaggaggtgcctcactctgagaagagatttacaaggaagagtgtggtggcttctcagggtttccaagcagggaaacattactgggaggtggacgtgggacaaaatgtagggtggtatgtgggagtgtgtcgggatgacgtagacagggggaagaacaatgtgactttgtctcccaacaatgggtattgggtcctcagactgacaacagaacatttgtatttcacattcaatccccattttatcagcctcccccccagcacccctcctacacgagtaggggtcttcctggactatgagggtgggaccatctccttcttcaatacaaatgaccagtcccttatttataccctgctgacatgtcagtttgaaggcttgttgagaccctatatccagcatgcgatgtatgacgaggaaaaggggactcccatattcatatgtccagtgtcctggggatgagacagagaagaccctgcttaaagggccccacaccacagacccagacacagccaagggagagtgctcccgacaggtggccccagcttcctctccggagcctgcgcacagagagtcacgccccccactctcctttagggagctgaggttcttctgccctgagccctgcagcagcggcagtcacagcttccagatgaggggggattggcctgaccctgtgggagtcagaagccatggctgccctgaagtggggacggaatagactcacattaggtttagtttgtgaaaactccatccagctaagcgatcttgaacaagtcacaacctcccaggctcctcatttgctagtcacggacagtgattcctgcctcacaggtgaagattaaagagacaacgaatgtgaatcatgcttgcaggtttgagggcacagtgtttgctaatgatgtgtttttatattatacattttcccaccataaactctgtttgcttattccacattaatttacttttctctataccaaatcacccatggaatagttattgaacacctgctttgtgaggctcaaagaataaagaggaggtaggatttttcactgattctataagcccagcattacctgataccaaaaccaggcaaagaaaacagaagaagaggaaggaaaactacaggtccatatccctcattaacacagacacaaaaattctaaataaaattttaacaaattaaactaaacaatatatttaaagatgatatataactactcagtgtggtttgtcccacaaatgcagagttggtttaatatttaaatatcaaccagtgtaattcagcacattaataaagtaaaaaagaaaaccata

SEQ ID NO: 112609 - DNA, 2229 bp, Homo sapiens
  Payload ID: 2025
  Gene Symbol: BTNL8
  Gene Name: butyrophilin-like 8
  Uniprot ID: Q6UX41
  ENST ID: ENST00000231229
  CDS Start-End: 235-1278
tagacatttatgcagtggttcaaagtctagagtccctacacttctggtacatgacagctgtgtctcgatggagtagactctcagaacagcgcagtttgccctccgctcacgcagagcctctccgtggcttccgcaccttgagcattaggccagttctcctcttctctctaatccatccgtcacctctcctgtcatccgtttccatgccgtgaggtccattcacagaacacatccatggctctcatgctcagtttggttctgagtctcctcaagctgggatcagggcagtggcaggtgtttgggccagacaagcctgtccaggccttggtgggggaggacgcagcattctcctgtttcctgtctcctaagaccaatgcagaggccatggaagtgcggttcttcaggggccagttctctagcgtggtccacctctacagggacgggaaggaccagccatttatgcagatgccacagtatcaaggcaggacaaaactggtgaaggattctattgcggaggggcgcatctctctgaggctggaaaacattactgtgttggatgctggcctctatgggtgcaggattagttcccagtcttactaccagaaggccatctgggagctacaggtgtcagcactgggctcagttcctctcatttccatcacgggatatgttgatagagacatccagctactctgtcagtcctcgggctggttcccccggcccacagcgaagtggaaaggtccacaaggacaggatttgtccacagactccaggacaaacagagacatgcatggcctgtttgatgtggagatctctctgaccgtccaagagaacgccgggagcatatcctgttccatgcggcatgctcatctgagccgagaggtggaatccagggtacagataggagatacctttttcgagcctatatcgtggcacctggctaccaaagtactgggaatactctgctgtggcctattttttggcattgttggactgaagattttcttctccaaattccagtgtaagcgagagagagaagcatgggccggtgccttattcatggttccagcagggacaggatcagagatgctcccacatccagctgcttctcttcttctagtcctagcctccaggggcccaggcccaaaaaaggaaaatccaggcggaactggactggagaagaaagcacggacaggcagaattgagagacgcccggaaacacgcagtggaggtgactctggatccagagacggctcacccgaagctctgcgtttctgatctgaaaactgtaacccatagaaaagctccccaggaggtgcctcactctgagaagagatttacaaggaagagtgtggtggcttctcagagtttccaagcagggaaacattactgggaggtggacggaggacacaataaaaggtggcgcgtgggagtgtgccgggatgatgtggacaggaggaaggagtacgtgactttgtctcccgatcatgggtactgggtcctcagactgaatggagaacatttgtatttcacattaaatccccgttttatcagcgtcttccccaggaccccacctacaaaaataggggtcttcctggactatgagtgtgggaccatctccttcttcaacataaatgaccagtcccttatttataccctgacatgtcggtttgaaggcttattgaggccctacattgagtatccgtcctataatgagcaaaatggaactcccatagtcatctgcccagtcacccaggaatcagagaaagaggcctcttggcaaagggcctctgcaatcccagagacaagcaacagtgagtcctcctcacaggcaaccacgcccttcctccccaggggtgaaatgtaggatgaatcacatcccacattcttctttagggatattaaggtctctctcccagatccaaagtcccgcagcagccggccaaggtggcttccagatgaagggggactggcctgtccacatgggagtcaggtgtcatggctgccctgagctgggagggaagaaggctgacattacatttagtttgctctcactccatctggctaagtgatcttgaaataccacctctcaggtgaagaaccgtcaggaattcccatctcacaggctgtggtgtagattaagtagacaaggaatgtgaataatgcttagatcttattgatgacagagtgtatcctaatggtttgttcattatattacactttcagtaa

SEQ ID NO: 112610 - DNA, 2071 bp, Homo sapiens
  Payload ID: 2025
  Gene Symbol: BTNL8
  Gene Name: butyrophilin-like 8
  Uniprot ID: Q6UX41
  ENST ID: ENST00000340184
  CDS Start-End: 207-1709
agagtccctacacttctggtacatgacagctgtgtctcgatggagtagactctcagaacagcgcagtttgccctccgctcacgcagagcctctccgtggcttccgcaccttgagcattaggccagttctcctcttctctctaatccatccgtcacctctcctgtcatccgtttccatgccgtgaggtccattcacagaacacatccatggctctcatgctcagtttggttctgagtctcctcaagctgggatcagggcagtggcaggtgtttgggccagacaagcctgtccaggccttggtgggggaggacgcagcattctcctgtttcctgtctcctaagaccaatgcagaggccatggaagtgcggttcttcaggggccagttctctagcgtggtccacctctacagggacgggaaggaccagccatttatgcagatgccacagtatcaaggcaggacaaaactggtgaaggattctattgcggaggggcgcatctctctgaggctggaaaacattactgtgttggatgctggcctctatgggtgcaggattagttcccagtcttactaccagaaggccatctgggagctacaggtgtcagcactgggctcagttcctctcatttccatcacgggatatgttgatagagacatccagctactctgtcagtcctcgggctggttcccccggcccacagcgaagtggaaaggtccacaaggacaggatttgtccacagactccaggacaaacagagacatgcatggcctgtttgatgtggagatctctctgaccgtccaagagaacgccgggagcatatcctgttccatgcggcatgctcatctgagccgagaggtggaatccagggtacagataggagatacctttttcgagcctatatcgtggcacctggctaccaaagtactgggaatactctgctgtggcctattttttggcattgttggactgaagattttcttctccaaattccagtggaaaatccaggcggaactggactggagaagaaagcacggacaggcagaattgagagacgcccggaaacacgcagtggaggtgactctggatccagagacggctcacccgaagctctgcgtttctgatctgaaaactgtaacccatagaaaagctccccaggaggtgcctcactctgagaagagatttacaaggaagagtgtggtggcttctcagagtttccaagcagggaaacattactgggaggtggacggaggacacaataaaaggtggcgcgtgggagtgtgccgggatgatgtggacaggaggaaggagtacgtgactttgtctcccgatcatgggtactgggtcctcagactgaatggagaacatttgtatttcacattaaatccccgttttatcagcgtcttccccaggaccccacctacaaaaataggggtcttcctggactatgagtgtgggaccatctccttcttcaacataaatgaccagtcccttatttataccctgacatgtcggtttgaaggcttattgaggccctacattgagtatccgtcctataatgagcaaaatggaactcccatagtcatctgcccagtcacccaggaatcagagaaagaggcctcttggcaaagggcctctgcaatcccagagacaagcaacagtgagtcctcctcacaggcaaccacgcccttcctccccaggggtgaaatgtaggatgaatcacatcccacattcttctttagggatattaaggtctctctcccagatccaaagtcccgcagcagccggccaaggtggcttccagatgaagggggactggcctgtccacatgggagtcaggtgtcatggctgccctgagctgggagggaagaaggctgacattacatttagtttgctctcactccatctggctaagtgatcttgaaataccacctctcaggtgaagaaccgtcaggaattcccatctcacaggctgtggtgtagattaagtagacaaggaatgtgaataatgcttagatcttattgatgacagagtgtatcctaatggtttgttcattatattacactttcagtaa

SEQ ID NO: 112611 - DNA, 1512 bp, Homo sapiens
  Payload ID: 2025
  Gene Symbol: BTNL8
  Gene Name: butyrophilin-like 8
  Uniprot ID: Q6UX41
  ENST ID: ENST00000400707
  CDS Start-End: 268-1395
ggtacatgacagctgtgtctcgatggagtagactctcagaacagcgcagtttgccctccgctcacgcagagcctctccgtggcttccgcaccttgagcattaggccagttctcctcttctctctaatccatccgtcacctctcctgtcatccgtttccatgccgtgaggtccattcacagaacacatccatggctctcatgctcagtttggttctgagtctcctcaagctgggatcaggtgctcctcaagatcgaatgaagtaactgatgtggacatggtttgtcaaatcactgggctcagttcctctcatttccatcacgggatatgttgatagagacatccagctactctgtcagtcctcgggctggttcccccggcccacagcgaagtggaaaggtccacaaggacaggatttgtccacagactccaggacaaacagagacatgcatggcctgtttgatgtggagatctctctgaccgtccaagagaacgccgggagcatatcctgttccatgcggcatgctcatctgagccgagaggtggaatccagggtacagataggagatacctttttcgagcctatatcgtggcacctggctaccaaagtactgggaatactctgctgtggcctattttttggcattgttggactgaagattttcttctccaaattccagtggaaaatccaggcggaactggactggagaagaaagcacggacaggcagaattgagagacgcccggaaacacgcagtggaggtgactctggatccagagacggctcacccgaagctctgcgtttctgatctgaaaactgtaacccatagaaaagctccccaggaggtgcctcactctgagaagagatttacaaggaagagtgtggtggcttctcagagtttccaagcagggaaacattactgggaggtggacggaggacacaataaaaggtggcgcgtgggagtgtgccgggatgatgtggacaggaggaaggagtacgtgactttgtctcccgatcatgggtactgggtcctcagactgaatggagaacatttgtatttcacattaaatccccgttttatcagcgtcttccccaggaccccacctacaaaaataggggtcttcctggactatgagtgtgggaccatctccttcttcaacataaatgaccagtcccttatttataccctgacatgtcggtttgaaggcttattgaggccctacattgagtatccgtcctataatgagcaaaatggaactcccatagtcatctgcccagtcacccaggaatcagagaaagaggcctcttggcaaagggcctctgcaatcccagagacaagcaacagtgagtcctcctcacaggcaaccacgcccttcctccccaggggtgaaatgtaggatgaatcacatcccacattcttctttagggatattaaggtctctctcccagatccaaagtcccgcagcagccggccaaggtggcttccagatgaagggggactggcctgtccacat

SEQ ID NO: 112612 - DNA, 700 bp, Homo sapiens
  Payload ID: 2025
  Gene Symbol: BTNL8
  Gene Name: butyrophilin-like 8
  ENST ID: ENST00000503543
  CDS Start-End: 6-131
gagacatgcatggcctgtttgatgtggagatctctctgaccgtccaagagaacgccgggagcatatcctgttccatgcggcatgctcatctgagccgagaggtggaatccagggtacagataggagtgtaagcgagagagagaagcatgggccggtgccttattcatggttccagcagggacaggatcagagatgctcccacatccagctgcttctcttcttctagtcctagcctccaggggcccaggcccaaaaaaggaaaatccaggcggaactggactggagaagaaagcacggacaggcagaattgagagacgcccggaaacacgcaggtaccaacgcctgagagggtgacagtgggacagaatctcaggtggacatgagagggggaactgaacagggacagatacgggaacacagagtgatgctgagacccatcctgcctgcagatggagaaactggatgcttgatcgcccccaagggttcagtgcccccagacacacttctttcccttggtctagaaggggagaagacaggggctgggtaaacgggagacgggggggtctttggcacagtttcagggaattgagggcactagtgactggtcaggggtctgagctgaggggaaggaagtaaagtcaggcagaaaattctgagtgggaggaagttagatagtggggtccctccagctcttatgaat

SEQ ID NO: 112613 - DNA, 1717 bp, Homo sapiens
  Payload ID: 2025
  Gene Symbol: BTNL8
  Gene Name: butyrophilin-like 8
  Uniprot ID: Q6UX41
  ENST ID: ENST00000508408
  CDS Start-End: 38-1060
gtttccatgccgtgaggtccattcacagaacacatccatggctctcatgctcagtttggttctgagtctcctcaagctgggatcagggcagtggcaggtgtttgggccagacaagcctgtccaggccttggtgggggaggacgcagcattctcctgtttcctgtctcctaagaccaatgcagaggccatggaagtgcggttcttcaggggccagttctctagcgtggtccacctctacagggacgggaaggaccagccatttatgcagatgccacagtatcaaggcaggacaaaactggtgaaggattctattgcggaggggcgcatctctctgaggctggaaaacattactgtgttggatgctggcctctatgggtgcaggattagttcccagtcttactaccagaaggccatctgggagctacaggtgtcagcactgggctcagttcctctcatttccatcacgggatatgttgatagagacatccagctactctgtcagtcctcgggctggttcccccggcccacagcgaagtggaaaggtccacaaggacaggatttgtccacagactccaggacaaacagagacatgcatggcctgtttgatgtggagatctctctgaccgtccaagagaacgccgggagcatatcctgttccatgcggcatgctcatctgagccgagaggtggaatccagggtacagataggagatacctttttcgagcctatatcgtggcacctggctaccaaagtactgggaatactctgctgtggcctattttttggcattgttggactgaagattttcttctccaaattccagtgtaagcgagagagagaagcatgggccggtgccttattcatggttccagcagggacaggatcagagatgctcccacatccagctgcttctcttcttctagtcctagcctccaggggcccaggcccaaaaaaactggagaagaaagcacggacaggcagaattgagagacgcccggaaacacgcagtggaggtgactctggatccagagacggctcacccgaagctctgcgtttctgatctgaaaactgtaacccatagaaaagctccccaggaggtgcctcactctgagaagagatttacaaggaagagtgtggtggcttctcagagtttccaagcagggaaacattactgggaggtggacggaggacacaataaaaggtggcgcgtgggagtgtgccgggatgatgtggacaggaggaaggagtacgtgactttgtctcccgatcatgggtactgggtcctcagactgaatggagaacatttgtatttcacattaaatccccgttttatcagcgtcttccccaggaccccacctacaaaaataggggtcttcctggactatgagtgtgggaccatctccttcttcaacataaatgaccagtcccttatttataccctgacatgtcggtttgaaggcttattgaggccctacattgagtatccgtcctataatgagcaaaatggaactcccatagtcatctgcccagtcacccaggaatcagagaaagaggcctcttggcaaagggcctctgcaatcccagagacaagcaacagtgagtcctcctcacaggcaaccacgcccttcctccccaggggtgaaatgtaggatgaatcacatcccacattcttctttagggatattaaggtctctctcccagatccaaagtcccgcag

SEQ ID NO: 112614 - DNA, 1260 bp, Homo sapiens
  Payload ID: 2025
  Gene Symbol: BTNL8
  Gene Name: butyrophilin-like 8
  Uniprot ID: Q6UX41
  ENST ID: ENST00000511704
  CDS Start-End: 38-1192
gtttccatgccgtgaggtccattcacagaacacatccatggctctcatgctcagtttggttctgagtctcctcaagctgggatcagcactgggctcagttcctctcatttccatcacgggatatgttgatagagacatccagctactctgtcagtcctcgggctggttcccccggcccacagcgaagtggaaaggtccacaaggacaggatttgtccacagactccaggacaaacagagacatgcatggcctgtttgatgtggagatctctctgaccgtccaagagaacgccgggagcatatcctgttccatgcggcatgctcatctgagccgagaggtggaatccagggtacagataggagatacctttttcgagcctatatcgtggcacctggctaccaaagtactgggaatactctgctgtggcctattttttggcattgttggactgaagattttcttctccaaattccagtggaaaatccaggcggaactggactggagaagaaagcacggacaggcagaattgagagacgcccggaaacacgcagtggaggtgactctggatccagagacggctcacccgaagctctgcgtttctgatctgaaaactgtaacccatagaaaagctccccaggaggtgcctcactctgagaagagatttacaaggaagagtgtggtggcttctcagagtttccaagcagggaaacattactgggaggtggacggaggacacaataaaaggtggcgcgtgggagtgtgccgggatgatgtggacaggaggaaggagtacgtgactttgtctcccgatcatgggtactgggtcctcagactgaatggagaacatttgtatttcacattaaatccccgttttatcagcgtcttccccaggaccccacctacaaaaataggggtcttcctggactatgagtgtgggaccatctccttcttcaacataaatgaccagtcccttatttataccctgacatgtcggtttgaaggcttattgaggccctacattgagtatccgtcctataatgagcaaaatggaactcccatagtcatctgcccagtcacccaggaatcagagaaagaggcctcttggcaaagggcctctgcaatcccagagacaagcaacagtgagtcctcctcacaggcaaccacgcccttcctccccaggggtgaaatgtaggatgaatcacatcccacattcttctttagggatattaaggtctctctcccagatccaaagtcccgcag

SEQ ID NO: 112615 - DNA, 1294 bp, Homo sapiens
  Payload ID: 2025
  Gene Symbol: BTNL8
  Gene Name: butyrophilin-like 8
  ENST ID: ENST00000505126
  CDS Start-End: 359-1240
agtcacacccttcacagtgaaatgtatttgacggggctgggtgcagtggctcaagcccgtaatcccaacaccttgagaggctgagacaggaggattgcttgagtccaggagctcgagaccagcctgggcatatgcactgggctcagttcctctcatttccatcacgggatatgttgatagagacatccagctactctgtcagtcctcgggctggttcccccggcccacagcgaagtggaaaggtccacaaggacaggatttgtccacagactccaggacaaacagagacatgcatggcctgtttgatgtggagatctctctgaccgtccaagagaacgccgggagcatatcctgttccatgcggcatgctcatctgagccgagaggtggaatccagggtacagataggagatacctttttcgagcctatatcgtggcacctggctaccaaagtactgggaatactctgctgtggcctattttttggcattgttggactgaagattttcttctccaaattccagtggaaaatccaggcggaactggactggagaagaaagcacggacaggcagaattgagagacgcccggaaacacgcagtggaggtgactctggatccagagacggctcacccgaagctctgcgtttctgatctgaaaactgtaacccatagaaaagctccccaggaggtgcctcactctgagaagagatttacaaggaagagtgtggtggcttctcagagtttccaagcagggaaacattactgggaggtggacggaggacacaataaaaggtggcgcgtgggagtgtgccgggatgatgtggacaggaggaaggagtacgtgactttgtctcccgatcatgggtactgggtcctcagactgaatggagaacatttgtatttcacattaaatccccgttttatcagcgtcttccccaggaccccacctacaaaaataggggtcttcctggactatgagtgtgggaccatctccttcttcaacataaatgaccagtcccttatttataccctgacatgtcggtttgaaggcttattgaggccctacattgagtatccgtcctataatgagcaaaatggaactcccatagtcatctgcccagtcacccaggaatcagagaaagaggcctcttggcaaagggcctctgcaatcccagagacaagcaacagtgagtcctcctcacaggcaaccacgcccttcctccccaggggtgaaatgtaggatgaatcacatcccacattcttctttagggatattaaggtctctctcccagat

SEQ ID NO: 112616 - DNA, 1600 bp, Homo sapiens
  Payload ID: 2025
  Gene Symbol: BTNL8
  Gene Name: butyrophilin-like 8
  Uniprot ID: Q6UX41
  ENST ID: ENST00000533815
  CDS Start-End: 290-1240
agtcacacccttcacagtgaaatgtatttgacggggctgggtgcagtggctcaagcccgtaatcccaacaccttgagaggctgagacaggaggattgcttgagtccaggagctcgagaccagcctgggcatatgcactgggctcagttcctctcatttccatcacgggatatgttgatagagacatccagctactctgtcagtcctcgggctggttcccccggcccacagcgaagtggaaaggtccacaaggacaggatttgtccacagactccaggacaaacagagacatgcatggcctgtttgatgtggagatctctctgaccgtccaagagaacgccgggagcatatcctgttccatgcggcatgctcatctgagccgagaggtggaatccagggtacagataggagatacctttttcgagcctatatcgtggcacctggctaccaaagtactgggaatactctgctgtggcctattttttggcattgttggactgaagattttcttctccaaattccagtggaaaatccaggcggaactggactggagaagaaagcacggacaggcagaattgagagacgcccggaaacacgcagtggaggtgactctggatccagagacggctcacccgaagctctgcgtttctgatctgaaaactgtaacccatagaaaagctccccaggaggtgcctcactctgagaagagatttacaaggaagagtgtggtggcttctcagagtttccaagcagggaaacattactgggaggtggacggaggacacaataaaaggtggcgcgtgggagtgtgccgggatgatgtggacaggaggaaggagtacgtgactttgtctcccgatcatgggtactgggtcctcagactgaatggagaacatttgtatttcacattaaatccccgttttatcagcgtcttccccaggaccccacctacaaaaataggggtcttcctggactatgagtgtgggaccatctccttcttcaacataaatgaccagtcccttatttataccctgacatgtcggtttgaaggcttattgaggccctacattgagtatccgtcctataatgagcaaaatggaactcccatagtcatctgcccagtcacccaggaatcagagaaagaggcctcttggcaaagggcctctgcaatcccagagacaagcaacagtgagtcctcctcacaggcaaccacgcccttcctccccaggggtgaaatgtaggatgaatcacatcccacattcttctttagggatattaaggtctctctcccagatccaaagtcccgcagcagccggccaaggtggcttccagatgaagggggactggcctgtccacatgggagtcaggtgtcatggctgccctgagctgggagggaagaaggctgacattacatttagtttgctctcactccatctggctaagtgatcttgaaataccacctctcaggtgaagaaccgtcaggaattcccatctcacaggctgtggtgtagattaagtagacaaggaatgtgaataatgcttagatcttattgatgacagagtgtatcctaatggtttgttcattatattacactttcagt

SEQ ID NO: 112617 - DNA, 1488 bp, Homo sapiens
  Payload ID: 2025
  Gene Symbol: BTNL8
  Gene Name: butyrophilin-like 8
  Uniprot ID: Q6UX41
  ENST ID: ENST00000610640
  CDS Start-End: 1-1128
atgtggacatggtttgtcaaatcactgggctcagttcctctcatttccatcacgggatatgttgatagagacatccagctactctgtcagtcctcgggctggttcccccggcccacagcgaagtggaaaggtccacaaggacaggatttgtccacagactccaggacaaacagagacatgcatggcctgtttgatgtggagatctctctgaccgtccaagagaacgccgggagcatatcctgttccatgcggcatgctcatctgagccgagaggtggaatccagggtacagataggagatacctttttcgagcctatatcgtggcacctggctaccaaagtactgggaatactctgctgtggcctattttttggcattgttggactgaagattttcttctccaaattccagtggaaaatccaggcggaactggactggagaagaaagcacggacaggcagaattgagagacgcccggaaacacgcagtggaggtgactctggatccagagacggctcacccgaagctctgcgtttctgatctgaaaactgtaacccatagaaaagctccccaggaggtgcctcactctgagaagagatttacaaggaagagtgtggtggcttctcagagtttccaagcagggaaacattactgggaggtggacggaggacacaataaaaggtggcgcgtgggagtgtgccgggatgatgtggacaggaggaaggagtacgtgactttgtctcccgatcatgggtactgggtcctcagactgaatggagaacatttgtatttcacattaaatccccgttttatcagcgtcttccccaggaccccacctacaaaaataggggtcttcctggactatgagtgtgggaccatctccttcttcaacataaatgaccagtcccttatttataccctgacatgtcggtttgaaggcttattgaggccctacattgagtatccgtcctataatgagcaaaatggaactcccatagtcatctgcccagtcacccaggaatcagagaaagaggcctcttggcaaagggcctctgcaatcccagagacaagcaacagtgagtcctcctcacaggcaaccacgcccttcctccccaggggtgaaatgtaggatgaatcacatcccacattcttctttagggatattaaggtctctctcccagatccaaagtcccgcagcagccggccaaggtggcttccagatgaagggggactggcctgtccacatgggagtcaggtgtcatggctgccctgagctgggagggaagaaggctgacattacatttagtttgctctcactccatctggctaagtgatcttgaaataccacctctcaggtgaagaaccgtcaggaattcccatctcacaggctgtggtgtagattaagtagacaaggaatgtgaataatgcttagatcttattgatgacagagtgtatcctaatggtttgttcattatattacactttcagt

SEQ ID NO: 112618 - DNA, 3500 bp, Homo sapiens
  Payload ID: 2026
  Gene Symbol: BTNL9
  Gene Name: butyrophilin-like 9
  Uniprot ID: Q6UXG8
  ENST ID: ENST00000327705
  CDS Start-End: 232-1839
agagcaaacggcatatatcttagggtggaagatggataaataattctgtcacacgtgccctggcctctggagctcagctgccagtccacgtctagggaatcttagcatctgggaccaagacactttacagcaatcatcaccctttgcagaggaggtgagctcaccaggactcatctgccatttcagaccttttgctgctacctgccaggtggcccccactgctgacgagagatggtggacctctcagtctccccagactccttgaagccagtatcgctgaccagcagtcttgtcttcctcatgcacctcctcctccttcagcctggggagccgagctcagaggtcaaggtgctaggccctgagtatcccatcctggccctcgtcggggaggaggtggagttcccgtgccacctatggccacagctggatgcccagcaaatggagatccgctggttccggagtcagaccttcaatgtggtacacctgtaccaggagcagcaggagctccctggcaggcagatgccggcgttccggaacaggaccaagttggtcaaggacgacatcgcctatggcagcgtggtcctgcagcttcacagcatcatcccctctgacaagggcacatatggctgccgcttccactccgacaacttctctggcgaagctctctgggaactggaggtagcagggctgggctcagaccctcacctctcccttgagggcttcaaggaaggaggcattcagctgaggctcagatccagtggctggtaccccaagcctaaggttcagtggagagaccaccagggacagtgcctgcctccagagtttgaagccatcgtctgggatgcccaggacctgttcagtctggaaacatctgtggttgtccgagcgggagccctcagcaatgtgtccgtctccatccagaatctcctcttgagccagaagaaagagttggtggtccagatagcagacgtgttcgtacccggagcctctgcgtggaagagcgcgttcgtcgcgaccctgccgctgctgttggtcctcgcggcgctggcgctgggcgtcctccggaagcagcggagaagccgagaaaagctgaggaagcaggcggagaagagacaagagaaactcactgcagagctggaaaagcttcagacagagcttgactggagacgggctgaaggccaggctgagtggagagcagcccaaaaatatgcagtggatgtgacgctggacccggcctcggcgcaccccagcctggaggtgtcggaggatggcaagagcgtgtcttcccgcggggcgccgccaggcccggcgcctggccacccgcagcggttctcggagcagacgtgcgcgctgagcctggagcggttctccgccggccgccactactgggaggtgcacgtgggccgccgcagccgctggttcctgggcgcctgcctggccgcggtgccgcgcgcggggcctgcgcgcctgagccctgcggccggctactgggtgctggggctgtggaacggctgcgagtacttcgtcctggccccgcaccgcgtcgcgctcaccctgcgcgtgcccccgcggcgcctgggcgtcttcctggactacgaggccggagagctgtccttcttcaacgtgtccgacggctcccacatcttcaccttccacgacaccttctcgggcgcgctctgtgcgtacttcaggcccagggcccacgacggcggcgaacatccggatcccctgaccatctgcccgctgccggttagagggacgggcgtccccgaagagaacgacagtgacacctggctacagccctatgagcccgcggaccccgccctggactggtggtgaggcgccctcgtggccgcgggactggccccggggggccccctggatcccaggccagcgctttgctctcctgctccgtctgaagggagcaggtgcaccagccaaaatgtcagcgagggggacaaagagagggacctttgcctacgtagatgtgtatgtgtagtgcgattttcttcaaggaaaggagacaagtccaaagctcgtttgtggattgtgggactgagcgaaggagtacaaatatatccacgtcgctcagagctggggtgctcacggtgggcggtgggcaagaagccagcatggaagaaagaagggagaaaactttggtgactgccttagagggatcagttaatttgtatagttttatattttttgtatatgtttgctagctctaaaaaggtcgagatgcaataacacttcgtaagcaacgagttcacctaagtaaggctcagatcctagttttaaaaaccatttcccattaaaatgaagttggaggaacagctgcttctggagccggggcaaaaatttcaaggtgagcctggagcattgtgtgtggtgaagtaaaataaaggctcaaaacgtgacggcaacccggcaaaagggtagggagccaggccgaaggggcctcactgaccaattgtgggacaatttgaacatcaggatgaataatgacaggagagattataacacactgaataaaaacataatccatgagttcatgctgatactcaaatttctttttaaaaaggagaaacaggaaggtttcttttggaggtgaaatctaattattggtgagagtcttggagaacaggctgtttccagtctcaaagcagtaaccttatacactacttataagtttgaaaggggaaaggttacctttacaatggagacatctaccagatcatccaagtgattaaatttaacatcatcaatgatgggaccaaggacattattagtttgacaactggggaaagaagtgttcttcaccccctacccccaagacattgtctctgtcggccaggctggagtgcagcctcaacctcctgggtccaagtgatcctcccacctcagcacacaacaccatgcccaattttaagtgcgttatagagacgggggtctcactttgttacccaggctggtctcaaactcctgcgctcaagcaatcctcccacctgggcctcccaaaatgctgggtgtacaggcatgagccgctgtgcctggcttcattttcagagtgagacatttgtactgtggctatgtaggagaacattcttgttcttagcaaacatactgaagtttttagatattaattaccacagtgtctgccactgaatttccagtgactaagtggaaaaatataaaacatatgaatataaagaaagaaagagacaagtcaaatgtagtaaaatgacaacacttggtgactctaggtgactggtcgacagatgttcattgtactatcaatgtggctttgctgtgggtttgaaattttgcaaactaagagttgggtggcggggagaaggatacaccaaaaaactaagtgattatctttggatgggaaaatgtttggtaattgcattcttaaaatgtcttctttgtattttttaatgttcaataatgtatatgtatcagttctgtaataaaggggaaaacactttttttaaata

SEQ ID NO: 112619 - DNA, 1626 bp, Homo sapiens
  Payload ID: 2026
  Gene Symbol: BTNL9
  Gene Name: butyrophilin-like 9
  Uniprot ID: Q6UXG8
  ENST ID: ENST00000376841
  CDS Start-End: 232-1266
agagcaaacggcatatatcttagggtggaagatggataaataattctgtcacacgtgccctggcctctggagctcagctgccagtccacgtctagggaatcttagcatctgggaccaagacactttacagcaatcatcaccctttgcagaggaggtgagctcaccaggactcatctgccatttcagaccttttgctgctacctgccaggtggcccccactgctgacgagagatggtggacctctcagtctccccagactccttgaagccagtatcgctgaccagcagtcttgtcttcctcatgcacctcctcctccttcagcctggggagccgagctcagaggtcaaggtgctaggccctgagtatcccatcctggccctcgtcggggaggaggtggagttcccgtgccacctatggccacagctggatgcccagcaaatggagatccgctggttccggagtcagaccttcaatgtggtacacctgtaccaggagcagcaggagctccctggcaggcagatgccggcgttccggaacaggaccaagttggtcaaggacgacatcgcctatggcagcgtggtcctgcagcttcacagcatcatcccctctgacaagggcacatatggctgccgcttccactccgacaacttctctggcgaagctctctgggaactggaggtagcagggctgggctcagaccctcacctctcccttgagggcttcaaggaaggaggcattcagctgaggctcagatccagtggctggtaccccaagcctaaggttcagtggagagaccaccagggacagtgcctgcctccagagtttgaagccatcgtctgggatgcccaggacctgttcagtctggaaacatctgtggttgtccgagcgggagccctcagcaatgtgtccgtctccatccagaatctcctcttgagccagaagaaagagttggtggtccagatagcagacgtgttcgtacccggagcctctgcgtggaagagcgcgttcgtcgcgaccctgccgctgctgttggtcctcgcggcgctggcgctgggcgtcctccggaagcagcggagaagccgagaaaagctgaggaagcaggcggagaagagacaagagaaactcactgcagagctggaaaagcttcagacagagcttgactggagacgggctgaaggccaggctgagtgcttcgttttagccagccaccctcctggagaaggtatccaggctgcctctaactccacaacaacactgaatgcatagtctcaaacgtgttgccttacggcgctgtgtggagatttctctggggtttgcaacctctgaatgctgagaagattgagcatctctgtatatgctagttggctctggggacttcctctactgaaaattgccagctcacatcactgacccatttttcttatgggatggctgtcttttattattaacaggaatattatatatctgtgtgtgtgtgtgtgtgtgtgtgtgtgtgtgtgtgagattaatccctcatgggtaaacatcgtgaattccttcttctgttgtgccatctgccattagctttgtccatagttccccttattgaaaaggaattattaattttgataaaacataatccatcaa

SEQ ID NO: 112620 - DNA, 2199 bp, Homo sapiens
  Payload ID: 2026
  Gene Symbol: BTNL9
  Gene Name: butyrophilin-like 9
  Uniprot ID: Q6UXG8
  ENST ID: ENST00000491209
  CDS Start-End: 220-1167
atatatcttagggtggaagatggataaataattctgtcacacgtgccctggcctctggagctcagctgccagtccacgtctagggaatcttagcatctgggaccaagacactttacagcaatcatcaccctttgcagaggaggtgagctcaccaggactcatctgccatttcagaccttttgctgctacctgccaggtggcccccactgctgacgagagatggtggacctctcagtctccccagactccttgaagccagtatcgctgaccagcagtcttgtcttcctcatgcacctcctcctccttcagcctggggagccgagctcagaggtcaaggtgctaggccctgagtatcccatcctggccctcgtcggggaggaggtggagttcccgtgccacctatggccacagctggatgcccagcaaatggagatccgctggttccggagtcagaccttcaatgtggtacacctgtaccaggagcagcaggagctccctggcaggcagatgccggcgttccggaacaggaccaagttggtcaaggacgacatcgcctatggcagcgtggtcctgcagcttcacagcatcatcccctctgacaagggcacatatggctgccgcttccactccgacaacttctctggcgaagctctctgggaactggaggtagcagggctgggctcagaccctcacctctcccttgagggcttcaaggaaggaggcattcagctgaggctcagatccagtggctggtaccccaagcctaaggttcagtggagagaccaccagggacagtgcctgcctccagagtttgaagccatcgtctgggatgcccaggacctgttcagtctggaaacatctgtggttgtccgagcgggagccctcagcaatgtgtccgtctccatccagaatctcctcttgagccagaagaaagagttggtggtccagatagcagacgtgttcgtacccggagcctctgcgtggaagagcgcgttcgtcgcgaccctgccgctgctgttggtcctcgcggcgctggcgctgggcgtcctccggaagcagcggagaagccgagaaaagctgaggaagcaggcggagaagagacaaggtgagcggggacagggcgttctgcacgcacctgcccaagtgccaaaacccgccgtcatctaaaggctgtgggtcccgttacgagggtttattccagcgcgaggtgtcagggcggccaccggggaacggggatcggtgaccccggtggggaagggggaagatcgttcatatggacaaaagcggaggtgcggaacggctgcattttccacggaggctagtgcacagatgtcagggttgaccggctgctgtcgttacgccctcggagcttcacatcacactgtacagagggagcggtgaccagggtctctgctgccagcgccacctcgtccaggttttcatagcgcacagggagtcgggcggatgcgcaacatctccgcacagggtcaggaagcggcggtcaggcaccgagaaaacagcccagttacgtgaggcagtgtccggggcttaacgtttccgccgagctaatagatttgggaggctccgaccctgattttcacactagcaggagggagggcgctgggtcaccctcctatgcagaagggcagccaagggtgcgcacttccccatcccctgcctggagcctcacttccagcccagcctgggcccgcagaccaccgcgggtgggagtgccgcatcggaggtgaggcctcagtgttcacccatctgttctgtctgcctcattccccaacctgagagtctttccccttttcttcatcttttttttttttttttctctagagaaactcactgcagagctggaaaagcttcagacagagcttggtaagtgacccctcttagaactatttctcctcagggccgggtccagtggctcacacctgtaatcccagtactttgggaggccgaggcgggtggatcacgaggtcaggagatcgagaccagcctggctaacacagtgaaaccccgtctcttctaaaaatacaaaaaattagcccggcgtggcggcatgtgcctgtagtcccagctacatgggaggctgaggcaggagaagggcgtgaacccgggaagcggagcttgcagtgagccgagatggcgccactgcactccagcctgggcgacagagcgagactctgtctc

SEQ ID NO: 112621 - DNA, 1444 bp, Homo sapiens
  Payload ID: 2026
  Gene Symbol: BTNL9
  Gene Name: butyrophilin-like 9
  ENST ID: ENST00000515271
  CDS Start-End: 266-1006
aattctgtcacacgtgccctggcctctggagctcagctgccagtccacgtctagggaatcttagcatctgggaccaagacactttacagcaatcatcaccctttgcagaggaggtgagctcaccaggactcatctgccatttcagaccttttgctgctacctgccagaggtcaaggtgctaggccctgagtatcccatcctggccctcgtcggggaggaggtggagttcccgtgccacctatggccacagctggatgcccagcaaatggagatccgctggttccggagtcagaccttcaatgtggtacacctgtaccaggagcagcaggagctccctggcaggcagatgccggcgttccggaacaggaccaagttggtcaaggacgacatcgcctatggcagcgtggtcctgcagcttcacagcatcatcccctctgacaagggcacatatggctgccgcttccactccgacaacttctctggcgaagctctctgggaactggaggtagcagggctgggctcagaccctcacctctcccttgagggcttcaaggaaggaggcattcagctgaggctcagatccagtggctggtaccccaagcctaaggttcagtggagagaccaccagggacagtgcctgcctccagagtttgaagccatcgtctgggatgcccaggacctgttcagtctggaaacatctgtggttgtccgagcgggagccctcagcaatgtgtccgtctccatccagaatctcctcttgagccagaagaaagagttggtggtccagatagcagacgtgttcgtacccggagcctctgcgtggaagagcgcgttcgtcgcgaccctgccgctgctgttggtcctcgcggcgctggcgctgggcgtcctccggaagcagcggagaagccgagaaaagctgaggaagcaggcggagaagagacaaggtgagcggggacagggcgttctgcacgcacctgcccaagtgccaaaacccgccgtcatctaaaggctgtgggtcccgttacgagggtttattccagcgcgaggtgtcagggcggccaccggggaacggggatcggtgaccccggtggggaagggggaagatcgttcatatggacaaaagcggaggtgcggaacggctgcattttccacggaggctagtgcacagatgtcagggttgaccggctgctgtcgttacgccctcggagcttcacatcacactgtacagagggagcggtgaccagggtctctgctgccagcgccacctcgtccaggttttcatagcgcacagggagtcgggcggatgcgcaacatctccgcacagggtcaggaagcggcggtcaggcaccgagaaaacagcccagttacgtgaggcagtgtccggggcttaacgtttccgccgagctaatagatttgggaggctccgaccctgattttcacacta

SEQ ID NO: 112622 - DNA, 2454 bp, Homo sapiens
  Payload ID: 2027
  Gene Symbol: BCHE
  Gene Name: butyrylcholinesterase
  Uniprot ID: P06276
  ENST ID: ENST00000264381
  CDS Start-End: 168-1976
gagctttgtcagtaacagttgattgttacattcagtaacactgaatgtcagtgcagtccaatttacaggctggagcagcagctgcatcctgcatttccccgaagtattacatgattttcactccttgcaaactttgccatctttgttgcagagaatcggaaatcaatatgcatagcaaagtcacaatcatatgcatcagatttctcttttggtttcttttgctctgcatgcttattgggaagtcacatactgaagatgacatcataattgcaacaaagaatggaaaagtcagagggatgaacttgacagtttttggtggcacggtaacagcctttcttggaattccctatgcacagccacctcttggtagacttcgattcaaaaagccacagtctctgaccaagtggtctgatatttggaatgccacaaaatatgcaaattcttgctgtcagaacatagatcaaagttttccaggcttccatggatcagagatgtggaacccaaacactgacctcagtgaagactgtttatatctaaatgtatggattccagcacctaaaccaaaaaatgccactgtattgatatggatttatggtggtggttttcaaactggaacatcatctttacatgtttatgatggcaagtttctggctcgggttgaaagagttattgtagtgtcaatgaactatagggtgggtgccctaggattcttagctttgccaggaaatcctgaggctccagggaacatgggtttatttgatcaacagttggctcttcagtgggttcaaaaaaatatagcagcctttggtggaaatcctaaaagtgtaactctctttggagaaagtgcaggagcagcttcagttagcctgcatttgctttctcctggaagccattcattgttcaccagagccattctgcaaagtggatcctttaatgctccttgggcggtaacatctctttatgaagctaggaacagaacgttgaacttagctaaattgactggttgctctagagagaatgagactgaaataatcaagtgtcttagaaataaagatccccaagaaattcttctgaatgaagcatttgttgtcccctatgggactcctttgtcagtaaactttggtccgaccgtggatggtgattttctcactgacatgccagacatattacttgaacttggacaatttaaaaaaacccagattttggtgggtgttaataaagatgaagggacagcttttttagtctatggtgctcctggcttcagcaaagataacaatagtatcataactagaaaagaatttcaggaaggtttaaaaatattttttccaggagtgagtgagtttggaaaggaatccatcctttttcattacacagactgggtagatgatcagagacctgaaaactaccgtgaggccttgggtgatgttgttggggattataatttcatatgccctgccttggagttcaccaagaagttctcagaatggggaaataatgcctttttctactattttgaacaccgatcctccaaacttccgtggccagaatggatgggagtgatgcatggctatgaaattgaatttgtctttggtttacctctggaaagaagagataattacacaaaagccgaggaaattttgagtagatccatagtgaaacggtgggcaaattttgcaaaatatgggaatccaaatgagactcagaacaatagcacaagctggcctgtcttcaaaagcactgaacaaaaatatctaaccttgaatacagagtcaacaagaataatgacgaaactacgtgctcaacaatgtcgattctggacatcattttttccaaaagtcttggaaatgacaggaaatattgatgaagcagaatgggagtggaaagcaggattccatcgctggaacaattacatgatggactggaaaaatcaatttaacgattacactagcaagaaagaaagttgtgtgggtctctaattaatagatttaccctttatagaacatattttcctttagatcaaggcaaaaatatcaggagcttttttacacacctactaaaaaagttattatgtagctgaaacaaaaatgccagaaggataatattgattcctcacatctttaacttagtattttacctagcatttcaaaacccaaatggctagaacgtgtttaattaaatttcacaatataaagttctacagttaattatgtgcatattaaaacaatggcctggttcaatttctttctttccttaataaatttaagtttttccccccaaaattatcagtgctctgcttttagtcacgtgtattttcattaccactcgtaaaaaggtatcttttttaaatgaattaaatattgaaacactgtacaccatagtttacaatattatgtttcctaattaaaataagaattgaatgtcaatatgagatattaaaataagcacagaaaatca

SEQ ID NO: 112623 - DNA, 702 bp, Homo sapiens
  Payload ID: 2027
  Gene Symbol: BCHE
  Gene Name: butyrylcholinesterase
  ENST ID: ENST00000479451
  CDS Start-End: 1-399
gcagtccaatttacaggctggagcagcagctgcatcctgcatttccccgaagtattacatgattttcactccttgcaaactttgccatctttgttgcagagaatcgggaatccaaatgagactcagaacaatagcacaagctggcctgtcttcaaaagcactgaacaaaaatatctaaccttgaatacagagtcaacaagaataatgacgaaactacgtgctcaacaatgtcgattctggacatcattttttccaaaagtcttggaaatgacaggaaatattgatgaagcagaatgggagtggaaagcaggattccatcgctggaacaattacatgatggactggaaaaatcaatttaacgattacactagcaagaaagaaagttgtgtgggtctctaattaatagatttaccctttatagaacatattttcctttagatcaaggcaaaaatatcaggagcttttttacacacctactaaaaaagttattatgtagctgaaacaaaaatgccagaaggataatattgattcctcacatctttaacttagtattttacctagcatttcaaaacccaaatggctagaacgtgtttaattaaatttcacaatataaagttctacagttaattatgtgcatattaaaacaatggcctggttcaatttctttctttccttaataaatttaagtttttccccccaaaa

SEQ ID NO: 112624 - DNA, 739 bp, Homo sapiens
  Payload ID: 2027
  Gene Symbol: BCHE
  Gene Name: butyrylcholinesterase
  ENST ID: ENST00000488954
  CDS Start-End: 1-363
gcagtccaatttacaggctggagcagcagctgcatcctgcatttccccgaagtattacatgattttcactccttgcaaactttgccatctttgttgcagagaatcgggaatccaaatgagactcagaacaatagcacaagctggcctgtcttcaaaagcactgaacaaaaatatctaaccttgaatacagagtcaacaagaataatgacgaaactacgtgctcaacaatgtcgattctggacatcattttttccaaaagtcttggaaatgacagagcctatatgctgctactgtgagccaggaactgcactagcagctagagctgcacagatgaaaatgacagggtctgcttactcacagtgaagtggagtcagggcccaggaccatggaaagcttttaagaagagaagatacctgcactgaatctcaatgtgaaggcaaagtggagagaagccagataagcaggaaccagagatgaagtgtcttgtgcatcatgctaaagaatttaaattatattctgagtaaagccatttagtaattttaaatgagaaactgatatgttctggttattgattcataaatgtataatcttttactatattcacgagttattcttttttacctttgtcttcttagagtctagattgtaagaatattatatggcatcaacataataatttcatttctgaggtagggtctttcttccaaatagctgcttttgtttgctggttcattcgcat

SEQ ID NO: 112625 - DNA, 2522 bp, Homo sapiens
  Payload ID: 2027
  Gene Symbol: BCHE
  Gene Name: butyrylcholinesterase
  ENST ID: ENST00000497011
  CDS Start-End: 158-1846
agtaacagttgattgttacattcagtaacactgaatgtcagtgcagtccaatttacaggctggagcagcagctgcatcctgcatttccccgaagtattacatgattttcactccttgcaaactttgccatctttgttgcagagaatcggaaatcaatatgcatagcaaagtcacaatcatatgcatcagatttctcttttggtttcttttgctctgcatgcttattgggaagtcacatactgaagatgacatcataattgcaacaaagaatggaaaagtcagagggatgaacttgacagtttttggtggcacggtaacagcctttcttggaattccctatgcacagccacctcttggtagacttcgattcaaaaagccacagtctctgaccaagtggtctgatatttggaatgccacaaaatatgcaaattcttgctgtcagaacatagatcaaagttttccaggcttccatggatcagagatgtggaacccaaacactgacctcagtgaagactgtttatatctaaatgtatggattccagcacctaaaccaaaaaatgccactgtattgatatggatttatggtggtggttttcaaactggaacatcatctttacatgtttatgatggcaagtttctggctcgggttgaaagagttattgtagtgtcaatgaactatagggtgggtgccctaggattcttagctttgccaggaaatcctgaggctccagggaacatgggtttatttgatcaacagttggctcttcagtgggttcaaaaaaatatagcagcctttggtggaaatcctaaaagtgtaactctctttggagaaagtgcaggagcagcttcagttagcctgcatttgctttctcctggaagccattcattgttcaccagagccattctgcaaagtggatcctttaatgctccttgggcggtaacatctctttatgaagctaggaacagaacgttgaacttagctaaattgactggttgctctagagagaatgagactgaaataatcaagtgtcttagaaataaagatccccaagaaattcttctgaatgaagcatttgttgtcccctatgggactcctttgtcagtaaactttggtccgaccgtggatggtgattttctcactgacatgccagacatattacttgaacttggacaatttaaaaaaacccagattttggtgggtgttaataaagatgaagggacagcttttttagtctatggtgctcctggcttcagcaaagataacaatagtatcataactagaaaagaatttcaggaaggtttaaaaatattttttccaggagtgagtgagtttggaaaggaatccatcctttttcattacacagactgggtagatgatcagagacctgaaaactaccgtgaggccttgggtgatgttgttggggattataatttcatatgccctgccttggagttcaccaagaagttctcagaatggggaaataatgcctttttctactattttgaacaccgatcctccaaacttccgtggccagaatggatgggagtgatgcatggctatgaaattgaatttgtctttggtttacctctggaaagaagagataattacacaaaagccgaggaaattttgagtagatccatagtgaaacggtgggcaaattttgcaaaatatgggaatccaaatgagactcagaacaatagcacaagctggcctgtcttcaaaagcactgaacaaaaatatctaaccttgaatacagagtcaacaagaataatgacgaaactacgtgctcaacaatgtcgattctggacatcattttttccaaaagtcttggaaatgacaggctgaggagtaggaggaggggaaaaggagctgttggtctcgctgtctctggattgacagaggtggaagaaaatccacatgaaatattgatgaagcagaatgggagtggaaagcaggattccatcgctggaacaattacatgatggactggaaaaatcaatttaacgattacactagcaagaaagaaagttgtgtgggtctctaattaatagatttaccctttatagaacatattttcctttagatcaaggcaaaaatatcaggagcttttttacacacctactaaaaaagttattatgtagctgaaacaaaaatgccagaaggataatattgattcctcacatctttaacttagtattttacctagcatttcaaaacccaaatggctagaacgtgtttaattaaatttcacaatataaagttctacagttaattatgtgcatattaaaacaatggcctggttcaatttctttctttccttaataaatttaagtttttccccccaaaattatcagtgctctgcttttagtcacgtgtattttcattaccactcgtaaaaaggtatcttttttaaatgaattaaatattgaaacactgtacaccatagtttacaatattatgtttcctaattaaaataagaattgaatgtcaatatgagatattaaaataagcacagaaaatc

SEQ ID NO: 112626 - DNA, 2527 bp, Homo sapiens
  Payload ID: 2027
  Gene Symbol: BCHE
  Gene Name: butyrylcholinesterase
  ENST ID: ENST00000482958
  CDS Start-End: 158-1735
agtaacagttgattgttacattcagtaacactgaatgtcagtgcagtccaatttacaggctggagcagcagctgcatcctgcatttccccgaagtattacatgattttcactccttgcaaactttgccatctttgttgcagagaatcggaaatcaatatgcatagcaaagtcacaatcatatgcatcagatttctcttttggtttcttttgctctgcatgcttattgggaagtcacatactgaagatgacatcataattgcaacaaagaatggaaaagtcagagggatgaacttgacagtttttggtggcacggtaacagcctttcttggaattccctatgcacagccacctcttggtagacttcgattcaaaaagccacagtctctgaccaagtggtctgatatttggaatgccacaaaatatgcaaattcttgctgtcagaacatagatcaaagttttccaggcttccatggatcagagatgtggaacccaaacactgacctcagtgaagactgtttatatctaaatgtatggattccagcacctaaaccaaaaaatgccactgtattgatatggatttatggtggtggttttcaaactggaacatcatctttacatgtttatgatggcaagtttctggctcgggttgaaagagttattgtagtgtcaatgaactatagggtgggtgccctaggattcttagctttgccaggaaatcctgaggctccagggaacatgggtttatttgatcaacagttggctcttcagtgggttcaaaaaaatatagcagcctttggtggaaatcctaaaagtgtaactctctttggagaaagtgcaggagcagcttcagttagcctgcatttgctttctcctggaagccattcattgttcaccagagccattctgcaaagtggatcctttaatgctccttgggcggtaacatctctttatgaagctaggaacagaacgttgaacttagctaaattgactggttgctctagagagaatgagactgaaataatcaagtgtcttagaaataaagatccccaagaaattcttctgaatgaagcatttgttgtcccctatgggactcctttgtcagtaaactttggtccgaccgtggatggtgattttctcactgacatgccagacatattacttgaacttggacaatttaaaaaaacccagattttggtgggtgttaataaagatgaagggacagcttttttagtctatggtgctcctggcttcagcaaagataacaatagtatcataactagaaaagaatttcaggaaggtttaaaaatattttttccaggagtgagtgagtttggaaaggaatccatcctttttcattacacagactgggtagatgatcagagacctgaaaactaccgtgaggccttgggtgatgttgttggggattataatttcatatgccctgccttggagttcaccaagaagttctcagaatggggaaataatgcctttttctactattttgaacaccgatcctccaaacttccgtggccagaatggatgggagtgatgcatggctatgaaattgaatttgtctttggtttacctctggaaagaagagataattacacaaaagccgaggaaattttgagtagatccatagtgaaacggtgggcaaattttgcaaaatatggctgttcttcctcaaccatactaaactacgttcttgaaacagaacctgtggttttgatttgatattcattgaagtactatgatgggaatccaaatgagactcagaacaatagcacaagctggcctgtcttcaaaagcactgaacaaaaatatctaaccttgaatacagagtcaacaagaataatgacgaaactacgtgctcaacaatgtcgattctggacatcattttttccaaaagtcttggaaatgacaggaaatattgatgaagcagaatgggagtggaaagcaggattccatcgctggaacaattacatgatggactggaaaaatcaatttaacgattacactagcaagaaagaaagttgtgtgggtctctaattaatagatttaccctttatagaacatattttcctttagatcaaggcaaaaatatcaggagcttttttacacacctactaaaaaagttattatgtagctgaaacaaaaatgccagaaggataatattgattcctcacatctttaacttagtattttacctagcatttcaaaacccaaatggctagaacgtgtttaattaaatttcacaatataaagttctacagttaattatgtgcatattaaaacaatggcctggttcaatttctttctttccttaataaatttaagtttttccccccaaaattatcagtgctctgcttttagtcacgtgtattttcattaccactcgtaaaaaggtatcttttttaaatgaattaaatattgaaacactgtacaccatagtttacaatattatgtttcctaattaaaataagaattgaatgtcaatatgagatattaaaataagcacagaaaatc

SEQ ID NO: 112627 - DNA, 2237 bp, Homo sapiens
  Payload ID: 2028
  Gene Symbol:
  Gene Name: BX004987.4
  ENST ID: ENST00000618686
  CDS Start-End: 69-296
cctcatcactgtcaccttagagcattagagcctctataggtgctccccaatctctgccctccccacccatggtggtactggggatgcagacagaggaggggcactgcataatgctgagagggctggcacactctctaggtggaacacaggtcatttgtaaagttgtaggtctgccaagcagtattggattcaacacatcttctcaccttctctttccagcgaccctccagggtgccccgactcactttccctgcagatggaggcaaggaggctccacagacaacctccctgcctgaggtcagatagtggccagcaggccaggtactgacaaactgcccctgaccaggttcccagtgatgagtgatgagacccctaatgaccactcctccattgaccaagtcccactgatcaagtccccactgaccatgtcttcctaaccaggcccacacttaataggcctcatgggccagaccccactgaccaattttccactgacctggtccccattgacaagacagggttcccactgacaagaccacaatttaccaggttgctgctcaaccgaccccccactgaacaattctccatgaacgagtacccagctgactgagccccctctgaccaggccctcactgaccaggccccaagccactaaggccccacactgaccaggcccgtgatatattgtgtatgccccaccaaccagtttttcattgtttatgttccaacagatcaggccccagtaataaagccaccactgactaggtccccccactgaccaggcttccaatgactaggtcaccaggtccccactgaggaggctgccactaaccaggcccctgctgatcaggtcccaaatgaccaggtcctgatgaccaggtcatctctgaccatggtccactgaccaggccccagagcaacggggttcaaagtctcattacaatgtccccctcagctcatagaccctccctccctgcatgtgtgcccggaggtcaggccctgggttttttttttgggacgtggcctttcctccaagacacagggagagacagttggcctcaggctccaagttcccagctccacactcaccccaaaggccctctgggcccgtctcaaaggagaaagtgaggtggcctgacactgcctggacacaccatctaccctattcctgagtgtcagagtgtgaggaagggagggacatttggcagataaggcacgctgtgctgttgggtctctcagggcccttcccacagagccccgatctaaagacacaacacagaggctacaggaagactaatccagaacctctgagacagccagggaccacatgagtactctccccagacagccagaagtccctttgctagtttcttggtacttcagtggatgtggcagtggttcttctgttggggaccagtgagtacacactggggagggctcacctgtgtttcctcagtggctccacctctgcttctaaaaaaaatgactcattccagagctggtgcagagaaaatacaagctgagcttagaacatcttctgaaagaaagtaaaaaagtgccgacagagtaatggagacaaatcaaagagacataaagtcagcttggaatgtctactactggcctaatcttggggaattggagcatcagaatcatgagctttctttctcccttatttattggttttatttctccatgtagaacaaagaagagaataagaaaataatcatctggtaaccatcatagtaataattgttcaaacacaagtcatccatgaaatgctaaatctagtgggttctgaggagtaaccagatatttacagagcctcaaagtatctccatacaaaatacggttgaactacaaaaagaaaattgtaacattagcatggacaaacctggcaggtactccttaactctcctaagtaataaaaactgtaaaatgcaaataagccttcgatgacatttactaacctttactaaagtatcaatgatgacttggttgtttaaacagctgaaatttgggcaatttgagtatgtcaaactcaataatactggttttcatttgcaagatccacttaaaacttaaggaggccaaaaaacatcatttaaaatatcctataaattataatcatacatatgatacaaaaatatcctacttcagtaaatattggaatgttatatattttatgagaaacaattaaaatgtgtaaatagcccagtaataaagttttataatctttt

SEQ ID NO: 112628 - DNA, 414 bp, Homo sapiens; identical to SEQ ID NO: 106200
  Payload ID: 2029
  Gene Symbol:
  Gene Name: BX248413.1
  ENST ID: ENST00000611283
  CDS Start-End: 1-414

SEQ ID NO: 112629 - DNA, 2029 bp, Homo sapiens
  Payload ID: 2030
  Gene Symbol: BYSL
  Gene Name: bystin-like
  Uniprot ID: Q13895
  ENST ID: ENST00000230340
  CDS Start-End: 376-1689
tctcggcacccctcggtgacgcctccactgacatcatctgcggattcccgccccgaggtttctaaatccagacattcccgtttggctgagcactctaggcctacatccatgaagctaggagagcgacactcaaagactgcactattgagagaagctaacgttaaaggcagtgaatatattcgggagtccagctccggaacccgggagctcttttagtgggaggggcggcgctgatggcgcttctggcctccgaatgctagggggcgctgtgatcgccgggcggcctcttgggcgctgggagtccaccgcgcaagcgcatcctggcctttcttcagtccccacgtgcgatccttcccggcaactttttcgagaaaaatgcccaaattcaaggcggcccgtggggtggggggtcaggaaaaacatgcgcccctggccgatcagatcctggctgggaatgcggtgcgggcgggggtccgggagaagcggcggggtcgcgggacaggagaagcggaggaagagtatgtggggccccggctgagccgacggattttgcagcaagcacggcagcaacaggaggaactcgaggccgagcatgggactggggacaagcccgcggcgccgcgggaacgcaccacgcggctgggtccaagaatgcctcaggatggatcagatgacgaggacgaggagtggcccaccctggagaaggctgccacaatgacagcagcgggccatcatgcagaggtggttgtggaccctgaggatgagcgtgccatagagatgttcatgaacaagaaccctcctgccaggcgcaccctggctgacatcatcatggagaagctgactgagaagcagacagaggttgagacagtcatgtcagaggtgtcgggcttccctatgccccagctggacccccgggtcctagaagtgtacaggggggtccgggaggtattatctaagtaccgcagtggaaaactgcccaaggcatttaagatcatccctgcactctccaactgggagcaaatcctctacgtcacagagccggaggcctggactgcagctgccatgtaccaggccaccaggatttttgcctctaacctgaaggaacgcatggcccagcgcttctacaaccttgtcctgctccctcgagtacgagatgacgttgctgaatacaaacgactcaacttccatctctacatggctctcaagaaggcccttttcaaacctggagcctggttcaaagggatcctgattccactgtgcgagtctggcacttgtaccctccgggaagccatcattgtgggtagcatcatcaccaagtgctccatccctgtgttgcactccagtgcggccatgctgaaaattgctgagatggaatacagcggtgccaacagcatcttcctgcgactgctgctggataagaagtatgcactgccttaccgggtgctggatgccctagtcttccacttcctggggttccggacagagaagcgtgaactgcctgtgctgtggcaccagtgcctcctgactttggtccagcgctacaaggccgacttggccacagaccagaaagaggccctcttagaactgctccggctgcagccccatccacagctatcgcccgaaatcaggcgtgagcttcagagtgcagtcccccgcgatgtggaagatgttcccatcaccgtggagtgaggaaaacagtcagctgtcctggccaaaggggtttggaaggacaccaagacccccgttggtgactgaagatgacactgagctttaatggctgaagacccagatcagggcagtgacagatcacagggacatctgtggctcccagtccaggacaggaaggactgagggtctggctggttccctcttccattctaggcccttatccctgtttagttctgagagccaacttgagataccatatgctagcattcccagtccccagctggggcttggtgtgagtactttttctatggctattgtgtcaggtcactgtggataaaggcaaagacagatatttattgaa

SEQ ID NO: 112630 - DNA, 1299 bp, Homo sapiens
  Payload ID: 2030
  Gene Symbol: BYSL
  Gene Name: bystin-like
  ENST ID: ENST00000372996
  CDS Start-End: 1-550
ggctgccacaatgacagcagcgggccatcatgcagaggtggttgtggaccctgaggatgagcgtgccatagagatgttcatgaacaagaaccctcctgccaggcgcaccctggctgacatcatcatggagaagctgactgagaagcagacagaggttgagacagtcatgtcagaggtgtcgggcttccctatgccccagctggacccccgggtcctagaagtgtacaggggggtccgggaggtattatctaagtaccgcagtggaaaactgcccaaggcatttaagatcatccctgcactctccaactgggagcaaatcctctacgtcacagagccggaggcctggactgcagctgccatgtaccaggccaccaggatttttgcctctaacctgaaggaacgcatggcccagcgcttctacaaccttgtcctgctccctcgagtacgagatgacgttgctgaatacaaacgactcaacttccatctctacatggctctcaagaaggcccttttcaaacctggagcctggttcaaagtggctgccctttgactctccctagggatcctgattccactgtgcgagtctggcacttgtaccctccgggaagccatcattgtgggtagcatcatcaccaagtgctccatccctgtgttgcactccagtgcggccatgctgaaaattgctgagatggaatacagcggtgccaacagcatcttcctgcgactgctgctggataagaagtatgcactgccttaccgggtgctggatgccctagtcttccacttcctggggttccggacagagaagcgtgaactgcctgtgctgtggcaccagtgcctcctgactttggtccagcgctacaaggccgacttggccacagaccagaaagaggccctcttagaactgctccggctgcagccccatccacagctatcgcccgaaatcaggcgtgagcttcagagtgcagtcccccgcgatgtggaagatgttcccatcaccgtggagtgaggaaaacagtcagctgtcctggccaaaggggtttggaaggacaccaagacccccgttggtgactgaagatgacactgagctttaatggctgaagacccagatcagggcagtgacagatcacagggacatctgtggctcccagtccaggacaggaaggactgagggtctggctggttccctcttccattctaggcccttatccctgtttagttctgagagccaacttgagataccatatgctagcattcccagtccccagctggggcttggtgtgagtactttttctatgg

SEQ ID NO: 112631 - DNA, 1153 bp, Homo sapiens
  Payload ID: 2030
  Gene Symbol: BYSL
  Gene Name: bystin-like
  ENST ID: ENST00000489290
  CDS Start-End: 30-614
gatccttcccggcaactttttcgagaaaaatgcccaaattcaaggcggcccgtggggtggggggtcaggaaaaacatgcgcccctggccgatcagatcctggctgggaatgcggtgcgggcgggggtccgggagaagcggcggggtcgcgggacaggagaagcggaggaagagtatgtggggccccggctgagccgacggattttgcagcaagcacggcagcaacaggaggaactcgaggccgagcatgggactggggacaagcccgcggcgccgcgggaacgcaccacgcggctgggtccaagaatgcctcaggatggatcagatgacgaggacgaggagtggcccaccctggagaaggctgccacaatgacagcagcgggccatcatgcagaggtggttgtggaccctgaggatgagcgtgccatagagatgttcatgaacaagaaccctcctgccaggtattatctaagtaccgcagtggaaaactgcccaaggcatttaagatcatccctgcactctccaactgggagcaaatcctctacgtcacagagccggaggcctggactgcagctgccatgtaccaggccaccaggatttttgcctctaacctgaaggaacgcatggcccagcgcttctacaaccttgtcctgctccctcgagtacgagatgacgttgctgaatacaaacgactcaacttccatctctacatggctctcaagaaggcccttttcaaacctggagcctggttcaaagggatcctgattccactgtgcgagtctggcacttgtaccctccgggaagccatcattgtgggtagcatcatcaccaagtgctccatccctgtgttgcactccagtgcggccatgctgaaaattgctgagatggaatacagcggtgccaacagcatcttcctgcgactgctgctggataagaagtatgcactgccttaccgggtgctggatgccctagtcttccacttcctggggttccggacagagaagcgtgaactgcctgtgctgtggcaccagtgcctcctgactttggtccagcgctacaaggccgacttggccacagaccagaaagaggccctcttagaactgctccggctgcagccccatccacagctatcgcccgaaatcaggcgtgagctt

SEQ ID NO: 112632 - DNA, 2439 bp, Homo sapiens
  Payload ID: 2031
  Gene Symbol: C15orf38-AP3S2
  Gene Name: C15orf38-AP3S2 readthrough
  ENST ID: ENST00000398333
  CDS Start-End: 48-1232
agcccagtgcgccggctctgtgccggggtgcccgggcggtcgggagaatgagccgcatctaccacgacggcgcgctccggaacaaggcggtgcagagcgtccggctgccaggggcctgggaccccgccgcccaccaggggggaaatggtgtcctgctggagggagaactgatcgatgtatctcggcacagcatcttggacactcatggcaggaaggagcgctactacgtgctgtatatccggcccagtcacatccatcgccgtaaattcgacgccaagggaaatgaaatcgagcccaacttcagcgccaccaggaaggtgaacacgggcttcctcatgtcgtcctacaaggtggaagccaagggggacactgacaggctcacgcccgaggcgctgaaggggctggtcaacaagccagagctgctcgcgctgacagagagcctcacccccgaccacacagtggcgttctggatgcccgagtcagagatggaggtgatggaactcgagctgggggccggggtacggctgaagactcggggcgatggtcccttcctggattcattggccaaacttgaggctggaacagtgaccaagtgtaatttcactggtgatggaaagacaggggcatcctggacagacaacatcatggcccaaaagtgttcgaagggggctgcagcggagatccgagagcagggggatggggcagaggacgaggagtggccagaagaaattcaacagcagattgttcgagagactttccatctagtcctcaagcgggatgacaacatctgtaacttcttggagggtggaagtttgattggtggctctgactacaaactgatctaccggcactatgctaccctctactttgtattttgtgtggattcctcagagagtgaacttggaatcttggacctcatccaggtttttgtggaaactctggataagtgtttcgaaaatgtgtgtgaattggatttgatcttccatatggataaggtgcactacatcctccaggaggtggtgatgggtgggatggtgttggaaacaaacatgaatgaaatcgtggctcagattgaggctcaaaacaggctggagaaatccgagggtggcctttcagcagcccctgcgcgggctgtgtctgctgtgaaaaacatcaacctgccagagattcctcggaacatcaacattggcgatctcaacatcaaagttcccaacctgtcccagtttgtctgaggatcaagtattggcctgaaatagagtccttaagacaagcaaagacaagcaaggcaagcacgtctggaaacagaacccattttgagccttagaagagtcaagcctcaggacctggaaactttgtgtctggggaagactgtttggcatggaatagggaagggattcctattgacactgctcgggtgcacccagttctcacatgtgcagtcatgccgttctctgatgcatacggccactgcagatgtgaggggccctgccttcctcagtagggagtcaacatgcccaagtcatttgcacctttacctctcacatggatgctcccaagggttagggactgcattgagcaggcccacctgcttcccagaacctcctcactagggctgagcaccttctctgagtagagtcttcatccttagcaccacagacttctgaggtcctgtgccctttacttgctggtgaggtgtcataggtagaaaagggctggcccttcagatctgggggtgtggtgagtggcaagtaagggcagaattttaggagaaccagagtcacccgctggctctactgagattgttacacccagaatccttttgtgtttttttgtggttttttttttttgaggtggagtcttgctctgtcacccaggctggagtgctgtggtgcaatctcggctcactgcaacctctgcttcccgggttcaagcatttctcctgtctcagcctccccagtagctgggattacaggcacccaccaccatgcccagctaattgttgtatgtttagtagagacagggtttcaccatgttggccaggctgggctcgaactcctggacctcaagtgatctacccgccttggcctcccaaagtgctggcattacaggtgtgagccaccgtgcccggccaccagaatcctttggtatagccaagccttttggttaccgcctcatgaagaatatgcttcccgcattgtcctagtcccagttgtattctcacaggtgttatgtgcaggacacaatccaaatcataaacctggctcatgcccaacacatttctgctaatagggagagggacccaccacacacccacacatgccagaggtccctcctcacagaggagagggcctgtgtctgtagaaggttaaagctgacaacatgtgaaacatcccagaattatgactcttcccaagtttaaaatacattctcctcatgaga

SEQ ID NO: 112633 - DNA, 664 bp, Homo sapiens
  Payload ID: 2031
  Gene Symbol: C15orf38-AP3S2
  Gene Name: C15orf38-AP3S2 readthrough
  ENST ID: ENST00000558648
  CDS Start-End: 108-664
tgctgtatatccggcccagtcacatccatcgccgtaaattcgacgccaagggaaatgaaatcgagcccaacttcagcgccaccaggaaggtgaacacgggcttcctcatgtcgtcctacaaggtggaagccaagggggacactgacaggctcacgcccgaggcgctgaaggggctggtcaacaagccagagctgctcgcgctgacagagagcctcacccccgaccacacagtggcgttctggatgcccgagtcagagatggaggtgatggaactcgagctgggggccggggtacggctgaagactcggggcgatggtcccttcctggattcattggccaaacttgaggctggaacagtgaccaagtgtaatttcactggtgatggaaagacaggggcatcctggacagacaacatcatggcccaaaagtgttcgaagggggctgcagcggagatccgagagcagggggatggggcagaggacgaggagtgggtttttgtggaaactctggataagtgtttcgaaaatgtgtgtgaattggatttgatcttccatatggataaggtgcactacatcctccaggaggtggtgatgggtgggatggtgttggaaacaaacatgaatgaaatcgtggctcagattgaggctcaaaacaggctggagaa

SEQ ID NO: 112634 - DNA, 675 bp, Homo sapiens
  Payload ID: 2031
  Gene Symbol: C15orf38-AP3S2
  Gene Name: C15orf38-AP3S2 readthrough
  ENST ID: ENST00000559629
  CDS Start-End: 122-675
ggagcgctactacgtgctgtatatccggcccagtcacatccatcgccgtaaattcgacgccaagggaaatgaaatcgagcccaacttcagcgccaccaggaaggtgaacacgggcttcctcatgtcgtcctacaattcattggccaaacttgaggctggaacagtgaccaagtgtaatttcactggtgatggaaagacaggggcatcctggacagacaacatcatggcccaaaagtgttcgaagggggctgcagcggagatccgagagcagggggatggggcagaggacgaggagtggccagaagaaattcaacagcagattgttcgagagactttccatctagtcctcaagcgggatgacaacatctgtaacttcttggagggtggaagtttgattggtggctctgactacaaactgatctaccggcactatgctaccctctactttgtattttgtgtggattcctcagagagtgaacttggaatcttggacctcatccaggtttttgtggaaactctggataagtgtttcgaaaatgtgtgtgaattggatttgatcttccatatggataaggtgcactacatcctccaggaggtggtgatgggtgggatggtgttggaaacaaacatgaatgaaatcgtggctcagattgaggctcaaaacaggctggagaa

SEQ ID NO: 112635 - DNA, 2233 bp, Homo sapiens
  Payload ID: 2032
  Gene Symbol: C1D
  Gene Name: C1D nuclear receptor corepressor
  Uniprot ID: Q13901
  ENST ID: ENST00000355848
  CDS Start-End: 49-474
gggagactggagtcgaaggccgtgaggtatttttctaagtcagccataatggcaggtgaagaaattaatgaagactatccagtagaaattcacgagtatttgtcagcgtttgagaattccattggtgctgtggatgagatgctgaagaccatgatgtctgtttctagaaatgagttgttgcagaagttggatccacttgaacaagcaaaagtggatttggtttctgcatacacattaaattcaatgttttgggtttatttggcaacccaaggagttaatcctaaggaacatccagtaaaacaggaattggaaagaatcagagtatatatgaacagagtcaaggaaataacagacaagaaaaaggctggcaagctggacagaggtgcagcttcaagatttgtaaaaaatgccctctgggaaccaaaatcgaaaaatgcatcaaaagttgccaataaaggaaaaagtaaaagttaactttttggttttgatgtacacatattcaaaaagtacatcttcccccccccccccccccccgcaaaataattctgtggcagggcaaggtttaaatgtgtttcttattaatatgtaaattcacagtaaatatgtaaagctaaatactttcctctccaaagatcattatctttattgattagcactgaggattttaacattgtgatatattatatatttataatttaccatctcttgatgagactcttatttctttatataggtcagtcttgcaagtaccattttataagcagctgtgaaatttaagtgaaatgttctttgtaaacatttgtactattttaaatgaataatgaccttatgaagtatgctatctgtaggctgaaattataggtacatctgttttcactatatgatattaagaaagcgtgaaatgacttaaatgttcatttttttctgtatagatactttatcatgttttcatgattttaggaattactgctttgttgatattcaaagtgtgaaactaaaactttatggttgtactttaattcttggcatgttgcctctatgtcccatttaaaataaaatacattctcattaactttagatgggaaataaggttgtatgttgatggatgaattttggcatgatgactgtactctcaataaaggctgaaaatgttgtataactgacctgtgtatttttatcttttgagtaaatttgccttccaaattaggaagataggttttagaagtcatcacaaatagagaaattcttgagtttttgttcctgatgcatggtgtccacagttcttttcatctcattttttttcagattttttttatttcatgtttttgaggctgtatcaagtacatacaagtgttttggaacaacttcttaagttacctaatgccacttaagcagatgagaagtccaaaggagattacactgtgtttgtattgtggtttatttttctggaatattagttacagagagtactacatagtaaacctttttttaaatgtctaagcccatgaattttaattatatgcccttaatgctttcagtgtttgaatccatatcattatgtgtaggaatgccaagtatagtaaagtactttaatttttgaaaaaggagttgttaaaattttctgtgtgattaattctccataagtaaccttgaataaatggatttcttgatttatgatagcagatattggaaatggtcttaaaatgtaatggattttgtaaagcatgttgaactctttctatgacacatgaagaggaagtcactgatagacgcagaaggtcttttctgtctctgatgtcagtttttgaagtggaagaacattagtgaacatttatagttattttactcctttttttgcctttgtctccaaatttctagctatttttaaaaataacctcttcatgagagaaatgtgttactgttaagatcaagtgtagtgtacctgtctttgtgttatttattgcaaagaaatttatttggatttctgtatattttctaatttcataaaagaaaaacagcttaaatgaaaaatgttatacaattgcagaaaatcattattggttttagctaagttattggtttatgaaagtgcacctctacgttctgttaaattgtgtaacttttaagtgagtaattctttcattattaggtagaaataaaagtttgagtatattccattttattatgtataattttaaatacttagcacgtaataaggagctgaatggctgta

SEQ ID NO: 112636 - DNA, 1379 bp, Homo sapiens
  Payload ID: 2032
  Gene Symbol: C1D
  Gene Name: C1D nuclear receptor corepressor
  ENST ID: ENST00000407324
  CDS Start-End: 157-699
ggagactggagtcgaaggccgtgaggtatttttctaagtgagaggaaggactgagtggcagtaacatctgttagggttactgggcagcatccccgcaacccaggtactcagtctcagccacaccttactgagtggtgaagagaagcaagttttctcatgccctctccgtctgtctctacctctgcagccagtgttttagaaggagtatgtggaagggcaaggagtacctatagaaccccggaggagggtgaggagcagagctggtcagccataatggcaggtgaagaaattaatgaagactatccagtagaaattcacgagtatttgtcagcgtttgagaattccattggtgctgtggatgagatgctgaagaccatgatgtctgtttctagaaatgagttgttgcagaagttggatccacttgaacaagcaaaagtggatttggtttctgcatacacattaaattcaatgttttgggtttatttggcaacccaaggagttaatcctaaggaacatccagtaaaacaggaattggaaagaatcagagtatatatgaacagagtcaaggaaataacagacaagaaaaaggctggcaagctggacagaggtgcagcttcaagatttgtaaaaaatgccctctgggaaccaaaatcgaaaaatgcatcaaaagttgccaataaaggaaaaagtaaaagttaactttttggttttgatgtacacatattcaaaaagtacatcttcccccccccccccccccccgcaaaataattctgtggcagggcaaggtttaaatgtgtttcttattaatatgtaaattcacagtaaatatgtaaagctaaatactttcctctccaaagatcattatctttattgattagcactgaggattttaacattgtgatatattatatatttataatttaccatctcttgatgagactcttatttctttatataggtcagtcttgcaagtaccattttataagcagctgtgaaatttaagtgaaatgttctttgtaaacatttgtactattttaaatgaataatgaccttatgaagtatgctatctgtaggctgaaattataggtacatctgttttcactatatgatattaagaaagcgtgaaatgacttaaatgttcatttttttctgtatagatactttatcatgttttcatgattttaggaattactgctttgttgatattcaaagtgtgaaactaaaactttatggttgtactttaattcttggcatgttgcctctatgtcccatttaaaataaaatacattctcattaactttagatgggaaataaggttgtatgttgatggatgaattttggcatgatgactgtactctcaataaaggctgaaaatgttg

SEQ ID NO: 112637 - DNA, 736 bp, Homo sapiens
  Payload ID: 2032
  Gene Symbol: C1D
  Gene Name: C1D nuclear receptor corepressor
  Uniprot ID: Q13901
  ENST ID: ENST00000410067
  CDS Start-End: 78-503
agccggcgcgtcattgtcgtcatcgttgcccgaccgctttccgggagactggagtcgaaggccgtgagtcagccataatggcaggtgaagaaattaatgaagactatccagtagaaattcacgagtatttgtcagcgtttgagaattccattggtgctgtggatgagatgctgaagaccatgatgtctgtttctagaaatgagttgttgcagaagttggatccacttgaacaagcaaaagtggatttggtttctgcatacacattaaattcaatgttttgggtttatttggcaacccaaggagttaatcctaaggaacatccagtaaaacaggaattggaaagaatcagagtatatatgaacagagtcaaggaaataacagacaagaaaaaggctggcaagctggacagaggtgcagcttcaagatttgtaaaaaatgccctctgggaaccaaaatcgaaaaatgcatcaaaagttgccaataaaggaaaaagtaaaagttaactttttggttttgatgtacacatattcaaaaagtacatcttcccccccccccccccccccgcaaaataattctgtggcagggcaaggtttaaatgtgtttcttattaatatgtaaattcacagtaaatatgtaaagctaaatactttcctctccaaagatcattatctttattgattagcactgaggattttaacattgtgatatattatatatttataatttaccatctctt

SEQ ID NO: 112638 - DNA, 772 bp, Homo sapiens
  Payload ID: 2032
  Gene Symbol: C1D
  Gene Name: C1D nuclear receptor corepressor
  Uniprot ID: Q13901
  ENST ID: ENST00000409302
  CDS Start-End: 135-560
tcgtcatcgttgcccgaccgctttccgggagactggagtcgaaggccgtgagccagtgttttagaaggagtatgtggaagggcaaggagtacctatagaaccccggaggagggtgaggagcagagctggccataatggcaggtgaagaaattaatgaagactatccagtagaaattcacgagtatttgtcagcgtttgagaattccattggtgctgtggatgagatgctgaagaccatgatgtctgtttctagaaatgagttgttgcagaagttggatccacttgaacaagcaaaagtggatttggtttctgcatacacattaaattcaatgttttgggtttatttggcaacccaaggagttaatcctaaggaacatccagtaaaacaggaattggaaagaatcagagtatatatgaacagagtcaaggaaataacagacaagaaaaaggctggcaagctggacagaggtgcagcttcaagatttgtaaaaaatgccctctgggaaccaaaatcgaaaaatgcatcaaaagttgccaataaaggaaaaagtaaaagttaactttttggttttgatgtacacatattcaaaaagtacatcttcccccccccccccccccccgcaaaataattctgtggcagggcaaggtttaaatgtgtttcttattaatatgtaaattcacagtaaatatgtaaagctaaatactttcctctccaaagatcattatctttattgattagcactgaggattttaacattgtgatatattatat

SEQ ID NO: 112639 - DNA, 1613 bp, Homo sapiens
  Payload ID: 2033
  Gene Symbol: C1GALT1C1
  Gene Name: C1GALT1-specific chaperone 1
  Uniprot ID: Q96EU7
  ENST ID: ENST00000304661
  CDS Start-End: 240-1196
cgcgggcgggcaaacggacggctccgcccagccgccggctcctttaccccgccccactacccccgccttcgcggcgctcgtttcctggcgctccccacctttagcgagaccaacgagagaacaccgcctgcagctagaacagcctggtcaggagcgtaacggagtggtgcgccaacgtgagaggaaacccgtgcgcggctgcgctttcctgtccccaagccgttctagacgcgggaaaaatgctttctgaaagcagctcctttttgaagggtgtgatgcttggaagcattttctgtgctttgatcactatgctaggacacattaggattggtcatggaaatagaatgcaccaccatgagcatcatcacctacaagctcctaacaaagaagatatcttgaaaatttcagaggatgagcgcatggagctcagtaagagctttcgagtatactgtattatccttgtaaaacccaaagatgtgagtctttgggctgcagtaaaggagacttggaccaaacactgtgacaaagcagagttcttcagttctgaaaatgttaaagtgtttgagtcaattaatatggacacaaatgacatgtggttaatgatgagaaaagcttacaaatacgcctttgataagtatagagaccaatacaactggttcttccttgcacgccccactacgtttgctatcattgaaaacctaaagtattttttgttaaaaaaggatccatcacagcctttctatctaggccacactataaaatctggagaccttgaatatgtgggtatggaaggaggaattgtcttaagtgtagaatcaatgaaaagacttaacagccttctcaatatcccagaaaagtgtcctgaacagggagggatgatttggaagatatctgaagataaacagctagcagtttgcctgaaatatgctggagtatttgcagaaaatgcagaagatgctgatggaaaagatgtatttaataccaaatctgttgggctttctattaaagaggcaatgacttatcaccccaaccaggtagtagaaggctgttgttcagatatggctgttacttttaatggactgactccaaatcagatgcatgtgatgatgtatggggtataccgccttagggcatttgggcatattttcaatgatgcattggttttcttacctccaaatggttctgacaatgactgagaagtggtagaaaagcgtgaatatgatctttgtataggacgtgtgttgtcattatttgtagtagtaactacatatccaatacagctgtatgtttctttttcttttctaatttggtggcactggtataaccacacattaaagtcagtagtacatttttaaatgagggtggtttttttctttaaaacacatgaacattgtaaatgtgttggaaagaagtgttttaagaataataattttgcaaataaactattaataaatattatatgtgataaattctaaattatgaacattagaaatctgtggggcacatatttttgctgattggttaaaaaattttaacaggtctttagcgttctaagatatgcaaatgatatctctagttgtgaatttgtgattaaagtaaaacttttagctgtg

SEQ ID NO: 112640 - DNA, 1492 bp, Homo sapiens
  Payload ID: 2033
  Gene Symbol: C1GALT1C1
  Gene Name: C1GALT1-specific chaperone 1
  Uniprot ID: Q96EU7
  ENST ID: ENST00000371313
  CDS Start-End: 257-1213
gtaacggagtggtgcgccaacgtgagaggaaacccgtgcgcggctgcgctttcctgtccccaagccgttctagacgcggatgaagtgcaaaacaaacttctccatagaggagttgttgcaaagttccagtttataccaaacagtaatcagattccattggaagctaaagattttgagagccttttgtactatatgcaactaacttgatttcaagcttgggaaccttttaaaaaaaacattaaaagcaaaatgaaaaatgctttctgaaagcagctcctttttgaagggtgtgatgcttggaagcattttctgtgctttgatcactatgctaggacacattaggattggtcatggaaatagaatgcaccaccatgagcatcatcacctacaagctcctaacaaagaagatatcttgaaaatttcagaggatgagcgcatggagctcagtaagagctttcgagtatactgtattatccttgtaaaacccaaagatgtgagtctttgggctgcagtaaaggagacttggaccaaacactgtgacaaagcagagttcttcagttctgaaaatgttaaagtgtttgagtcaattaatatggacacaaatgacatgtggttaatgatgagaaaagcttacaaatacgcctttgataagtatagagaccaatacaactggttcttccttgcacgccccactacgtttgctatcattgaaaacctaaagtattttttgttaaaaaaggatccatcacagcctttctatctaggccacactataaaatctggagaccttgaatatgtgggtatggaaggaggaattgtcttaagtgtagaatcaatgaaaagacttaacagccttctcaatatcccagaaaagtgtcctgaacagggagggatgatttggaagatatctgaagataaacagctagcagtttgcctgaaatatgctggagtatttgcagaaaatgcagaagatgctgatggaaaagatgtatttaataccaaatctgttgggctttctattaaagaggcaatgacttatcaccccaaccaggtagtagaaggctgttgttcagatatggctgttacttttaatggactgactccaaatcagatgcatgtgatgatgtatggggtataccgccttagggcatttgggcatattttcaatgatgcattggttttcttacctccaaatggttctgacaatgactgagaagtggtagaaaagcgtgaatatgatctttgtataggacgtgtgttgtcattatttgtagtagtaactacatatccaatacagctgtatgtttctttttcttttctaatttggtggcactggtataaccacacattaaagtcagtagtacatttttaaatgagggtggtttttttctttaaaacacatgaacattgtaaatgtgttggaaagaagtgttttaagaataataattttgcaaataaactattaataaatattatatgtgataaattctaa

SEQ ID NO: 112641 - DNA, 1172 bp, Homo sapiens
  Payload ID: 2034
  Gene Symbol: C1GALT1C1L
  Gene Name: C1GALT1-specific chaperone 1 like
  Uniprot ID: P0DN25
  ENST ID: ENST00000475092
  CDS Start-End: 1-948
atggtttccgctagtgggacatcattttttaagggtatgttgcttgggagcatttcctgggttttgataactatgtttggccaaattcacattcgacacagaggtcaaactcaagaccacgagcaccatcaccttcgtccacctaacaggaacgatttcttaaacacttcaaaagtgatactcttggagctcagtaaaagtattcgtgttttctgtatcatctttggagaatccgaagatgagagttactgggctgtactgaaagagacctggaccaaacactgtgacaaagcagagctctacgatactaaaaatgataatttgttcaatatagaaagtaatgacaggtgggtacagatgaggaccgcttacaaatacgtctttgaaaagtatggtgacaactacaactggttcttccttgcacttcccactacgtttgctgtcattgaaaatttaaagtaccttttgtttacaagggatgcatcccagcccttctatctgggccacactgttatatttggagacctcgaatacgtgactgtggaaggagggattgtcttaagcagagagttgatgaaaagacttaacagacttctcgataactctgagacctgtgcagatcaaagtgtgatttggaagttatctgaagataagcagctggcaatatgcctgaaatatgcaggagttcatgcagaaaatgcagaggattatgaaggaagagatgtatttaatacaaaaccaatcgcacagcttattgaagaggcattgtctaataaccctcagcaagtagtagaaggctgctgttcagatatggctattactttcaatggactgaccccccaaaagatggaagtaatgatgtatggcctgtaccggctcagggcatttggacactatttcaatgacacactcgttttcttgcctccagttggttcagaaaatgactgaggcctggagaataatagacctgtgctgtccaagagcacttgaaatgtggctagtccaaattctgatacagtgtaagtgtaaaatacgtacttcattcaataattcatatattattagaaaacagtatgaagatgtaaaacatctcagtaatatttcatattgactccacattgaaataatgttttggatattttgcattaaataaaatatactattaaaattaa

SEQ ID NO: 112642 - DNA, 2624 bp, Homo sapiens
  Payload ID: 2035
  Gene Symbol: C1QTNF1
  Gene Name: C1q and tumor necrosis factor related protein 1
  ENST ID: ENST00000311661
  CDS Start-End: 326-925
agagacctcggagaccgcgccggggagacggaggtgctgtgggtgggggggacctgtggctgctcgtaccgccccccaccctcctcttctgcactgccgtcctccggaagaccttttcccctgctctgtttccttcaccgagtctgtgcatcgccccggacctggccgggaggaggcttggccggcgggagatgctctaggggcggcgcgggaggagcggccggcgggacggagggctgaagaacaacatgaaaaatacaggcccagtcaggaccaggggctccctgcttcccggtgcttgcgctgctgtgaccccggtacctccatgtacccggcgaccgccgtgccccagatcaacatcactatcttgaaaggggagaagggtgaccgcggagatcgaggcctccaagggaaatatggcaaaacaggctcagcaggggccaggggccacactggacccaaagggcagaagggctccatgggggcccctggggagcggtgcaagagccactacgccgccttttcggtgggccggaagaagcccatgcacagcaaccactactaccagacggtgatcttcgacacggagttcgtgaacctctacgaccacttcaacatgttcaccggcaagttctactgctacgtgcccggcctctacttcttcagcctcaacgtgcacacctggaaccagaaggagacctacctgcacatcatgaagaacgaggaggaggtggtgatcttgttcgcgcaggtgggcgaccgcagcatcatgcaaagccagagcctgatgctggagctgcgagagcaggaccaggtgtgggtacgcctctacaagggcgaacgtgagaacgccatcttcagcgaggagctggacacctacatcaccttcagtggctacctggtcaagcacgccaccgagccctagctggccggccacctcctttcctctcgccaccttccacccctgcgctgtgctgaccccaccgcctcttccccgatccctggactccgactccctggctttggcattcagtgagacgccctgcacacacagaaagccaaagcgatcggtgctcccagatcccgcagcctctggagagagctgacggcagatgaaatcaccagggcggggcacccgcgagaaccctctgggaccttccgcggccctctctgcacacatcctcaagtgaccccgcacggcgagacgcgggtggcggcagggcgtcccagggtgcggcaccgcggctccagtccttggaaataattaggcaaattctaaaggtctcaaaaggagcaaagtaaaccgtggaggacaaagaaaagggttgttatttttgtctttccagccagcctgctggctcccaagagagaggccttttcagttgagactctgcttaagagaagatccaaagttaaagctctggggtcaggggaggggccgggggcaggaaactacctctggcttaattcttttaagccacgtaggaactttcttgagggataggtggaccctgacatccctgtggccttgcccaagggctctgctggtctttctgagtcacagctgcgaggtgatgggggctggggccccaggcgtcagcctcccagagggacagctgagccccctgccttggctccaggttggtagaagcagccgaagggctcctgacagtggccagggacccctgggtcccccaggcctgcagatgtttctatgaggggcagagctcctggtacatccatgtgtggctctgctccacccctgtgccaccccagagccctggggggtggtctccatgcctgccaccctggcatcggctttctgtgccgcctcccacacaaatcagccccagaaggccccggggccttggcttctgttttttataaaacacctcaagcagcactgcagtctcccatctcctcgtgggctaagcatcaccgcttccacgtgtgttgtgttggttggcagcaaggctgatccagaccccttctgcccccactgccctcatccaggcctctgaccagtagcctgagaggggctttttctaggcttcagagcaggggagagctggaaggggctagaaagctcccgcttgtctgtttctcaggctcctgtgagcctcagtcctgagaccagagtcaagaggaagtacacgtcccaatcacccgtgtcaggattcactctcaggagctgggtggcaggagaggcaatagcccctgtggcaattgcaggaccagctggagcagggttgcggtgtctccacggtgctctcgccctgcccatggccaccccagactctgatctccaggaaccccatagcccctctccacctcaccccatgttgatgcccagggtcactcttgctacccgctgggcccccaaacccccgctgcctctcttccttccccccatcccccacctggttttgactaatcctgcttccctctctgggcctggctgccgggatctggggtccctaagtccctctctttaaagaacttctgcgggtcagactctgaagccgagttgctgtgggcgtgcccggaagcagagcgccacactcgctgcttaagctcccccagctctttccagaaaacattaaactcagaattgtgttttcagc

SEQ ID NO: 112643 - DNA, 3100 bp, Homo sapiens
  Payload ID: 2035
  Gene Symbol: C1QTNF1
  Gene Name: C1q and tumor necrosis factor related protein 1
  Uniprot ID: Q9BXJ1
  ENST ID: ENST00000339142
  CDS Start-End: 556-1401
atctggctgggcttcgctccttgcgcgtctgtcccactttctccctctcttcctttactttcgagaaaccgcgcttccgcttctggtcgcagagacctcggagaccgcgccggggagacggaggtgctgtgggtgggggggacctgtggctgctcgtaccgccccccaccctcctcttctgcactgccgtcctccggaagaccttttcccctgctctgtttccttcaccgagtctgtgcatcgccccggacctggccgggaggaggcttggccggcgggagatgctctaggggcggcgcgggaggagcggccggcgggacggagcaggggcaagcctgccgcccgaggccttccagctgggaggtgagctgaggacagctgctctactcaaggaaatctttgtttccactgggacggaatcggagctctggaggctgggctggccaagcgccccgaaggcccgatgcctgacggctcatgcggcctccttgtttgcagggcctgggcaaaaatttacactgagtcccactcttcgctccagggcccggcaggaagatgggctcccgtggacagggactcttgctggcgtactgcctgctccttgcctttgcctctggcctggtcctgagtcgtgtgccccatgtccagggggaacagcaggagtgggaggggactgaggagctgccgtcgcctccggaccatgccgagagggctgaagaacaacatgaaaaatacaggcccagtcaggaccaggggctccctgcttcccggtgcttgcgctgctgtgaccccggtacctccatgtacccggcgaccgccgtgccccagatcaacatcactatcttgaaaggggagaagggtgaccgcggagatcgaggcctccaagggaaatatggcaaaacaggctcagcaggggccaggggccacactggacccaaagggcagaagggctccatgggggcccctggggagcggtgcaagagccactacgccgccttttcggtgggccggaagaagcccatgcacagcaaccactactaccagacggtgatcttcgacacggagttcgtgaacctctacgaccacttcaacatgttcaccggcaagttctactgctacgtgcccggcctctacttcttcagcctcaacgtgcacacctggaaccagaaggagacctacctgcacatcatgaagaacgaggaggaggtggtgatcttgttcgcgcaggtgggcgaccgcagcatcatgcaaagccagagcctgatgctggagctgcgagagcaggaccaggtgtgggtacgcctctacaagggcgaacgtgagaacgccatcttcagcgaggagctggacacctacatcaccttcagtggctacctggtcaagcacgccaccgagccctagctggccggccacctcctttcctctcgccaccttccacccctgcgctgtgctgaccccaccgcctcttccccgatccctggactccgactccctggctttggcattcagtgagacgccctgcacacacagaaagccaaagcgatcggtgctcccagatcccgcagcctctggagagagctgacggcagatgaaatcaccagggcggggcacccgcgagaaccctctgggaccttccgcggccctctctgcacacatcctcaagtgaccccgcacggcgagacgcgggtggcggcagggcgtcccagggtgcggcaccgcggctccagtccttggaaataattaggcaaattctaaaggtctcaaaaggagcaaagtaaaccgtggaggacaaagaaaagggttgttatttttgtctttccagccagcctgctggctcccaagagagaggccttttcagttgagactctgcttaagagaagatccaaagttaaagctctggggtcaggggaggggccgggggcaggaaactacctctggcttaattcttttaagccacgtaggaactttcttgagggataggtggaccctgacatccctgtggccttgcccaagggctctgctggtctttctgagtcacagctgcgaggtgatgggggctggggccccaggcgtcagcctcccagagggacagctgagccccctgccttggctccaggttggtagaagcagccgaagggctcctgacagtggccagggacccctgggtcccccaggcctgcagatgtttctatgaggggcagagctcctggtacatccatgtgtggctctgctccacccctgtgccaccccagagccctggggggtggtctccatgcctgccaccctggcatcggctttctgtgccgcctcccacacaaatcagccccagaaggccccggggccttggcttctgttttttataaaacacctcaagcagcactgcagtctcccatctcctcgtgggctaagcatcaccgcttccacgtgtgttgtgttggttggcagcaaggctgatccagaccccttctgcccccactgccctcatccaggcctctgaccagtagcctgagaggggctttttctaggcttcagagcaggggagagctggaaggggctagaaagctcccgcttgtctgtttctcaggctcctgtgagcctcagtcctgagaccagagtcaagaggaagtacacgtcccaatcacccgtgtcaggattcactctcaggagctgggtggcaggagaggcaatagcccctgtggcaattgcaggaccagctggagcagggttgcggtgtctccacggtgctctcgccctgcccatggccaccccagactctgatctccaggaaccccatagcccctctccacctcaccccatgttgatgcccagggtcactcttgctacccgctgggcccccaaacccccgctgcctctcttccttccccccatcccccacctggttttgactaatcctgcttccctctctgggcctggctgccgggatctggggtccctaagtccctctctttaaagaacttctgcgggtcagactctgaagccgagttgctgtgggcgtgcccggaagcagagcgccacactcgctgcttaagctcccccagctctttccagaaaacattaaactcagaattgtgttttcagc

SEQ ID NO: 112644 - DNA, 2714 bp, Homo sapiens
  Payload ID: 2035
  Gene Symbol: C1QTNF1
  Gene Name: C1q and tumor necrosis factor related protein 1
  Uniprot ID: Q9BXJ1
  ENST ID: ENST00000354124
  CDS Start-End: 170-1015
atttgtcctcagctctacctgagtgctggcctcgcccagcctggggcaaggcagtgggcattgtgcttgcaccctcttcttcctctcctttttgattcttttcatctgtccagttgttggtgcggcggatgggaggacactccaggcagggaaagggcccggcaggaagatgggctcccgtggacagggactcttgctggcgtactgcctgctccttgcctttgcctctggcctggtcctgagtcgtgtgccccatgtccagggggaacagcaggagtgggaggggactgaggagctgccgtcgcctccggaccatgccgagagggctgaagaacaacatgaaaaatacaggcccagtcaggaccaggggctccctgcttcccggtgcttgcgctgctgtgaccccggtacctccatgtacccggcgaccgccgtgccccagatcaacatcactatcttgaaaggggagaagggtgaccgcggagatcgaggcctccaagggaaatatggcaaaacaggctcagcaggggccaggggccacactggacccaaagggcagaagggctccatgggggcccctggggagcggtgcaagagccactacgccgccttttcggtgggccggaagaagcccatgcacagcaaccactactaccagacggtgatcttcgacacggagttcgtgaacctctacgaccacttcaacatgttcaccggcaagttctactgctacgtgcccggcctctacttcttcagcctcaacgtgcacacctggaaccagaaggagacctacctgcacatcatgaagaacgaggaggaggtggtgatcttgttcgcgcaggtgggcgaccgcagcatcatgcaaagccagagcctgatgctggagctgcgagagcaggaccaggtgtgggtacgcctctacaagggcgaacgtgagaacgccatcttcagcgaggagctggacacctacatcaccttcagtggctacctggtcaagcacgccaccgagccctagctggccggccacctcctttcctctcgccaccttccacccctgcgctgtgctgaccccaccgcctcttccccgatccctggactccgactccctggctttggcattcagtgagacgccctgcacacacagaaagccaaagcgatcggtgctcccagatcccgcagcctctggagagagctgacggcagatgaaatcaccagggcggggcacccgcgagaaccctctgggaccttccgcggccctctctgcacacatcctcaagtgaccccgcacggcgagacgcgggtggcggcagggcgtcccagggtgcggcaccgcggctccagtccttggaaataattaggcaaattctaaaggtctcaaaaggagcaaagtaaaccgtggaggacaaagaaaagggttgttatttttgtctttccagccagcctgctggctcccaagagagaggccttttcagttgagactctgcttaagagaagatccaaagttaaagctctggggtcaggggaggggccgggggcaggaaactacctctggcttaattcttttaagccacgtaggaactttcttgagggataggtggaccctgacatccctgtggccttgcccaagggctctgctggtctttctgagtcacagctgcgaggtgatgggggctggggccccaggcgtcagcctcccagagggacagctgagccccctgccttggctccaggttggtagaagcagccgaagggctcctgacagtggccagggacccctgggtcccccaggcctgcagatgtttctatgaggggcagagctcctggtacatccatgtgtggctctgctccacccctgtgccaccccagagccctggggggtggtctccatgcctgccaccctggcatcggctttctgtgccgcctcccacacaaatcagccccagaaggccccggggccttggcttctgttttttataaaacacctcaagcagcactgcagtctcccatctcctcgtgggctaagcatcaccgcttccacgtgtgttgtgttggttggcagcaaggctgatccagaccccttctgcccccactgccctcatccaggcctctgaccagtagcctgagaggggctttttctaggcttcagagcaggggagagctggaaggggctagaaagctcccgcttgtctgtttctcaggctcctgtgagcctcagtcctgagaccagagtcaagaggaagtacacgtcccaatcacccgtgtcaggattcactctcaggagctgggtggcaggagaggcaatagcccctgtggcaattgcaggaccagctggagcagggttgcggtgtctccacggtgctctcgccctgcccatggccaccccagactctgatctccaggaaccccatagcccctctccacctcaccccatgttgatgcccagggtcactcttgctacccgctgggcccccaaacccccgctgcctctcttccttccccccatcccccacctggttttgactaatcctgcttccctctctgggcctggctgccgggatctggggtccctaagtccctctctttaaagaacttctgcgggtcagactctgaagccgagttgctgtgggcgtgcccggaagcagagcgccacactcgctgcttaagctcccccagctctttccagaaaacattaaactcagaattgtgttttcagc

SEQ ID NO: 112645 - DNA, 2833 bp, Homo sapiens
  Payload ID: 2035
  Gene Symbol: C1QTNF1
  Gene Name: C1q and tumor necrosis factor related protein 1
  Uniprot ID: Q9BXJ1
  ENST ID: ENST00000392445
  CDS Start-End: 288-1133
gcacttggctgtggtgtgtgctgcagggagcgggaggacatgggaggacgtgctccaggaggcctctccagcacctgccaaccggggaggagggaaccaagacagggagatgggagccgaggtctgaggacaagcagaagcttccccaccctccctcttagagctgcagagctggagaggcccctagagtccacccaacaacaacagtggcaatcatcatcaccatcatcatcatcatcaccatcatcatcatcatcatgatgtcagccacagggcccggcaggaagatgggctcccgtggacagggactcttgctggcgtactgcctgctccttgcctttgcctctggcctggtcctgagtcgtgtgccccatgtccagggggaacagcaggagtgggaggggactgaggagctgccgtcgcctccggaccatgccgagagggctgaagaacaacatgaaaaatacaggcccagtcaggaccaggggctccctgcttcccggtgcttgcgctgctgtgaccccggtacctccatgtacccggcgaccgccgtgccccagatcaacatcactatcttgaaaggggagaagggtgaccgcggagatcgaggcctccaagggaaatatggcaaaacaggctcagcaggggccaggggccacactggacccaaagggcagaagggctccatgggggcccctggggagcggtgcaagagccactacgccgccttttcggtgggccggaagaagcccatgcacagcaaccactactaccagacggtgatcttcgacacggagttcgtgaacctctacgaccacttcaacatgttcaccggcaagttctactgctacgtgcccggcctctacttcttcagcctcaacgtgcacacctggaaccagaaggagacctacctgcacatcatgaagaacgaggaggaggtggtgatcttgttcgcgcaggtgggcgaccgcagcatcatgcaaagccagagcctgatgctggagctgcgagagcaggaccaggtgtgggtacgcctctacaagggcgaacgtgagaacgccatcttcagcgaggagctggacacctacatcaccttcagtggctacctggtcaagcacgccaccgagccctagctggccggccacctcctttcctctcgccaccttccacccctgcgctgtgctgaccccaccgcctcttccccgatccctggactccgactccctggctttggcattcagtgagacgccctgcacacacagaaagccaaagcgatcggtgctcccagatcccgcagcctctggagagagctgacggcagatgaaatcaccagggcggggcacccgcgagaaccctctgggaccttccgcggccctctctgcacacatcctcaagtgaccccgcacggcgagacgcgggtggcggcagggcgtcccagggtgcggcaccgcggctccagtccttggaaataattaggcaaattctaaaggtctcaaaaggagcaaagtaaaccgtggaggacaaagaaaagggttgttatttttgtctttccagccagcctgctggctcccaagagagaggccttttcagttgagactctgcttaagagaagatccaaagttaaagctctggggtcaggggaggggccgggggcaggaaactacctctggcttaattcttttaagccacgtaggaactttcttgagggataggtggaccctgacatccctgtggccttgcccaagggctctgctggtctttctgagtcacagctgcgaggtgatgggggctggggccccaggcgtcagcctcccagagggacagctgagccccctgccttggctccaggttggtagaagcagccgaagggctcctgacagtggccagggacccctgggtcccccaggcctgcagatgtttctatgaggggcagagctcctggtacatccatgtgtggctctgctccacccctgtgccaccccagagccctggggggtggtctccatgcctgccaccctggcatcggctttctgtgccgcctcccacacaaatcagccccagaaggccccggggccttggcttctgttttttataaaacacctcaagcagcactgcagtctcccatctcctcgtgggctaagcatcaccgcttccacgtgtgttgtgttggttggcagcaaggctgatccagaccccttctgcccccactgccctcatccaggcctctgaccagtagcctgagaggggctttttctaggcttcagagcaggggagagctggaaggggctagaaagctcccgcttgtctgtttctcaggctcctgtgagcctcagtcctgagaccagagtcaagaggaagtacacgtcccaatcacccgtgtcaggattcactctcaggagctgggtggcaggagaggcaatagcccctgtggcaattgcaggaccagctggagcagggttgcggtgtctccacggtgctctcgccctgcccatggccaccccagactctgatctccaggaaccccatagcccctctccacctcaccccatgttgatgcccagggtcactcttgctacccgctgggcccccaaacccccgctgcctctcttccttccccccatcccccacctggttttgactaatcctgcttccctctctgggcctggctgccgggatctggggtccctaagtccctctctttaaagaacttctgcgggtcagactctgaagccgagttgctgtgggcgtgcccggaagcagagcgccacactcgctgcttaagctcccccagctctttccagaaaacattaaactcagaattgtgttttcagca

SEQ ID NO: 112646 - DNA, 1368 bp, Homo sapiens
  Payload ID: 2035
  Gene Symbol: C1QTNF1
  Gene Name: C1q and tumor necrosis factor related protein 1
  Uniprot ID: Q9BXJ1
  ENST ID: ENST00000581774
  CDS Start-End: 364-1209
gttttgggagcggtcggtccccgagggcgtccccgctgctggtgctagggaagtgggcggcgggccaggccacctgcagagtgggctcaggacagctgttggtgcctcttctctctcacacggttctcaaagcaggggcaagcctgccgcccgaggccttccagctgggaggtgagctgaggacagctgctctactcaaggaaatctttgtttccactgggacggaatcggagctctggaggctgggctggccaagcgccccgaaggcccgatgcctgacggctcatgcggcctccttgtttgcagggcctgggcaaaaatttacactgagtcccactcttcgctccagggcccggcaggaagatgggctcccgtggacagggactcttgctggcgtactgcctgctccttgcctttgcctctggcctggtcctgagtcgtgtgccccatgtccagggggaacagcaggagtgggaggggactgaggagctgccgtcgcctccggaccatgccgagagggctgaagaacaacatgaaaaatacaggcccagtcaggaccaggggctccctgcttcccggtgcttgcgctgctgtgaccccggtacctccatgtacccggcgaccgccgtgccccagatcaacatcactatcttgaaaggggagaagggtgaccgcggagatcgaggcctccaagggaaatatggcaaaacaggctcagcaggggccaggggccacactggacccaaagggcagaagggctccatgggggcccctggggagcggtgcaagagccactacgccgccttttcggtgggccggaagaagcccatgcacagcaaccactactaccagacggtgatcttcgacacggagttcgtgaacctctacgaccacttcaacatgttcaccggcaagttctactgctacgtgcccggcctctacttcttcagcctcaacgtgcacacctggaaccagaaggagacctacctgcacatcatgaagaacgaggaggaggtggtgatcttgttcgcgcaggtgggcgaccgcagcatcatgcaaagccagagcctgatgctggagctgcgagagcaggaccaggtgtgggtacgcctctacaagggcgaacgtgagaacgccatcttcagcgaggagctggacacctacatcaccttcagtggctacctggtcaagcacgccaccgagccctagctggccggccacctcctttcctctcgccaccttccacccctgcgctgtgctgaccccaccgcctcttccccgatccctggactccgactccctggctttggcattcagtgagacgccctgcacacacagaaagccaaagcgatcggtgctcccagatcc

SEQ ID NO: 112647 - DNA, 1396 bp, Homo sapiens
  Payload ID: 2035
  Gene Symbol: C1QTNF1
  Gene Name: C1q and tumor necrosis factor related protein 1
  Uniprot ID: Q9BXJ1
  ENST ID: ENST00000580454
  CDS Start-End: 392-1237
agcctggggcaaggcagtgggcattgtgcttgcaccctcttcttcctctcctttttgattcttttcatctgtccagttgttggtgcggcggatgggaggacactccaggcagggaaagaaaccgcgcttccgcttctggtcgcagagacctcggagaccgcgccggggagacggaggtgctgtgggtgggggggacctgtggctgctcgtaccgccccccaccctcctcttctgcactgccgtcctccggaagaccttttcccctgctctgtttccttcaccgagtctgtgcatcgccccggacctggccgggaggaggcttggccggcgggagatgctctaggggcggcgcgggaggagcggccggcgggacggagggcccggcaggaagatgggctcccgtggacagggactcttgctggcgtactgcctgctccttgcctttgcctctggcctggtcctgagtcgtgtgccccatgtccagggggaacagcaggagtgggaggggactgaggagctgccgtcgcctccggaccatgccgagagggctgaagaacaacatgaaaaatacaggcccagtcaggaccaggggctccctgcttcccggtgcttgcgctgctgtgaccccggtacctccatgtacccggcgaccgccgtgccccagatcaacatcactatcttgaaaggggagaagggtgaccgcggagatcgaggcctccaagggaaatatggcaaaacaggctcagcaggggccaggggccacactggacccaaagggcagaagggctccatgggggcccctggggagcggtgcaagagccactacgccgccttttcggtgggccggaagaagcccatgcacagcaaccactactaccagacggtgatcttcgacacggagttcgtgaacctctacgaccacttcaacatgttcaccggcaagttctactgctacgtgcccggcctctacttcttcagcctcaacgtgcacacctggaaccagaaggagacctacctgcacatcatgaagaacgaggaggaggtggtgatcttgttcgcgcaggtgggcgaccgcagcatcatgcaaagccagagcctgatgctggagctgcgagagcaggaccaggtgtgggtacgcctctacaagggcgaacgtgagaacgccatcttcagcgaggagctggacacctacatcaccttcagtggctacctggtcaagcacgccaccgagccctagctggccggccacctcctttcctctcgccaccttccacccctgcgctgtgctgaccccaccgcctcttccccgatccctggactccgactccctggctttggcattcagtgagacgccctgcacacacagaaagccaaagcgatcggtgctcccagatcc

SEQ ID NO: 112648 - DNA, 1129 bp, Homo sapiens
  Payload ID: 2035
  Gene Symbol: C1QTNF1
  Gene Name: C1q and tumor necrosis factor related protein 1
  Uniprot ID: Q9BXJ1
  ENST ID: ENST00000583904
  CDS Start-End: 125-970
acactgctgcactccagcctgggtgacagagcaagactccatctcaaaaaaaaaaaaaaaaagcccgctacagacatcccccgcagaggctccaaagcccccgagcgacgggcccggcaggaagatgggctcccgtggacagggactcttgctggcgtactgcctgctccttgcctttgcctctggcctggtcctgagtcgtgtgccccatgtccagggggaacagcaggagtgggaggggactgaggagctgccgtcgcctccggaccatgccgagagggctgaagaacaacatgaaaaatacaggcccagtcaggaccaggggctccctgcttcccggtgcttgcgctgctgtgaccccggtacctccatgtacccggcgaccgccgtgccccagatcaacatcactatcttgaaaggggagaagggtgaccgcggagatcgaggcctccaagggaaatatggcaaaacaggctcagcaggggccaggggccacactggacccaaagggcagaagggctccatgggggcccctggggagcggtgcaagagccactacgccgccttttcggtgggccggaagaagcccatgcacagcaaccactactaccagacggtgatcttcgacacggagttcgtgaacctctacgaccacttcaacatgttcaccggcaagttctactgctacgtgcccggcctctacttcttcagcctcaacgtgcacacctggaaccagaaggagacctacctgcacatcatgaagaacgaggaggaggtggtgatcttgttcgcgcaggtgggcgaccgcagcatcatgcaaagccagagcctgatgctggagctgcgagagcaggaccaggtgtgggtacgcctctacaagggcgaacgtgagaacgccatcttcagcgaggagctggacacctacatcaccttcagtggctacctggtcaagcacgccaccgagccctagctggccggccacctcctttcctctcgccaccttccacccctgcgctgtgctgaccccaccgcctcttccccgatccctggactccgactccctggctttggcattcagtgagacgccctgcacacacagaaagccaaagcgatcggtgctcccagatcc

SEQ ID NO: 112649 - DNA, 1600 bp, Homo sapiens
  Payload ID: 2035
  Gene Symbol: C1QTNF1
  Gene Name: C1q and tumor necrosis factor related protein 1
  Uniprot ID: Q9BXJ1
  ENST ID: ENST00000580474
  CDS Start-End: 377-1222
gtggattgcatgtgtgttgggtgcatgtgaatgtgtgggttgcatgtgagtgtatgtgactgtgtgtgcatgtgtggattgcatgtgtgttgagtgtgtgcatgtgtgggggttgcatgtatgtgaatgtgtgtgcatgtgcgtgtgtgcacgtgagtgcgtcgtgagtgcgtgtatgcatgcatgggtgtgtgagagtgattgtcctcccagaagctgtgtaactgcagcatttcccagtggcgtgaggctggggaagcacctccgatttccaggctgtttctctccccaattttcaggctgtttctctgtgcagctccttcctaactcggtgccttccctgtgtgtttctttcccaccagggcccggcaggaagatgggctcccgtggacagggactcttgctggcgtactgcctgctccttgcctttgcctctggcctggtcctgagtcgtgtgccccatgtccagggggaacagcaggagtgggaggggactgaggagctgccgtcgcctccggaccatgccgagagggctgaagaacaacatgaaaaatacaggcccagtcaggaccaggggctccctgcttcccggtgcttgcgctgctgtgaccccggtacctccatgtacccggcgaccgccgtgccccagatcaacatcactatcttgaaaggggagaagggtgaccgcggagatcgaggcctccaagggaaatatggcaaaacaggctcagcaggggccaggggccacactggacccaaagggcagaagggctccatgggggcccctggggagcggtgcaagagccactacgccgccttttcggtgggccggaagaagcccatgcacagcaaccactactaccagacggtgatcttcgacacggagttcgtgaacctctacgaccacttcaacatgttcaccggcaagttctactgctacgtgcccggcctctacttcttcagcctcaacgtgcacacctggaaccagaaggagacctacctgcacatcatgaagaacgaggaggaggtggtgatcttgttcgcgcaggtgggcgaccgcagcatcatgcaaagccagagcctgatgctggagctgcgagagcaggaccaggtgtgggtacgcctctacaagggcgaacgtgagaacgccatcttcagcgaggagctggacacctacatcaccttcagtggctacctggtcaagcacgccaccgagccctagctggccggccacctcctttcctctcgccaccttccacccctgcgctgtgctgaccccaccgcctcttccccgatccctggactccgactccctggctttggcattcagtgagacgccctgcacacacagaaagccaaagcgatcggtgctcccagatcccgcagcctctggagagagctgacggcagatgaaatcaccagggcggggcacccgcgagaaccctctgggaccttccgcggccctctctgcacacatcctcaagtgaccccgcacggcgagacgcgggtggcggcagggcgtcccagggtgcggcaccgcggctccagtccttggaaataattaggcaaattctaaaggtctcaaaaggagcaaagtaaa

SEQ ID NO: 112650 - DNA, 1294 bp, Homo sapiens
  Payload ID: 2035
  Gene Symbol: C1QTNF1
  Gene Name: C1q and tumor necrosis factor related protein 1
  ENST ID: ENST00000578229
  CDS Start-End: 536-1135
ggcctggcagcctttctccctgtactcacaggaggggttgacgcatgcagtcagggcctctgtggagtggcttttgggcgcctcgcctgcccggaagcctccccttctgttctcatctccatttgtcctcagctctacctgagtgctggcctcgcccagcctggggcaaggcagtgggcattgtgcttgcaccctcttcttcctctcctttttgattcttttcatctgtccagttgttggtgcggcggatgggaggacactccaggcagggaaagggcccggcaggaagatgggctcccgtggacagggactcttgctggcgtactgcctgctccttgcctttgcctctggcctggtcctgagtcgtgtgccccatgtccagggggaacagcaggagtgggaggggactgaggagctgccgtcgcctccggaccatgccgagagggctgaagaacaacatgaaaaatacaggcccagtcaggaccaggggctccctgcttcccggtgcttgcgctgctgtgaccccggtacctccatgtacccggcgaccgccgtgccccagatcaacatcactatcttgaaaggggagaagggtgaccgcggagatcgaggcctccaagggaaatatggcaaaacaggctcagcaggggccaggggccacactggacccaaagggcagaagggctccatgggggcccctggggagcggtgcaagagccactacgccgccttttcggtgggccggaagaagcccatgcacagcaaccactactaccagacggtgatcttcgacacggagttcgtgaacctctacgaccacttcaacatgttcaccggcaagttctactgctacgtgcccggcctctacttcttcagcctcaacgtgcacacctggaaccagaaggagacctacctgcacatcatgaagaacgaggaggaggtggtgatcttgttcgcgcaggtgggcgaccgcagcatcatgcaaagccagagcctgatgctggagctgcgagagcaggaccaggtgtgggtacgcctctacaagggcgaacgtgagaacgccatcttcagcgaggagctggacacctacatcaccttcagtggctacctggtcaagcacgccaccgagccctagctggccggccacctcctttcctctcgccaccttccacccctgcgctgtgctgaccccaccgcctcttccccgatccctggactccgactccctggctttggcattcagtgagacgccctgcacacacagaaagccaaagcgatcggtgctcccagatcc

SEQ ID NO: 112651 - DNA, 1672 bp, Homo sapiens
  Payload ID: 2035
  Gene Symbol: C1QTNF1
  Gene Name: C1q and tumor necrosis factor related protein 1
  Uniprot ID: Q9BXJ1
  ENST ID: ENST00000579760
  CDS Start-End: 440-1285
ggatttccctgaggcgcggcgcggggcacacacggttaatcctccgcggctgctgtttggacgaaaagcgctgggggtgttggaggctcctcgctgctcacatctggctgggcttcgctccttgcgcgtctgtcccactttctccctctcttcctttactttcgagaaaccgcgcttccgcttctggtcgcagagacctcggagaccgcgccggggagacggaggtgctgtgggtgggggggacctgtggctgctcgtaccgccccccaccctcctcttctgcactgccgtcctccggaagaccttttcccctgctctgtttccttcaccgagtctgtgcatcgccccggacctggccgggaggaggcttggccggcgggagatgctctaggggcggcgcgggaggagcggccggcgggacggagggcccggcaggaagatgggctcccgtggacagggactcttgctggcgtactgcctgctccttgcctttgcctctggcctggtcctgagtcgtgtgccccatgtccagggggaacagcaggagtgggaggggactgaggagctgccgtcgcctccggaccatgccgagagggctgaagaacaacatgaaaaatacaggcccagtcaggaccaggggctccctgcttcccggtgcttgcgctgctgtgaccccggtacctccatgtacccggcgaccgccgtgccccagatcaacatcactatcttgaaaggggagaagggtgaccgcggagatcgaggcctccaagggaaatatggcaaaacaggctcagcaggggccaggggccacactggacccaaagggcagaagggctccatgggggcccctggggagcggtgcaagagccactacgccgccttttcggtgggccggaagaagcccatgcacagcaaccactactaccagacggtgatcttcgacacggagttcgtgaacctctacgaccacttcaacatgttcaccggcaagttctactgctacgtgcccggcctctacttcttcagcctcaacgtgcacacctggaaccagaaggagacctacctgcacatcatgaagaacgaggaggaggtggtgatcttgttcgcgcaggtgggcgaccgcagcatcatgcaaagccagagcctgatgctggagctgcgagagcaggaccaggtgtgggtacgcctctacaagggcgaacgtgagaacgccatcttcagcgaggagctggacacctacatcaccttcagtggctacctggtcaagcacgccaccgagccctagctggccggccacctcctttcctctcgccaccttccacccctgcgctgtgctgaccccaccgcctcttccccgatccctggactccgactccctggctttggcattcagtgagacgccctgcacacacagaaagccaaagcgatcggtgctcccagatcccgcagcctctggagagagctgacggcagatgaaatcaccagggcggggcacccgcgagaaccctctgggaccttccgcggccctctctgcacacatcctcaagtgaccccgcacggcgagacgcgggtggcggcagggcgtcccagggtgcggcaccgcggctccagtccttggaaataattaggcaaattctaaaggtctcaaaaggagcaaagtaaaccgtggagg

SEQ ID NO: 112652 - DNA, 2414 bp, Homo sapiens
  Payload ID: 2036
  Gene Symbol: C1QTNF2
  Gene Name: C1q and tumor necrosis factor related protein 2
  Uniprot ID: Q9BXJ5
  ENST ID: ENST00000393975
  CDS Start-End: 5-997
cgggatgggaaaactatgcctggggccgacgctctgcccggctgctgccgctgaggaaagccgggacgcggagccccgccgagagcttctttgctccggacgcccctggacgtggcgggcagccgcgagggtaaccaccatgatcccctgggtgctcctggcctgtgccctcccctgtgctgctgacccactgcttggcgcctttgctcgcagggacttccggaaaggctcccctcaactggtctgcagcctgcctggcccccagggcccacccggccccccaggagccccagggccctcaggaatgatgggacgaatgggctttcctggcaaagacggccaagatggacacgacggcgaccggggggacagcggagaggaaggtccacctggccggacaggtaaccggggaaagccaggaccaaagggcaaagccggggccattgggcgggctggcccccgtggccccaagggggtcaacggtacccccgggaagcatggcacaccaggcaagaaggggcccaagggcaagaagggggagccaggcctcccaggcccctgcagctgtggcagtggccataccaagtcagctttctcggtggcagtgaccaagagctacccacgggagcggctgcccatcaagtttgacaagattctgatgaacgagggtggccactacaatgcttccagcggcaagttcgtctgcggcgtgcctgggatctactacttcacctacgacatcacgctggccaacaagcacctggccatcggcctggtgcacaacggccagtaccgcatccggacctttgatgccaacaccggcaaccacgatgtggcctcaggctccaccatcctggctctcaagcagggtgacgaagtttggctgcagatcttctactcagagcagaacgggctcttctatgacccttactggacagacagcctctttacgggcttcctaatctatgccgaccaggatgaccccaacgaggtatagacatgccacggcggtcctccaggcagggaacaagcttctggacttgggcttacagagcaagaccccacaactgtaggctgggggtggggggtcgagtgagcggttctagcctcaggctcacctcctctgcctctttttttccccttcattaaatccaaacctttttattcatccaaccatctatttattcacttctttttaaagtatctactgtgtaacaggcactatgctattctctgaaagatgcagcagtggacaagacagagtatctgtcctcatgcagcttacattctagcaggagatacaatttacaaatatacaagcaaataatataatattatgccaggatagaaatgaacatgccatggttgacagtaataggaataacaggagacagggaagaggtggaaatttgtttctttttttaagtttgcgtttttaggtttacttacatacagtgactctccagattttaagttgacaactcagtgaataatttttgcttatgtgcacactctgaaacctccatgtagatcaaagaacaagctatttccaacttctcacctcccttccccaaaagctctcttaagacccctctaagtcagtacctggaaaatttccatttttgagctgagttccaaagaaggaaatagagcaacacaaaggcctcgaaaagaggtctccagcaaaaggctctgcaagtgcaaagaccttgacaggaaagagggaggggccaaggtaagaactgagaagggaggcatgaggcgtgaggctggaagataatacagaatgtcccaggccatggcagagctcgttccattcacgaaggcttatcagaatacaaagtgacactgataggcggatcatcttgaatctgctcattgcatgagtcaagtcggccacagacttgagcgctttattattagttaatcttttgcaggcccgcttctcaatgaatgagatacaccaggatatgcacgtgcatctgagaaccgctgctctgagatggcaggaatggatcccacgcaaatgaatcgcaccccaagcacaggtgttgccagtatgcagggatctgggggcttaagaagctgcagtaaaagtgccaggtgctggcgggatgtggtagctcatgcctataatcccaggactttgggaagctgaggtggacggatcatttgaggtcaggagttcaagaccagcctgaccaacatggcaaaacatcgtctaaaaaaatacaaaaattagacaggcgtggtgttgggtgcctgtaatcccagctactggggaggctgaggcgggagaatcgcttgaacccaggaggtggaggttgcagttagctgagatcctgccactgcactccagcctgggcaacagagtgagactatctcaaaaaaaaacaaaaaaaaaaaaaaaacaa

SEQ ID NO: 112653 - DNA, 1959 bp, Homo sapiens
  Payload ID: 2037
  Gene Symbol: C1QTNF3
  Gene Name: C1q and tumor necrosis factor related protein 3
  Uniprot ID: Q9BXJ4
  ENST ID: ENST00000231338
  CDS Start-End: 89-829
agctccagtcctggcatctgcccgaggagaccacgctcctggagctctgctgtcttctcagggagactctgaggctctgttgagaatcatgctttggaggcagctcatctattggcaactgctggctttgtttttcctccctttttgcctgtgtcaagatgaatacatggagtctccacaaaccggaggactacccccagactgcagtaagtgttgtcatggagactacagctttcgaggctaccaaggcccccctgggccaccgggccctcctggcattccaggaaaccatggaaacaatggcaacaatggagccactggtcatgaaggagccaaaggtgagaagggcgacaaaggtgacctggggcctcgaggggagcgggggcagcatggccccaaaggagagaagggctacccggggattccaccagaacttcagattgcattcatggcttctctggcaacccacttcagcaatcagaacagtgggattatcttcagcagtgttgagaccaacattggaaacttctttgatgtcatgactggtagatttggggccccagtatcaggtgtgtatttcttcaccttcagcatgatgaagcatgaggatgttgaggaagtgtatgtgtaccttatgcacaatggcaacacagtcttcagcatgtacagctatgaaatgaagggcaaatcagatacatccagcaatcatgctgtgctgaagctagccaaaggggatgaggtttggctgcgaatgggcaatggcgctctccatggggaccaccaacgcttctccacctttgcaggattcctgctctttgaaactaagtaaatatatgactagaatagctccactttggggaagacttgtagctgagctgatttgttacgatctgaggaacattaaagttgagggttttacattgctgtattcaaaaaattattggttgcaatgttgttcacgctacaggtacaccaataatgttggacaattcaggggctcagaagaatcaaccacaaaatagtcttctcagatgaccttgactaatatactcagcatctttatcactctttccttggcacctaaaagataattctcctctgacgcaggttggaaatatttttttctatcacagaagtcatttgcaaagaattttgactactctgcttttaatttaataccagttttcaggaacccctgaagttttaagttcattattctttataacatttgagagaatcggatgtagtgatatgacagggctggggcaagaacaggggcactagctgccttattagctaatttagtgccctccgtgttcagcttagcctttgaccctttccttttgatccacaaaatacattaaaactctgaattcacatacaatgctattttaaagtcaatagattttagctataaagtgcttgaccagtaatgtggttgtaattttgtgtatgttcccccacatcgcccccaacttcggatgtggggtcaggaggttgaggttcactattaacaaatgtcataaatatctcatagaggtacagtgccaatagatattcaaatgttgcatgttgaccagagggattttatatctgaagaacatacactattaataaataccttagagaaagattttgacctggctttagataaaactgtggcaagaaaaatgtaatgagcaatatatggaaataaacacacctttgttaaagatactttctaaacttgtgtttaataaactttaatagtcatagaattgtaaatcactatggttaacagaaagtgaaaatattttcatgcagatgatgtgaacagccatgtgaataggtgacttgggcacacagcagggtcatatgacttcagaaaacttcgcttttcagttattccattgttataatgtcaaccctttaagacattgatgtttagagggctcacaaataaaatctgaatacctgtaa

SEQ ID NO: 112654 - DNA, 2802 bp, Homo sapiens
  Payload ID: 2037
  Gene Symbol: C1QTNF3
  Gene Name: C1q and tumor necrosis factor related protein 3
  Uniprot ID: Q9BXJ4
  ENST ID: ENST00000382065
  CDS Start-End: 708-1667
ttttggcttttgggaagtcatggggaaaagaagtaaagctgagggtggcgaaatacctttgctaaacccagagacactgcacctgaatcctgctcagtgttttgtaggcaaccaactgccttctgccactggtatccggaaggggaaatgagttaccttaagtgggccaaagtggggaaatactaacagtacagctagaaaccaagagctgtcgtgaaagccctgaatgggttcccactgctatttcagacaaaactgatgcagttaagcctgaatttcctggcaagcacaagggtagatttttccaaaaggctttttagactgcaaatacacagcctttccatgtctaatcacaaaagcaaactgctggacacatgctctctgttcccagctggttgtgtatgttttcttcacacttcaacagaaacgtgccaaggtgtgacatttatgaatttcgccaactgggaactgtgcacacaaatcgttcttgcttgtggtgtgggaaaatgatgaatgggggctgttctgcctggggaggagggctgctgtcactctggcatgcctacagccttatttattacacaccaaagtataaaaccactccgccgctgcagctctcagctccagtcctggcatctgcccgaggagaccacgctcctggagctctgctgtcttctcagggagactctgaggctctgttgagaatcatgctttggaggcagctcatctattggcaactgctggctttgtttttcctccctttttgcctgtgtcaagatgaatacatggaggtgagcggaagaactaataaagtggtggcaagaatagtgcaaagccaccagcagactggccgtagcggctccaggagggagaaagtgagagagcggagccatcctaaaactgggactgtggataataacacttctacagacctaaaatccctgagaccagatgagctaccgcaccccgaggtagatgacctagcccagatcaccacattctggggccagtctccacaaaccggaggactacccccagactgcagtaagtgttgtcatggagactacagctttcgaggctaccaaggcccccctgggccaccgggccctcctggcattccaggaaaccatggaaacaatggcaacaatggagccactggtcatgaaggagccaaaggtgagaagggcgacaaaggtgacctggggcctcgaggggagcgggggcagcatggccccaaaggagagaagggctacccggggattccaccagaacttcagattgcattcatggcttctctggcaacccacttcagcaatcagaacagtgggattatcttcagcagtgttgagaccaacattggaaacttctttgatgtcatgactggtagatttggggccccagtatcaggtgtgtatttcttcaccttcagcatgatgaagcatgaggatgttgaggaagtgtatgtgtaccttatgcacaatggcaacacagtcttcagcatgtacagctatgaaatgaagggcaaatcagatacatccagcaatcatgctgtgctgaagctagccaaaggggatgaggtttggctgcgaatgggcaatggcgctctccatggggaccaccaacgcttctccacctttgcaggattcctgctctttgaaactaagtaaatatatgactagaatagctccactttggggaagacttgtagctgagctgatttgttacgatctgaggaacattaaagttgagggttttacattgctgtattcaaaaaattattggttgcaatgttgttcacgctacaggtacaccaataatgttggacaattcaggggctcagaagaatcaaccacaaaatagtcttctcagatgaccttgactaatatactcagcatctttatcactctttccttggcacctaaaagataattctcctctgacgcaggttggaaatatttttttctatcacagaagtcatttgcaaagaattttgactactctgcttttaatttaataccagttttcaggaacccctgaagttttaagttcattattctttataacatttgagagaatcggatgtagtgatatgacagggctggggcaagaacaggggcactagctgccttattagctaatttagtgccctccgtgttcagcttagcctttgaccctttccttttgatccacaaaatacattaaaactctgaattcacatacaatgctattttaaagtcaatagattttagctataaagtgcttgaccagtaatgtggttgtaattttgtgtatgttcccccacatcgcccccaacttcggatgtggggtcaggaggttgaggttcactattaacaaatgtcataaatatctcatagaggtacagtgccaatagatattcaaatgttgcatgttgaccagagggattttatatctgaagaacatacactattaataaataccttagagaaagattttgacctggctttagataaaactgtggcaagaaaaatgtaatgagcaatatatggaaataaacacacctttgttaaagatactttctaaacttgtgtttaataaactttaatagtcatagaattgtaaatcactatggttaacagaaagtgaaaatattttcatgcagatgatgtgaacagccatgtgaataggtgacttgggcacacagcagggtcatatgacttcagaaaacttcgcttttcagttattccattgttataatgtcaaccctttaagacattgatgtttagagggctcacaaataaaatctgaatacctgtaaggaaa

SEQ ID NO: 112655 - DNA, 1664 bp, Homo sapiens
  Payload ID: 2038
  Gene Symbol: C1QTNF4
  Gene Name: C1q and tumor necrosis factor related protein 4
  Uniprot ID: Q9BXJ3
  ENST ID: ENST00000302514
  CDS Start-End: 518-1507
aggaaggaagctggactgtagagcgctctgggccaccccgcgttagctgctgcctctggcctcagtttccccaactgctcagattaatgatgcctgctctctagacccagaggacgaagctctaaggaggtcacagatgaggaagggtccagtgctcggcgcagactccgtgcggagcccctaggccccgcagctcgcccctccctctcccctactcccctcctctccccctcccgtctctcccccgcctcttcgctctcgctcggctccctctctagctgaccttccctttccctcacgcctccccacgcccggcccctggccccagcaccctgtccgctgccgcctcagagccgggaaaagcagccggagcccccgccgcccctgccgcagcgcgggcggtcagcgcgcagcccggcacccgcagcctgcagcctgcagcccgcagcccgcagcccggagccagatcgcgggctcagaccgaacccgactcgaccgccgcccccagccaggcgccatgctgccgcttctgctgggcctgctgggcccagcggcctgctgggccctgggcccgacccccggcccgggatcctctgagctgcgctcggccttctcggcggcacgcaccacccccctggagggcacgtcggagatggcggtgaccttcgacaaggtgtacgtgaacatcgggggcgacttcgatgtggccaccggccagtttcgctgccgcgtgcccggcgcctacttcttctccttcacggctggcaaggccccgcacaagagcctgtcggtgatgctggtgcgaaaccgcgacgaggtgcaggcgctggccttcgacgagcagcggcggccaggcgcgcggcgcgcagccagccagagcgccatgctgcagctcgactacggcgacacagtgtggctgcggctgcatggcgccccgcagtacgcgctaggcgcgcccggcgccaccttcagcggctacctagtctacgccgacgccgacgctgacgcgcctgcgcgcgggccgcccgcgccccccgagccgcgctcggccttctcggcggcgcgcacgcgcagcttggtgggctcggacgctggccccgggccgcggcaccaaccactcgccttcgacaccgagttcgtcaacattggcggcgacttcgacgcggcggccggcgtgttccgctgccgtctgcccggcgcctacttcttctccttcacgctgggcaagctgccgcgtaagacgctgtcggttaagctgatgaagaaccgcgacgaggtgcaggccatgatttacgacgacggcgcgtcgcggcgccgcgagatgcagagccagagcgtgatgctggccctgcggcgcggcgacgccgtctggctgctcagccacgaccacgacggctacggcgcctacagcaaccacggcaagtacatcaccttctccggcttcctggtgtaccccgacctcgcccccgccgccccgccgggcctcggggcctcggagctactgtgagccccgggccagagaagagcccgggagggccaggggcgtgcatgccaggccgggccggaggctcgaaagtcccgcgcgagcgccacggcctccgggcgcgcctggactctgccaataaagcggaaagcgggcacgcgcagcgcccggcagcccaggc

SEQ ID NO: 112656 - DNA, 530 bp, Homo sapiens
  Payload ID: 2038
  Gene Symbol: C1QTNF4
  Gene Name: C1q and tumor necrosis factor related protein 4
  ENST ID: ENST00000530097
  CDS Start-End: 1-301
atgctgccgcttctgctgggcctgctgggcccagcggcctgctgggccctgggcccgacccccggcccgggatcctctgagctgcgctcggccttctcggcggcacgcaccacccccctggagggcacgtcggagatggcggtgaccttcgacaaggtgtacgtgaacatcgggggcgacttcgatgtggccaccggccagtttcgctgccgcgtgcccggcgcctacttcttctccttcacggctggcaaggccccgcacaagagcctgtcggtgatgctggtgcgaaaccgcgacgaggtgcaggccatgatttacgacgacggcgcgtcgcggcgccgcgagatgcagagccagagcgtgatgctggccctgcggcgcggcgacgccgtctggctgctcagccacgaccacgacggctacggcgcctacagcaaccacggcaagtacatcaccttctccggcttcctggtgtaccccgacctcgcccccgccgccccgccgggcctcggggcctcggagctactgtg

SEQ ID NO: 112657 - DNA, 1356 bp, Homo sapiens
  Payload ID: 2039
  Gene Symbol: C1QTNF5
  Gene Name: C1q and tumor necrosis factor related protein 5
  Uniprot ID: Q9BXJ0
  ENST ID: ENST00000528368
  CDS Start-End: 233-964
gaacaactggtttcctcttggagtctgggaggaggaaagcggagccggcagggagcgaaccaggactggggtgacggcagggcagggggcgcctggccggggagaagcgcgggggctggagcaccaccaactggagggtccggagtagcgagcgccccgaaggaggccatcggggagccgggaggggggactgcgagaggaccccggcgtccgggctcccggtgccagcgctatgaggccactcctcgtcctgctgctcctgggcctggcggccggctcgcccccactggacgacaacaagatccccagcctctgcccggggcaccccggccttccaggcacgccgggccaccatggcagccagggcttgccgggccgcgatggccgcgacggccgcgacggcgcgcccggggctccgggagagaaaggcgagggcgggaggccgggactgccgggacctcgaggggaccccgggccgcgaggagaggcgggacccgcggggcccaccgggcctgccggggagtgctcggtgcctccgcgatccgccttcagcgccaagcgctccgagagccgggtgcctccgccgtctgacgcacccttgcccttcgaccgcgtgctggtgaacgagcagggacattacgacgccgtcaccggcaagttcacctgccaggtgcctggggtctactacttcgccgtccatgccaccgtctaccgggccagcctgcagtttgatctggtgaagaatggcgaatccattgcctctttcttccagtttttcggggggtggcccaagccagcctcgctctcggggggggccatggtgaggctggagcctgaggaccaagtgtgggtgcaggtgggtgtgggtgactacattggcatctatgccagcatcaagacagacagcaccttctccggatttctggtgtactccgactggcacagctccccagtctttgcttagtgcccactgcaaagtgagctcatgctctcactcctagaaggagggtgtgaggctgacaaccaggtcatccaggagggctggcccccctggaatattgtgaatgactagggaggtggggtagagcactctccgtcctgctgctggcaaggaatgggaacagtggctgtctgcgatcaggtctggcagcatggggcagtggctggatttctgcccaagaccagaggagtgtgctgtgctggcaagtgtaagtcccccagttgctctggtccaggagcccacggtggggtgctctcttcctggtcctctgcttctctggatcctccccaccccctcctgctcctggggccggcccttttctcagagatcactcaataaacctaagaaccctccta

SEQ ID NO: 112658 - DNA, 1046 bp, Homo sapiens
  Payload ID: 2039
  Gene Symbol: C1QTNF5
  Gene Name: C1q and tumor necrosis factor related protein 5
  Uniprot ID: Q9BY79
  ENST ID: ENST00000530681
  CDS Start-End: 171-902
cggccctgcgagcgctcagcctcaggggcacggcagtggggtggggaccgactgggccgcgccggggtggggagagaggcaggtcccaggattctgggtcccgactccagtcctgcctggtccacagactgcgagaggaccccggcgtccgggctcccggtgccagcgctatgaggccactcctcgtcctgctgctcctgggcctggcggccggctcgcccccactggacgacaacaagatccccagcctctgcccggggcaccccggccttccaggcacgccgggccaccatggcagccagggcttgccgggccgcgatggccgcgacggccgcgacggcgcgcccggggctccgggagagaaaggcgagggcgggaggccgggactgccgggacctcgaggggaccccgggccgcgaggagaggcgggacccgcggggcccaccgggcctgccggggagtgctcggtgcctccgcgatccgccttcagcgccaagcgctccgagagccgggtgcctccgccgtctgacgcacccttgcccttcgaccgcgtgctggtgaacgagcagggacattacgacgccgtcaccggcaagttcacctgccaggtgcctggggtctactacttcgccgtccatgccaccgtctaccgggccagcctgcagtttgatctggtgaagaatggcgaatccattgcctctttcttccagtttttcggggggtggcccaagccagcctcgctctcggggggggccatggtgaggctggagcctgaggaccaagtgtgggtgcaggtgggtgtgggtgactacattggcatctatgccagcatcaagacagacagcaccttctccggatttctggtgtactccgactggcacagctccccagtctttgcttagtgcccactgcaaagtgagctcatgctctcactcctagaaggagggtgtgaggctgacaaccaggtcatccaggagggctggcccccctggaatattgtgaatgactagggaggtggggtagagcactctccgtcctgctgctgg

SEQ ID NO: 112659 - DNA, 469 bp, Homo sapiens
  Payload ID: 2039
  Gene Symbol: C1QTNF5
  Gene Name: C1q and tumor necrosis factor related protein 5
  ENST ID: ENST00000634633
  CDS Start-End: 290-469
gggcgacaccacgagttatttcccagctatttcccggtccgggagctcttggcccctgaacaactggtttcctcttggagtctgggaggaggaaagcggagccggcagggagcgaaccaggactggggtgacggcagggcagggggcgcctggccggggagaagcgcgggggctggagcaccaccaactggagggtccggagtagcgagcgccccgaaggaggccatcggggagccgggaggggggactgcgagaggaccccggcgtccgggctcccggtgccagcgctatgaggccactcctcgtcctgctgctcctgggcctggcggccggctcgcccccactggacgacaacaagatccccagcctctgcccggggcaccccggccttccaggactgccgggacctcgaggggaccccgggccgcgaggagaggcgggacccgcggggcccaccgggcctgccggg

SEQ ID NO: 112660 - DNA, 2934 bp, Homo sapiens
  Payload ID: 2040
  Gene Symbol: C1QTNF6
  Gene Name: C1q and tumor necrosis factor related protein 6
  Uniprot ID: Q9BXI9
  ENST ID: ENST00000337843
  CDS Start-End: 77-913
ccctcctctgctgggcctgggggtctgggccagcaacaagttagtattgcagacatgggccaaggagccagaggccatgcagtggctcagggtccgtgagtcgcctggggaggccacaggacacagggtcaccatggggacagccgccctgggtcccgtctgggcagcgctcctgctctttctcctgatgtgtgagatccctatggtggagctcacctttgacagagctgtggccagcggctgccaacggtgctgtgactctgaggaccccctggatcctgcccatgtatcctcagcctcttcctccggccgcccccacgccctgcctgagatcagaccctacattaatatcaccatcctgaagggtgacaaaggggacccaggcccaatgggcctgccagggtacatgggcagggagggtccccaaggggagcctggccctcagggcagcaagggtgacaagggggagatgggcagccccggcgccccgtgccagaagcgcttcttcgccttctcagtgggccgcaagacggccctgcacagcggcgaggacttccagacgctgctcttcgaaagggtctttgtgaaccttgatgggtgctttgacatggcgaccggccagtttgctgctcccctgcgtggcatctacttcttcagcctcaatgtgcacagctggaattacaaggagacgtacgtgcacattatgcataaccagaaagaggctgtcatcctgtacgcgcagcccagcgagcgcagcatcatgcagagccagagtgtgatgctggacctggcctacggggaccgcgtctgggtgcggctcttcaagcgccagcgcgagaacgccatctacagcaacgacttcgacacctacatcaccttcagcggccacctcatcaaggccgaggacgactgagggcctctgggccaccctcccggctggagagctcaggtgctggtcccgtcccctgcagggctcagtttgcactgctgtgaagcaggaaggccagggaggtccccggggacctggcattctggggagaccctgcttctatcttggctgccatcatccctcccagcctatttctgctcctctcttctctcttggacctattttaagaagcttgctaacctaaatattctagaactttcccagcctcgtagcccagcacttctcaaacttggaaatgcatgcgaatcacccggggttcgtgttaaatgcagattctgactcagcaggtctgagtgggtccaggattctgtgtttctcatatgttcctgggtgatgctgatggggtcagtctatgaaccacactggagcaaccaggttctaggactttctcaatattctagtactttctgaacattctggaatcctccccacattctagaattctcccaacatttttttttcttgagacagagtcttgctctgttgcccaggctagagtgcagtggtgcaatctcagttcactgcaacctctgcctcccgggttcaagcgattcttctgcctcagcctccctagtggctgggattacaggcgcctgctaccatgcctggctaatttttgtatttttagtagagatggggtttcaccatattggccaggctggtcttgaactcctgacttcaggtgacccacccgcctcggcctctcaaaatgctgggattacaggtgtgagccaccgtgcctggccaattccaacattcttaaattctctcatccctccagggctccccgtgctatgttctctttaccccttccccctcttctcttgctcaggcctgcaccactgcagccaccgttcatttattcattcattaaacactgagcactcactctgtgctgggtcccgggaagggtgagggggtcagacacaggccctgcccctgccctcagtgactggccagtccagcccaggcggggagagatgtgtacataggttttaaagcagacccagagctcatgggggcctgtgttctgggtgttcaggtgctgctggtcctccattacccactgctccccaaggctggtgggacggggtcccggtggcaggggcaggtatctccttcccgttcctcatccacctgcccagtgctcatcgttacagcaaaccccagggggccttggccaggtcaagggttctgtgaggagaggacccaggagtgtgggggcatttggggggtgaagtggcccccgaagaatggaacccacacccatagctctccccacagctgatacggcatcctgcgagaagacctgccctcctcactgggatccccttcctgcctcctcccagggctctgccagggccttgctcagtcccttccaccaaagtcatctgaacttccgtttccccagggcctccagctgccctcagacactgatgtctgtccccaggtgctctctgcccctcatgcccctctcaccggcccagtgccccgactctccaggctttatcaaggtgctaaggcccgggtgggcagctcctcgtctcagagccctcctccggcctggtgctgcctttacaaacacctgcaggagaagggccacggaagccccaggctttagagccctcagcaggtctggggagctagagcaaaggagggacctcaggccttccgtttcttcttccagggtggggtggcctggtgttcccctagccttccaaacccaggtggcctgcccttctccccagagggaggcggcctccgcccattggtgctcatgcagactctggggctgaggtgccccggggggtgatctctggtgctcacagccgaggagccgtggctccatggccagatgacggaaacagggtctgaccaagtgccaggaagacctgtgctataaaccaccctgcctgatcctgcccctgcctgaccccgccacgccctgccgtccagcatgattaaagaatgctgtctcctcttgg

SEQ ID NO: 112661 - DNA, 1647 bp, Homo sapiens
  Payload ID: 2040
  Gene Symbol: C1QTNF6
  Gene Name: C1q and tumor necrosis factor related protein 6
  Uniprot ID: Q9BXI9
  ENST ID: ENST00000397110
  CDS Start-End: 74-910
tcctctgctgggcctgggggtctgggccagcaacaagttagtattgcagacatgggccaaggagccagaggccatgcagtggctcagggtccgtgagtcgcctggggaggccacaggacacagggtcaccatggggacagccgccctgggtcccgtctgggcagcgctcctgctctttctcctgatgtgtgagatccctatggtggagctcacctttgacagagctgtggccagcggctgccaacggtgctgtgactctgaggaccccctggatcctgcccatgtatcctcagcctcttcctccggccgcccccacgccctgcctgagatcagaccctacattaatatcaccatcctgaagggtgacaaaggggacccaggcccaatgggcctgccagggtacatgggcagggagggtccccaaggggagcctggccctcagggcagcaagggtgacaagggggagatgggcagccccggcgccccgtgccagaagcgcttcttcgccttctcagtgggccgcaagacggccctgcacagcggcgaggacttccagacgctgctcttcgaaagggtctttgtgaaccttgatgggtgctttgacatggcgaccggccagtttgctgctcccctgcgtggcatctacttcttcagcctcaatgtgcacagctggaattacaaggagacgtacgtgcacattatgcataaccagaaagaggctgtcatcctgtacgcgcagcccagcgagcgcagcatcatgcagagccagagtgtgatgctggacctggcctacggggaccgcgtctgggtgcggctcttcaagcgccagcgcgagaacgccatctacagcaacgacttcgacacctacatcaccttcagcggccacctcatcaaggccgaggacgactgagggcctctgggccaccctcccggctggagagctcagctgatacggcatcctgcgagaagacctgccctcctcactgggatccccttcctgcctcctcccagggctctgccagggccttgctcagtcccttccaccaaagtcatctgaacttccgtttccccagggcctccagctgccctcagacactgatgtctgtccccaggtgctctctgcccctcatgcccctctcaccggcccagtgccccgactctccaggctttatcaaggtgctaaggcccgggtgggcagctcctcgtctcagagccctcctccggcctggtgctgcctttacaaacacctgcaggagaagggccacggaagccccaggctttagagccctcagcaggtctggggagctagagcaaaggagggacctcaggccttccgtttcttcttccagggtggggtggcctggtgttcccctagccttccaaacccaggtggcctgcccttctccccagagggaggcggcctccgcccattggtgctcatgcagactctggggctgaggtgccccggggggtgatctctggtgctcacagccgaggagccgtggctccatggccagatgacggaaacagggtctgaccaagtgccaggaagacctgtgctataaaccaccctgcctgatcctgcccctgcctgaccccgccacgccctgccgtccagcatgattaaagaatgctgtctcctcttgg

SEQ ID NO: 112662 - DNA, 975 bp, Homo sapiens
  Payload ID: 2040
  Gene Symbol: C1QTNF6
  Gene Name: C1q and tumor necrosis factor related protein 6
  ENST ID: ENST00000434784
  CDS Start-End: 24-374
catgggccaaggagccagaggccatgcagtggctcagggtccgtgagtcgcctggggaggccacaggacacagggtcaccatggggacagccgccctgggtcccgtctgggcagcgctcctgctctttctcctgatgtgtgagatccctatggtggagctcacctttgacagagctgtggccagcggctgccaacggtgctgtgactctgaggaccccctggatcctgcccatgtatcctcagcctcttcctccggccgcccccacgccctgcctgagatcagaccctacattaatatcaccatcctgaagggacgtggaaggactcgcttcccttccaggctgtggtggctgacggctgtgaccaggccttgacatccttagcgtccgtctctgcccacaacagcccgtgaggtgacaaaggggacccaggcccaatgggcctgccagggtacatgggcagggagggtccccaaggggagcctggccctcagggcagcaagggtgacaagggggagatgggcagccccggcgccccgtgccagaagcgcttcttcgccttctcagtgggccgcaagacggccctgcacagcggcgaggacttccagacgctgctcttcgaaagggtctttgtgaaccttgatgggtgctttgacatggcgaccggccagtttgctgctcccctgcgtggcatctacttcttcagcctcaatgtgcacagctggaattacaaggagacgtacgtgcacattatgcataaccagaaagaggctgtcatcctgtacgcgcagcccagcgagcgcagcatcatgcagagccagagtgtgatgctggacctggcctacggggaccgcgtctgggtgcggctcttcaagcgccagcgcgagaacgccatctacagcaacgacttcgacacctacatcaccttcagcggccacctcatcaaggccgaggacgactgagggcctctgggcca

SEQ ID NO: 112663 - DNA, 4516 bp, Homo sapiens
  Payload ID: 2041
  Gene Symbol: C1QTNF7
  Gene Name: C1q and tumor necrosis factor related protein 7
  Uniprot ID: Q9BXJ2
  ENST ID: ENST00000295297
  CDS Start-End: 260-1150
gggagaaggagtgggaggttgtttaaactgagaaagacagttgcaaaacttcgtacaacagcatgagctccaagcttcaaacgcattctcatgctcagacgagcactttatttttcatcaagttattttttgcattgttttggagtagcttcgaataataaacacatatttctgctttaaatttttaatagttaactacattcatgggacaaccaaagcaagaaagcctcatgttttgggggaaagtttgatatcagcaatgtccagacaagagccaaagatgtttgtcttgctctatgttacaagttttgccatttgtgccagtggacaaccccggggtaatcagttgaaaggagagaactactcccccaggtatatctgcagcattcctggcttgcctggacctccagggccccctggagcaaatggttcccctgggccccatggtcgcatcggccttccaggaagagatggtagagacggcaggaaaggagagaaaggtgaaaagggaactgcaggtttgagaggtaagactggaccgctaggtcttgccggtgagaaaggggaccaaggagagactgggaagaaaggacccataggaccagagggagagaaaggagaagtaggtccaattggtcctcctggaccaaagggagacagaggagaacaaggggacccggggctgcctggagtttgcagatgtggaagcatcgtgctcaaatccgccttttctgttggcatcacaaccagctacccagaagaaagactacctattatatttaacaaggtcctcttcaacgagggagagcactacaaccctgccacagggaagttcatctgtgctttcccagggatctattacttttcttatgatatcacattggctaataagcatctggcaatcggactggtacacaatgggcaataccggataaagaccttcgacgccaacacaggaaaccatgatgtggcttcggggtccacagtcatctatctgcagccagaagatgaagtctggctggagattttcttcacagaccagaatggcctcttctcagacccaggttgggcagacagcttattctccgggtttctcttatacgttgacacagattacctagattccatatcagaagatgatgaattgtgatcaggaccaagatccctgtggtaaacactctgattgaatctggggttccagaaggtggaacaagcaggaatgggatccaaagagactcccactcagattctaaagcatttaaagacaattctagcagaatttatcaaaacaagatgaaacacagaaaagttgaaaccacaacaaaatgaattctattaaagaatagccccagatataaattctcttgaaagcaatgttcataaatatttaagcaaattaaagacaatgttaacaaattttctattaaatgccctgagtgataaaaccagttggcaataatattgccttattaaatcttcaaaaaatatattttagtctgttatttaagaaaaacataacatcccaaaatctttgacaattctcgaaaggctatatagtaagtcaaaaaccaaaggtaagagatgctaactatttttcaagcaagctacagagaaatgataaatgttttttgttttattatttattccttcatgtttgtatatattcactcaacaaccctttaatgagcctgtaaggaccagacactgtggcgctgaatcagatttaataatgagttaagacaaagcccctacctatgggctagtgtgtggtgatcaaactatcacaattcagtgtgatgagcagcatagcaaacagatggatttgaagctaaaagcacacagggtctgctattcctgaggctgggggccagagaagcttttacgcatggaaaaacactaatcatgccaaggtgtatgtgtttaagggggtgtgatggatgcaaagggaatgaggaattcagcactgcattctctttgcaccctcaatgcatgattggtattctcaacagcaaaggggtgaaaaatctagagacagaggaggcctggcaggggtgataaaaatggagattgaaatgaagagaaatagccagcaggtgattcttctgaatcctttagtgtgatggtttcccaagacaaacatttgtcctaatagctttctcataaatatgggcaccactttacattgtggtaagacattgcttctcatggatctgctaggtatttatttcaaataaagcaaggcatatgttcactgatttacgagtaagctgatgagagcaatgaacaggagaaggagggagagagccaaatgtctgagtaaacagatatcccttccaagtctcacacctcccttagtcccactcttgcttgtgtcagcaccttgttcttcactgaactgcaattcttcaattattctcttccatgattttgtctgatctaccatttctatggtttatggtaatagtattccctttatccctcccttttggtaacttccaatcctccttctatgtattcctttctctgctcattgacttataaatagttttcatacctcttatgtttgaatcaccatgctagattctgtgaagacagaagagtatcaagattaatatattaatagtatagctctgactggtaaatttcttttttttaatcttccccaatttaaattttttaatttaaaagtaaattttactgtcgaaaatgcaaacttggggagggcggaaacatcacacacaaggtttccacttcacacttggagggttgcatggcggctgggcaaaggtgctccccacttcccagatggtgcggcggctggccagaggcactcttcacttcccagacagaggggcggccgggcagaggtgctcctcacttcccagagggtgcaggagccagctctgactagtaaatttctaaggataccagaaaggaaatggcatgcacacacacaaaaaatacctaaattttggatgagaaaatgataaaatatgctaagttctaggctggaaataagggcaaaatgctgtgaaagaagaggaaatgtttacttccaaattaggatgtgacagagaagggatagggaaatcctctctgctcattgggccttacatgatgggtgacacttggagtggcacaagttgggggaaagcgcacttgagacagaggtaatgatggggacgaagtgagaacagagacccagaaggagaatcaatggaccatatttgtaagagctttgaaagccagcctgagaattggaggatttattcataagaaagtgtagagaccctgtgtatttcagagctggatactgccattaccacagatgaaagttgcaatgatctagcagttgtgtgcaaaggcaaggcttgcttttcctgtctttcaaccctatcttgcttttcctgtctttcaaccctatcttgctttcattgtcttcatcttcctgccatactttgtgcacttattgctctccttctgagtcaggacatgtgtacaggagaccaagaacaatgagtattagaaaaaaaggagacagcaaaggtggtttgaggtagtcacctgcttacagataacagccaaagatagaattccaagttataaagcataaaaaagagccaacagaagtaactaatccgggaaaagtgaacatatgggccctttaaagactacaagatttgctagataaactggaaatggagaagttattgcagacagtcatgaaccacaaatcactgtgattaaaattttcttctgatcgtaatccacgaatgcattcattttttggacattgcttacttatcttttaaatgtttcttttattacaaagcctattttgagtagcttttaaaactgaatttcctttaattggtttgaagcctagagatgaatttcgttttcaaatatctggtgggatggtaatggggattagagaactgacatgagaaaagaggagctgttttggtattaaacgaataaaatcttaagcaaatataggtgtcttttattcttaaaaaatagcagatacagtttatccacatttgtaaatatttgtataaagaaagtagcaaaacagttttggtttaaaaagttccaagtctcattgcaatcattctttgtaaaggctgacttgtaatgaatatgtattaagcaatatttattgactatacaccatcttgttctagaagagtttaaagccacttaagaagataaataagatataaaaagaaaacagcagtcaaaagcagatgagaagaaatgggaaaaacaaaaaaaaaagaaaataatgaggctaatataatgctgtgtgtacatgaacatgaatgtgcctgtgttacacattttcaggccacaaatgtttctttgtgcccctgcatgcacaagggtatttccaggtcatttatcattgtgaacagtgttgcttatgataaaaaatagattctataaactctaaatatactttttttctaccactctgtgtaaaagatcatgaacgtaaataaattttagatat

SEQ ID NO: 112664 - DNA, 566 bp, Homo sapiens
  Payload ID: 2041
  Gene Symbol: C1QTNF7
  Gene Name: C1q and tumor necrosis factor related protein 7
  ENST ID: ENST00000382383
  CDS Start-End: 230-566
cattgcacgccggggtccttgcccgctccctctctctgccaccgctcaaagcctgggagaacgcttttgaaagcgaatcaggaaattacttatcaatctgaagccccaaagaattatgaataatcctcgctgccaaagggaaggggattttgagcaaaagctccacatctgcgcacactagagttcaaagactccagctgttggaaggtcttgtgagcaatagccaaagatgtttgtcttgctctatgttacaagttttgccatttgtgccagtggacaaccccggggtaatcagttgaaaggagagaactactcccccaggtatatctgcagcattcctggcttgcctggacctccagggccccctggagcaaatggttcccctgggccccatggtcgcatcggccttccaggaagagatggtagagacggcaggaaaggagagaaaggtgaaaagggaactgcaggtttgagaggtaagactggaccgctaggtcttgccggtgagaaaggggaccaaggagagactgggaagaaaggacccataggaccagagggagagaaag

SEQ ID NO: 112665 - DNA, 583 bp, Homo sapiens
  Payload ID: 2041
  Gene Symbol: C1QTNF7
  Gene Name: C1q and tumor necrosis factor related protein 7
  ENST ID: ENST00000397700
  CDS Start-End: 130-583
agaagaacactacccactcctacttgttcttaactagtgtatatattaagctctttgaaatttaactacattcatgggacaaccaaagcaagaaagcctcatgttttgggggaaagtttgatatcagcaatgtccagacaagagccaaagatgtttgtcttgctctatgttacaagttttgccatttgtgccagtggacaaccccggggtaatcagttgaaaggagagaactactcccccaggtatatctgcagcattcctggcttgcctggacctccagggccccctggagcaaatggttcccctgggccccatggtcgcatcggccttccaggaagagatggtagagacggcaggaaaggagagaaaggtgaaaagggaactgcaggtttgagaggtaagactggaccgctaggtcttgccggtgagaaaggggaccaaggagagactgggaagaaaggacccataggaccagagggagagaaaggagaagtaggtccaattggtcctcctggaccaaagggagacagaggagaacaaggggacccggggctgcctggagtttgcagatgtggaagcatcg

SEQ ID NO: 112666 - DNA, 1533 bp, Homo sapiens
  Payload ID: 2041
  Gene Symbol: C1QTNF7
  Gene Name: C1q and tumor necrosis factor related protein 7
  Uniprot ID: Q9BXJ2
  ENST ID: ENST00000444304
  CDS Start-End: 327-1196
gaggccacaacacacagagatggagaagctctaaacttaccactgaaggaaagcaggcacttaaagtttatcccaaacaaaactgtaattttaactggtccccgagttgagcctcactcgatgaatgacttccagggcctttggctctttgggactaaacgagaaaattatttttagcacaactatttggaaatctttgagaatttggatctgttattctgtctggtaccaaagcaagtttttcactgagctctcatgaaagatcctcagtctcttgtggatttagaatcctgcagcagcccaccatctaagagcaagagccaaagatgtttgtcttgctctatgttacaagttttgccatttgtgccagtggacaaccccggggtaatcagttgaaaggagagaactactcccccaggtatatctgcagcattcctggcttgcctggacctccagggccccctggagcaaatggttcccctgggccccatggtcgcatcggccttccaggaagagatggtagagacggcaggaaaggagagaaaggtgaaaagggaactgcaggtttgagaggtaagactggaccgctaggtcttgccggtgagaaaggggaccaaggagagactgggaagaaaggacccataggaccagagggagagaaaggagaagtaggtccaattggtcctcctggaccaaagggagacagaggagaacaaggggacccggggctgcctggagtttgcagatgtggaagcatcgtgctcaaatccgccttttctgttggcatcacaaccagctacccagaagaaagactacctattatatttaacaaggtcctcttcaacgagggagagcactacaaccctgccacagggaagttcatctgtgctttcccagggatctattacttttcttatgatatcacattggctaataagcatctggcaatcggactggtacacaatgggcaataccggataaagaccttcgacgccaacacaggaaaccatgatgtggcttcggggtccacagtcatctatctgcagccagaagatgaagtctggctggagattttcttcacagaccagaatggcctcttctcagacccaggttgggcagacagcttattctccgggtttctcttatacgttgacacagattacctagattccatatcagaagatgatgaattgtgatcaggaccaagatccctgtggtaaacactctgattgaatctggggttccagaaggtggaacaagcaggaatgggatccaaagagactcccactcagattctaaagcatttaaagacaattctagcagaatttatcaaaacaagatgaaacacagaaaagttgaaaccacaacaaaatgaattctattaaagaatagccccagatataaattctcttgaaagcaatgttcataaatatttaagcaaattaaagacaatgttaacaaattttctattaaatgccctgagtgataaaaccagttggcaataatattgccttattaaatcttcaaaaaata

SEQ ID NO: 112667 - DNA, 4464 bp, Homo sapiens
  Payload ID: 2041
  Gene Symbol: C1QTNF7
  Gene Name: C1q and tumor necrosis factor related protein 7
  Uniprot ID: Q9BXJ2
  ENST ID: ENST00000429690
  CDS Start-End: 228-1097
ttgcacgccggggtccttgcccgctccctctctctgccaccgctcaaagcctgggagaacgcttttgaaagcgaatcaggaaattacttatcaatctgaagccccaaagaattatgaataatcctcgctgccaaagggaaggggattttgagcaaaagctccacatctgcgcacactagagttcaaagactccagctgttggaaggtcttgtgagcaatagccaaagatgtttgtcttgctctatgttacaagttttgccatttgtgccagtggacaaccccggggtaatcagttgaaaggagagaactactcccccaggtatatctgcagcattcctggcttgcctggacctccagggccccctggagcaaatggttcccctgggccccatggtcgcatcggccttccaggaagagatggtagagacggcaggaaaggagagaaaggtgaaaagggaactgcaggtttgagaggtaagactggaccgctaggtcttgccggtgagaaaggggaccaaggagagactgggaagaaaggacccataggaccagagggagagaaaggagaagtaggtccaattggtcctcctggaccaaagggagacagaggagaacaaggggacccggggctgcctggagtttgcagatgtggaagcatcgtgctcaaatccgccttttctgttggcatcacaaccagctacccagaagaaagactacctattatatttaacaaggtcctcttcaacgagggagagcactacaaccctgccacagggaagttcatctgtgctttcccagggatctattacttttcttatgatatcacattggctaataagcatctggcaatcggactggtacacaatgggcaataccggataaagaccttcgacgccaacacaggaaaccatgatgtggcttcggggtccacagtcatctatctgcagccagaagatgaagtctggctggagattttcttcacagaccagaatggcctcttctcagacccaggttgggcagacagcttattctccgggtttctcttatacgttgacacagattacctagattccatatcagaagatgatgaattgtgatcaggaccaagatccctgtggtaaacactctgattgaatctggggttccagaaggtggaacaagcaggaatgggatccaaagagactcccactcagattctaaagcatttaaagacaattctagcagaatttatcaaaacaagatgaaacacagaaaagttgaaaccacaacaaaatgaattctattaaagaatagccccagatataaattctcttgaaagcaatgttcataaatatttaagcaaattaaagacaatgttaacaaattttctattaaatgccctgagtgataaaaccagttggcaataatattgccttattaaatcttcaaaaaatatattttagtctgttatttaagaaaaacataacatcccaaaatctttgacaattctcgaaaggctatatagtaagtcaaaaaccaaaggtaagagatgctaactatttttcaagcaagctacagagaaatgataaatgttttttgttttattatttattccttcatgtttgtatatattcactcaacaaccctttaatgagcctgtaaggaccagacactgtggcgctgaatcagatttaataatgagttaagacaaagcccctacctatgggctagtgtgtggtgatcaaactatcacaattcagtgtgatgagcagcatagcaaacagatggatttgaagctaaaagcacacagggtctgctattcctgaggctgggggccagagaagcttttacgcatggaaaaacactaatcatgccaaggtgtatgtgtttaagggggtgtgatggatgcaaagggaatgaggaattcagcactgcattctctttgcaccctcaatgcatgattggtattctcaacagcaaaggggtgaaaaatctagagacagaggaggcctggcaggggtgataaaaatggagattgaaatgaagagaaatagccagcaggtgattcttctgaatcctttagtgtgatggtttcccaagacaaacatttgtcctaatagctttctcataaatatgggcaccactttacattgtggtaagacattgcttctcatggatctgctaggtatttatttcaaataaagcaaggcatatgttcactgatttacgagtaagctgatgagagcaatgaacaggagaaggagggagagagccaaatgtctgagtaaacagatatcccttccaagtctcacacctcccttagtcccactcttgcttgtgtcagcaccttgttcttcactgaactgcaattcttcaattattctcttccatgattttgtctgatctaccatttctatggtttatggtaatagtattccctttatccctcccttttggtaacttccaatcctccttctatgtattcctttctctgctcattgacttataaatagttttcatacctcttatgtttgaatcaccatgctagattctgtgaagacagaagagtatcaagattaatatattaatagtatagctctgactggtaaatttcttttttttaatcttccccaatttaaattttttaatttaaaagtaaattttactgtcgaaaatgcaaacttggggagggcggaaacatcacacacaaggtttccacttcacacttggagggttgcatggcggctgggcaaaggtgctccccacttcccagatggtgcggcggctggccagaggcactcttcacttcccagacagaggggcggccgggcagaggtgctcctcacttcccagagggtgcaggagccagctctgactagtaaatttctaaggataccagaaaggaaatggcatgcacacacacaaaaaatacctaaattttggatgagaaaatgataaaatatgctaagttctaggctggaaataagggcaaaatgctgtgaaagaagaggaaatgtttacttccaaattaggatgtgacagagaagggatagggaaatcctctctgctcattgggccttacatgatgggtgacacttggagtggcacaagttgggggaaagcgcacttgagacagaggtaatgatggggacgaagtgagaacagagacccagaaggagaatcaatggaccatatttgtaagagctttgaaagccagcctgagaattggaggatttattcataagaaagtgtagagaccctgtgtatttcagagctggatactgccattaccacagatgaaagttgcaatgatctagcagttgtgtgcaaaggcaaggcttgcttttcctgtctttcaaccctatcttgcttttcctgtctttcaaccctatcttgctttcattgtcttcatcttcctgccatactttgtgcacttattgctctccttctgagtcaggacatgtgtacaggagaccaagaacaatgagtattagaaaaaaaggagacagcaaaggtggtttgaggtagtcacctgcttacagataacagccaaagatagaattccaagttataaagcataaaaaagagccaacagaagtaactaatccgggaaaagtgaacatatgggccctttaaagactacaagatttgctagataaactggaaatggagaagttattgcagacagtcatgaaccacaaatcactgtgattaaaattttcttctgatcgtaatccacgaatgcattcattttttggacattgcttacttatcttttaaatgtttcttttattacaaagcctattttgagtagcttttaaaactgaatttcctttaattggtttgaagcctagagatgaatttcgttttcaaatatctggtgggatggtaatggggattagagaactgacatgagaaaagaggagctgttttggtattaaacgaataaaatcttaagcaaatataggtgtcttttattcttaaaaaatagcagatacagtttatccacatttgtaaatatttgtataaagaaagtagcaaaacagttttggtttaaaaagttccaagtctcattgcaatcattctttgtaaaggctgacttgtaatgaatatgtattaagcaatatttattgactatacaccatcttgttctagaagagtttaaagccacttaagaagataaataagatataaaaagaaaacagcagtcaaaagcagatgagaagaaatgggaaaaacaaaaaaaaaagaaaataatgaggctaatataatgctgtgtgtacatgaacatgaatgtgcctgtgttacacattttcaggccacaaatgtttctttgtgcccctgcatgcacaagggtatttccaggtcatttatcattgtgaacagtgttgcttatgataaaaaatagattctataaactctaaatatactttttttctaccactctgtgtaaaagatcatgaacgtaaataaattttagatatg

SEQ ID NO: 112668 - DNA, 1627 bp, Homo sapiens
  Payload ID: 2042
  Gene Symbol: C1QTNF8
  Gene Name: C1q and tumor necrosis factor related protein 8
  Uniprot ID: P60827
  ENST ID: ENST00000328449
  CDS Start-End: 275-1033
gcccagaggaagccacgggcgcccaggcgggcatgaaagggctctttgacggctgggttgctgggacagtaacacagacggccggccaggaggaaggaccttgccctgtgctacaatcccagagggcttcctgaaggaggcagcctagatctttgtccagcagagcccatcttcagggaatattgaggatcccgacccgtgcacctgccctagcggaagacactcctggccaagcctccagatgtggctgtgaggggagtgggccctggccaagatggcagcccccgccctgctgctcctagcactgctgctgcccgtgggggcctggcccgggctgcccaggaggccctgtgtgcactgctgccgcccggcctggccccctggaccctatgcccgggtgagtgacagggacctgtggaggggggacctgtggagggggctgcctcgagtacggcccactatagacatcgaaatcctcaaaggtgagaagggtgaggccggcgtccgaggtcgggccggcaggagcgggaaagaggggccgccaggcgcccggggcctgcagggccgcagaggccagaaggggcaggtggggccgccgggcgccgcgtgccgacgtgcctacgccgccttctccgtgggccggcgcgagggcctgcacagctccgaccacttccaggcggtgcccttcgacacggagctggtgaacctggacggcgccttcgacctggccgcgggccgcttcctctgcacggtgcccggcgtctacttcctcagcctcaacgtgcacacctggaactacaaggagacctacctgcacatcatgctgaaccggcggcccgcggccgtgctctacgcgcagcccagcgagcgcagcgtcatgcaggcccagagcctgatgctgctgctggcggcgggcgacgccgtctgggtgcgcatgttccagcgcgaccgggacaacgccatctacggcgagcacggagacctctacatcaccttcagcggccacctggtcaagccggccgccgagctgtagccggacagacgtccgcctgtggggactctgggagccccggctggcgcgcccgcctctccacttcgcctcactcctgtcctgggacagagggtgccctgcccttgggagatggtgctctgaggcccggccagagtctgcagaacccgcgtgtgtgtgctggagccactccccaggcaggcgggggaacaagcgtggcccccaacagcgcaggacaggaggaggggcggctacaggggcccgccatttgctgtgcacacatggcccctctgcagggagaggggctctgtcccggctgcgccacccccacccactgcccaagcctgctgcctcccaagtcgcccggcatccacctctttccctgaggctgtccctggggccaggctgcccctcagcacccccaagtggccccgtactcaagtcccaccttgtgtgtctgtgggggggcggtagcagggcttctggaagtgtggtgacaaccaaggacaggaggggctggggccggtggccgtggctggtgaaccctggccctgctagagacaggaggggcactggcgctggggctggacccggaaccttccctctccttcgccccac

SEQ ID NO: 112669 - DNA, 897 bp, Homo sapiens
  Payload ID: 2042
  Gene Symbol: C1QTNF8
  Gene Name: C1q and tumor necrosis factor related protein 8
  ENST ID: ENST00000621771
  CDS Start-End: 45-815
caagcctccagatgtggctgtgaggggagtgggccctggccaagatggcagcccccgccctgctgctcctagcactgctgctgcccgtgggggcctggcccgggctgcccaggaggccctgtgtgcactgctgccgcccggcctggccccctggaccctatgcccgggtgagtgacagggacctgtggaggggggacctgtggagggggctgcctcgagtacggcccactatagacatcgaaatcctcaaaggtgaggcccgtgggtgcgcctgcatgctcccccaccaggacccaacagcccagggagtggggagcacctggggcgaggaggggcgggaggggacgctgagcaccagtgtctgccctggcagcgctccctgcacagcgtgccgacgtgcctacgccgccttctccgtgggccggcgcgagggcctgcacagctccgaccacttccaggcggtgcccttcgacacggagctggtgaacctggacggcgccttcgacctggccgcgggccgcttcctctgcacggtgcccggcgtctacttcctcagcctcaacgtgcacacctggaactacaaggagacctacctgcacatcatgctgaaccggcggcccgcggccgtgctctacgcgcagcccagcgagcgcagcgtcatgcaggcccagagcctgatgctgctgctggcggcgggcgacgccgtctgggtgcgcatgttccagcgcgaccgggacaacgccatctacggcgagcacggagacctctacatcaccttcagcggccacctggtcaagccggccgccgagctgtagccggacagacgtccgcctgtggggactctgggagccccggctggcgcgcccgcctctccacttcgcctcactcctgtcctgg

SEQ ID NO: 112670 - DNA, 1830 bp, Homo sapiens
  Payload ID: 2043
  Gene Symbol: C1QTNF9
  Gene Name: C1q and tumor necrosis factor related protein 9
  Uniprot ID: P0C862
  ENST ID: ENST00000332018
  CDS Start-End: 62-1063
gcacagtatctgggtccagcctgcagccctagggtccagttcagagtctgtcatctgaaccatgaggatctggtggcttctgcttgccattgaaatctgcacagggaacataaactcacaggacacctgcaggcaagggcaccctggaatccctgggaaccccggtcacaatggtctgcctggaagagatggacgagacggagcgaagggtgacaaaggcgatgcaggagaaccaggacgtcctggcagcccggggaaggatgggacgagtggagagaagggagaacgaggagcagatggaaaagttgaagcaaaaggcatcaaaggtgatcaaggctcaagaggatccccaggaaaacatggccccaaggggcttgcagggcccatgggagagaagggcctccgaggagagactgggcctcaggggcagaaggggaataagggtgacgtgggtcccactggtcctgaggggccaaggggcaacattgggcctttgggcccaactggtttaccgggccccatgggccctattggaaagcctggtcccaaaggagaagctggacccacggggccccagggtgagccaggagtccggggaataagaggctggaaaggagatcgaggagagaaagggaaaatcggtgagactctagtcttgccaaaaagtgctttcactgtggggctcacggtgctgagcaagtttccttcttcagatatgcccattaaatttgataagatcctgtataacgaattcaaccattatgatacagcagcggggaaattcacgtgccacattgctggggtctattacttcacctaccacatcactgttttctccagaaatgttcaggtgtctttggtcaaaaatggagtaaaaatactgcacaccaaagatgcttacatgagctctgaggaccaggcctctggcggcattgtcctgcagctgaagctcggggatgaggtgtggctgcaggtgacaggaggagagaggttcaatggcttgtttgctgatgaggacgatgacacaactttcacagggttccttctgttcagcagcccgtgacagaggagagtttaaaaatccgccacaccatccatcagaatcagcttgggatgaacttattcagatggttttactttattaattcctccaattattacaataatcataaaaaggtgaaaatggaaaagttattcccaaaactgattctgtgtaacttactatttttccaggagtaaatatttaaaatagctgcatggtttattctaatttatttcacatttcttattcctattatctgaagaatccctcgtctgtgcgtttcttgtgggaagagtgttttaatatcattttagtgctctgaggagtcatatgaagatgtatccctcatctgtgtttctgaggacattaaggggaaattagagggaaatgtttattcaatttagtactagcaacagctttaagctggtgatgctgtcatactccagaaagctgtagacactgctcattttgtcttttaaaaaaattttattttattttaagttctgggatacatatgcaaaacatgcatgtttgttacataggtaaacatgtgctgtggtggtttgctgtatctatcaacccatcacctaggtattaagccctgcatgcattagctatttgtcctggtgctctccctcccactttgctcattttctaacctaggttttaatcaccattttacccaacaaatcattgttcgatcattatttgccagacttgaatctctatgtgttttctaggactgctctaataaagtacacaaactgggagtctttaaacaacagaaa

SEQ ID NO: 112671 - DNA, 1854 bp, Homo sapiens
  Payload ID: 2043
  Gene Symbol: C1QTNF9
  Gene Name: C1q and tumor necrosis factor related protein 9
  Uniprot ID: P0C862
  ENST ID: ENST00000382071
  CDS Start-End: 86-1087
tgatgtccctagacttctcagtggcaacaactcatccattcaggagctccatgtaaccactggttcagagtctgtcatctgaaccatgaggatctggtggcttctgcttgccattgaaatctgcacagggaacataaactcacaggacacctgcaggcaagggcaccctggaatccctgggaaccccggtcacaatggtctgcctggaagagatggacgagacggagcgaagggtgacaaaggcgatgcaggagaaccaggacgtcctggcagcccggggaaggatgggacgagtggagagaagggagaacgaggagcagatggaaaagttgaagcaaaaggcatcaaaggtgatcaaggctcaagaggatccccaggaaaacatggccccaaggggcttgcagggcccatgggagagaagggcctccgaggagagactgggcctcaggggcagaaggggaataagggtgacgtgggtcccactggtcctgaggggccaaggggcaacattgggcctttgggcccaactggtttaccgggccccatgggccctattggaaagcctggtcccaaaggagaagctggacccacggggccccagggtgagccaggagtccggggaataagaggctggaaaggagatcgaggagagaaagggaaaatcggtgagactctagtcttgccaaaaagtgctttcactgtggggctcacggtgctgagcaagtttccttcttcagatatgcccattaaatttgataagatcctgtataacgaattcaaccattatgatacagcagcggggaaattcacgtgccacattgctggggtctattacttcacctaccacatcactgttttctccagaaatgttcaggtgtctttggtcaaaaatggagtaaaaatactgcacaccaaagatgcttacatgagctctgaggaccaggcctctggcggcattgtcctgcagctgaagctcggggatgaggtgtggctgcaggtgacaggaggagagaggttcaatggcttgtttgctgatgaggacgatgacacaactttcacagggttccttctgttcagcagcccgtgacagaggagagtttaaaaatccgccacaccatccatcagaatcagcttgggatgaacttattcagatggttttactttattaattcctccaattattacaataatcataaaaaggtgaaaatggaaaagttattcccaaaactgattctgtgtaacttactatttttccaggagtaaatatttaaaatagctgcatggtttattctaatttatttcacatttcttattcctattatctgaagaatccctcgtctgtgcgtttcttgtgggaagagtgttttaatatcattttagtgctctgaggagtcatatgaagatgtatccctcatctgtgtttctgaggacattaaggggaaattagagggaaatgtttattcaatttagtactagcaacagctttaagctggtgatgctgtcatactccagaaagctgtagacactgctcattttgtcttttaaaaaaattttattttattttaagttctgggatacatatgcaaaacatgcatgtttgttacataggtaaacatgtgctgtggtggtttgctgtatctatcaacccatcacctaggtattaagccctgcatgcattagctatttgtcctggtgctctccctcccactttgctcattttctaacctaggttttaatcaccattttacccaacaaatcattgttcgatcattatttgccagacttgaatctctatgtgttttctaggactgctctaataaagtacacaaactgggagtctttaaacaacagaaa

SEQ ID NO: 112672 - DNA, 1212 bp, Homo sapiens
  Payload ID: 2044
  Gene Symbol: C1QTNF9B
  Gene Name: C1q and tumor necrosis factor related protein 9B
  Uniprot ID: B2RNN3
  ENST ID: ENST00000382137
  CDS Start-End: 21-1022
ttcagtctgtcatctgaaccatgaggatctggtggcttctgcttgccattgaaatctgcacagggaacataaactcacaggacacctgcaggcaagggcaccctggaatccctgggaaccccggtcacaatggtctgcctggaagagatggacgagacggagcgaagggtgacaaaggcgatgcaggagaaccaggatgtcctggcagcccggggaaggatgggacgagtggagagaagggagaacgaggagcagatggaaaagttgaagcaaaaggcatcaaaggtgatcaaggctcaagaggatccccaggaaaacatggccccaaggggcttgcagggcccatgggagagaaaggcctccgaggagagactgggcctcaggggcagaaggggaataagggtgacgtgggtcccactggtcctgaggggccaaggggcaacattgggcctttgggcccaactggtttaccgggccccatgggccctattggaaagcctggtcccaagggagaagctggacccacggggccccagggtgagccaggagtccggggaataagaggctggaaaggagatcgaggagagaaagggaaaatcggtgagactctagtcttgccaaaaagtgctttcactgtggggctcacggtgctgagcaagtttccttcttcagatgtgcccattaaatttgataagatcctgtataatgaattcaaccattatgatacagcagtggggaaattcacgtgccacattgctggggtctattacttcacctaccacatcactgttttctccaggaatgttcaggtgtctttggtcaaaaacggagtaaaaatactgcacaccagagatgcttacgtgagctctgaggaccaggcctctggcagcattgtcctgcagctgaagctcggggatgagatgtggctgcaggtgacaggaggagagaggttcaatggcttgtttgctgatgaggacgatgacacaactttcacagggttccttctgttcagcagccagtgacagaggagagtttataaatctgccagaccatccatcagaatcagcttgggatgaacttattcagatggttttactttattaattcctccaattattacaataatcataaaaaggtgaaaacggaaaagttattcccaaaactgattctatgtaacttactatttttccaggagtaaatatttaaaatagc

SEQ ID NO: 112673 - DNA, 1063 bp, Homo sapiens
  Payload ID: 2044
  Gene Symbol: C1QTNF9B
  Gene Name: C1q and tumor necrosis factor related protein 9B
  Uniprot ID: B2RNN3
  ENST ID: ENST00000382140
  CDS Start-End: 62-1063
gcgcagtatctgggtccagcctgcagccctcgggtccagttcagtgtctgtcatctgaaccatgaggatctggtggcttctgcttgccattgaaatctgcacagggaacataaactcacaggacacctgcaggcaagggcaccctggaatccctgggaaccccggtcacaatggtctgcctggaagagatggacgagacggagcgaagggtgacaaaggcgatgcaggagaaccaggatgtcctggcagcccggggaaggatgggacgagtggagagaagggagaacgaggagcagatggaaaagttgaagcaaaaggcatcaaaggtgatcaaggctcaagaggatccccaggaaaacatggccccaaggggcttgcagggcccatgggagagaaaggcctccgaggagagactgggcctcaggggcagaaggggaataagggtgacgtgggtcccactggtcctgaggggccaaggggcaacattgggcctttgggcccaactggtttaccgggccccatgggccctattggaaagcctggtcccaagggagaagctggacccacggggccccagggtgagccaggagtccggggaataagaggctggaaaggagatcgaggagagaaagggaaaatcggtgagactctagtcttgccaaaaagtgctttcactgtggggctcacggtgctgagcaagtttccttcttcagatgtgcccattaaatttgataagatcctgtataatgaattcaaccattatgatacagcagtggggaaattcacgtgccacattgctggggtctattacttcacctaccacatcactgttttctccaggaatgttcaggtgtctttggtcaaaaacggagtaaaaatactgcacaccagagatgcttacgtgagctctgaggaccaggcctctggcagcattgtcctgcagctgaagctcggggatgagatgtggctgcaggtgacaggaggagagaggttcaatggcttgtttgctgatgaggacgatgacacaactttcacagggttccttctgttcagcagccagtga

SEQ ID NO: 112674 - DNA, 888 bp, Homo sapiens
  Payload ID: 2044
  Gene Symbol: C1QTNF9B
  Gene Name: C1q and tumor necrosis factor related protein 9B
  ENST ID: ENST00000382145
  CDS Start-End: 211-510
caactacgaacatggacatctgttctagtccttgctttcaattattttgtgtagatgcacagcagtggaattgctggatcagatgcttgaagagtggttccaatcacaagtgttaccttccaaggacaatgtcatcctggtaataaccagcttgctcccctgccctgagtcttctgccaagtctgtccagttcagtctgtcatctgaaccatgaggatctggtggcttctgcttgccattgaaatctgcacagggaacataaactcacaggacacctgcaggcaagggcaccctggaatccctgggaaccccggtcacaatggtctgcctggaagagatggacgagacggagcgaagggtgacaaaggcgatgcaggagaaccaggatgtcctggcagcccggggaaggatgggacgagtggagagaagggagaacgaggagcagatggaaaagttgaagcaaaaggcatcaaaggaatgttcaggtgtctttggtcaaaaacggagtaaaaatactgcacaccagagatgcttacgtgagctctgaggaccaggcctctggcagcattgtcctgcagctgaagctcggggatgagatgtggctgcaggtgacaggaggagagaggttcaatggcttgtttgctgatgaggacgatgacacaactttcacagggttccttctgttcagcagccagtgacagaggagagtttataaatctgccagaccatccatcagaatcagcttgggatgaacttattcagatggttttactttattaattcctccaattattacaataatcataaaaaggtgaaaacggaaaagttattcccaaaactgattctatgtaacttactatttttccaggagtaaatatttaaaatagc

SEQ ID NO: 112675 - DNA, 3424 bp, Homo sapiens
  Payload ID: 2045
  Gene Symbol: C1QTNF3-AMACR
  Gene Name: C1QTNF3-AMACR readthrough (NMD candidate)
  ENST ID: ENST00000382079
  CDS Start-End: 76-930
gtgagtagtgcctcctcccatctctcttgctcctggtctcatcgtgacgggcctggtcctgcctcactttctgccatgactaagagctccctgaggcctctccagaagcagtctccacaaaccggaggactacccccagactgcagtaagtgttgtcatggagactacagctttcgaggctaccaaggcccccctgggccaccgggccctcctggcattccaggaaaccatggaaacaatggcaacaatggagccactggtcatgaaggagccaaaggtgagaagggcgacaaaggtgacctggggcctcgaggggagcgggggcagcatggccccaaaggagagaagggctacccggggattccaccagaacttcagattgcattcatggcttctctggcaacccacttcagcaatcagaacagtgggattatcttcagcagtgttgagaccaacattggaaacttctttgatgtcatgactggtagatttggggccccagtatcaggtgtgtatttcttcaccttcagcatgatgaagcatgaggatgttgaggaagtgtatgtgtaccttatgcacaatggcaacacagtcttcagcatgtacagctatgaaatgaagggcaaatcagatacatccagcaatcatgctgtgctgaagctagccaaaggggatgaggtttggctgcgaatgggcaatggcgctctccatggggaccaccaacgcttctccacctttgcaggattcctgctctttgaaactaagtgtcatggagaaactccagctgggcccagagattctgcagcgggaaaatccaaggcttatttatgccaggctgagtggatttggccagtcaggaagcttctgccggttagctggccacgatatcaactatttggctttgtcaggtggaaggaacagcatatttaagttcttttctgtggaaaactcagaaattgagtctgtgggaagcacctcgaggacagaacatgttggatggtggagcacctttctatacgacttacaggacagcagatggggaattcatggctgttggagcaatagaaccccagttctacgagctgctgatcaaaggacttggactaaagtctgatgaacttcccaatcagatgagcatggatgattggccagaaatgaagaagaagtttgcagatgtatttgcagagaagacgaaggcagagtggtgtcaaatctttgacggcacagatgcctgtgtgactccggttctgacttttgaggaggttgttcatcatgatcacaacaaggaacggggctcgtttatcaccagtgaggagcaggacgtgagcccccgccctgcacctctgctgttaaacaccccagccatcccttctttcaaaagggatcctttcataggagaacacactgaggagatacttgaagaatttggattcagccgcgaagagatttatcagcttaactcagataaaatcattgaaagtaataaggtaaaagctagtctctaacttccaggcccacggctcaagtgaatttgaatactgcatttacagtgtagagtaacacataacattgtatgcatggaaacatggaggaacagtattacagtgtcctaccactctaatcaagaaaagaattacagactctgattctacagtgatgattgaattctaaaaatggttatcattagggcttttgatttataaaactttgggtacttatactaaattatggtagttattctgccttccagtttgcttgatatatttgttgatattaagattcttgacttatattttgaatgggttctagtgaaaaaggaatgatatattcttgaagacatcgatatacatttatttacactcttgattctacaatgtagaaaatgaggaaatgccacaaattgtatggtgataaaagtcacgtgaaacagagtgattggttgcatccaggccttttgtcttggtgttcatgatctccctctaagcacattccaaactttagcaacagttatcacactttgtaatttgcaaagaaaagtttcacctgtattgaatcagaatgccttcaactgaaaaaaacatatccaaaataatgaggaaatgtgttggctcactacgtagagtccagagggacagtcagttttagggttgcctgtatccagtaactcggggcctgtttccccgtgggtctctgggctgtcagctttcctttctccatgtgtttgatttctcctcaggctggtagcaagttctggatcttatacccaacacacagcaacatccagaaataaagatctcaggaccccccagcaagtcgttttgtgtctccttggactgagttaagttacaagcctttcttatacctgtctttgacaaagaagacgggattgtctttacataaaaccagcctgctcctggagcttccctggactcaacttcctaaaggcatgtgaggaaggggtagattccacaatctaatccgggtgccatcagagtagagggagtagagaatggatgttgggtaggccatcaataaggtccattctgcgcagtatctcaactgccgttcaacaatcgcaagaggaaggtggagcaggtttcttcatcttacagttgagaaaacagagactcagaagggcttcttagttcatgtttcccttagcgcctcagtgattttttcatggtggcttaggccaaaagaaatatctaaccattcaatttataaataattaggtccccaacgaattaaatattatgtcctaccaacttattagctgcttgaaaaatataatacacataaataaaaaaatatatttttcatttctatttcattgttaatcacaactacttactaaggagatgtatgcacctattggacactgtgcaacttctcacctggaatgagattggacactgctgccctcattttctgctccatgttggtgtccatatagtacttgattttttatcagatggcctggaaaacccagtctcacaaaaatatgaaattatcagaaggattatagtgcaatcttatgttgaaagaatgaactacctcactagtagttcacgtgatgtctgacagatgttgagtttcattgtgtttgtgtgttcaaatttttaaatattctgagatactcttgtgaggtcactctaatgccctgggtgccttggcacagttttagaaataccagttgaaaatatttgctcaggaatatgcaactaggaaggggcagaatcagaatttaagctttcatattctagccttcagtcttgttcttcaaccatttttaggaactttcccataaggttatgttttccagcccaggcatggaggatcacttgaggccaagagttcgagaccagcctggggaacttggctggacctccgtttctacgaaataaaaataaaaaaattatccagg

SEQ ID NO: 112676 - DNA, 303 bp, Homo sapiens
  Payload ID: 2046
  Gene Symbol:
  Gene Name: C1QTNF9B antisense RNA 1 [Source:EntrezGene
  Acc:542767]
  ENST ID: ENST00000626707
  CDS Start-End: 1-303
atgggcatatctgaagaaggaaacttgctcagcaccgtgagccccacagtgaaagcactttttggcaagactagagtctcaccgattttccctttctctcctcgatctcctttccagcctcttattccccggactcctggctcaccctggggccccgtgggtccagcttctcctttgggaccaggctttccaatagggcccatggggcccggtaaaccagttgggcccaaaggcccaatgttgccccttggcccctcaggaccagtgggacccacgtcacccttattccccttctgcccctga

SEQ ID NO: 112677 - DNA, 5844 bp, Homo sapiens
  Payload ID: 2047
  Gene Symbol: C2CD2
  Gene Name: C2 calcium-dependent domain containing 2
  Uniprot ID: Q9Y426
  ENST ID: ENST00000329623
  CDS Start-End: 207-1832
aagactcaggggctctcttgttggtgaacagtagcaaaatctggagtaactgtgcctggaattttttggccccaagtctaaacaaaggaatagtttccagataagcgctgtttgcataggtggtggtctgtcacgtggtgggccaggctattcagttcttggtcagcgagacgcctgccttgggtgctggatgccggctgtacgacatgcggctctcccctttccatttacagctggagttccacatgaaggagaagagagaggacctccagattagctggtctttcatcagtgtgccggaaatggccgttaatatccagcccaaagcactgggggaggaccaggtggctgagacaagtgcgatgtctgacgttctcaaggacatcttgaagcatttggctggttctgcctctccatcagtggttctgattaccaagcccacgactgtaaaggaagctcagaacttacagtgtgctgcatctactgctcaggaatcctgtcctcctaaacctccaagggctcacgagctgaagctactggtgaggaacatccacgtcttgctgctcagcgagcccggtgcctcaggccacattaatgcagtgtgcgtcgtgcagctgaacgatcctgttcagaggttctccagcaccctgacgaaaaacactccggacctcatgtgggaagaggaattcaccttcgagttgaatgccaagtcgaaggagttacacctgcagatttcagaggctgggcgatcctcagaaggtctgctggcgacggcgacagttcctctggacttatttaagaagcagccttctgggccacagagcttcacgctgaccagcgggtctgcctgcggcagctcggtgctgggctcggtcacggcagagttctcttacatggaacctggtgaattgaaatcctggcccatccctccccctgttcctgctgcaaaaatagaaaaggaccgcacggtgatgccctgtgggactgtggtcactactgtcactgctgtgaagaccaagcctcgcgtcgacgtggggagggcgtccccgctgagctctgattctccggtgaagactcccatcaaggtgaaggtgatcgagaaggacatctctgtccaggccatcgcctgccgcagcgcccccgtcagcaaaacactctcttcttcagacacagaattgttggtgttgaatggttcggatccagtggctgaagtggccattcgacagctcagtgaatcttcaaagctgaaactcaagtcgccacggaagaaaagcactattatcatatcagggatctccaagacctcactatctcaggaccacgacgctgccctgatgcagggctacacggcctctgtggacagcacccaccaggaggacgccccatcccatccggagagggcggcagcctctgccccgccagaggaagccgagtcagcccaggcatcccttgcccccaagccccaggaggacgagctagactcctgggacttggagaaggagccacaggccgcggcatggagcagccaggtcctgctggaccccgacggtgatgagctgtcagagagctccatgagtgtcttggagccgggcactgccaaaaagcataaaggaggaattctaaggaaaggtgcaaagctgttcttccgccggcggcatcaacagaaagacccaggcatgagtcagtcacacaatgaccttgtgttcctggagcagccagagggttcccggaggaaaggcatcaccctcaccaggatcctgaacaagaagctgctctccaggcacagaaacaagaacaccatgaacggtgcccccgtggagccctgcacgtagggcctgaggtcatcacctccaagccagaagacgtgcacccatgttaactaccctcaccaggacgcagccagtgtgtccgccggatgtccagatgccccgcttgtcttgctgggtttcttccaaccatctcgtcatttaaagggaaaacaaaatctgagtctccagccaggaggcttctcccagagaggacaaaaaagcccaacttgccaccagatgctaaatgagacttgacagctgcagagcttgggctgtgctcatagctaagggttagggttcaatattagaaggagattaacattataagtgaaataatatgctctaatagattgtggagggcaggtttgagggacttagtttacctattctacactaacaagtgttgttttgggtccatgcctggaccatgtcacaaaaaggaggtgcccccctgtgctgtcactgtgaatggaaaggatgggtcacctctcttcatctgctgcttggaataaaaaatgcagctggccctgagtacagggaagtggaacataggcaggattttggattaatagagaaattttgataagaatggagacgctacgacagatgtaggaagtcatctacctttgatattagccatagaacttgaacactaactatatcctatgcatagtatgcagaacacttttctaagtttactttgagcctacttgcaagtggaagatatatatattctcacatggtttttacatttttctctatcgtgttaaaagctctaataatgctagtggagcagttgacatccagggttttttttcctgcctgtcatacttgctaaacaagagcacagcgggcctgtcagatgaagtcaggagccatacgtgaccgctcgtagaacacagtaaccaaacacatacatggattttgccaagtgctgccagtagccaaaacaaagtctttttagggcaatagaggaaattattttgtgtctcaggtgtcagtcttaggaatggaagtttaataacaaatgggccaaactcgcaggacattccttctatgagcgcttcagaattttgctgtgaacagtcctcttggacacaggttggggtgcccttgtttgggtttgttttggtggaaaacatcacaaacctggcacaccatttgaatatccctaatatcattccagtcgctttcctcatcagttgcctttctatttcagttcattcacagatctcacttctgaatgtgccacttccagtagacatgctggtcaaagagcagtcatcattggggtgaagtgttcttgacagtttaatatgattcacttttctccaaagacatgtaaaaggctgttacgaaagcttggcttctgtcatggagacggaaatgggcaagcttccttccgtagcctcttgttaatccttaaacattaaatatttcgggggtaatagagccactggtgagtaaaaacctatataaaaaccaaaattataggattttttcttttttagtaaaaaccggtatcaaaaccaaaattataggatttttttcttttttagtaaaaacctatataaaaaccaaaattataggattttttcttttttagtaaaaacctatatgaaaaccaaaattataggatttttttcttttttagtaaaaacctgtataaaaaccaaaattataggatttttttttcttcttttttagagagagagattagaaaacgacattaggaatttcactttaaaatgcgcattacaaacttcttaggtgttccaggaattatcaagtgactttaaaatgacttttccaacctgctttgtttttaaaaattatattccagttttaatcattgtaaaaaaagcacctggagtttcaaaacatgtgaatactaccaagtttctgtccccaaagtcaggcatcactgttagtcttttgggacagatgggacagatgttcactttaatgttttacttgaagttttactgctctttgccatgtggtaaaaagaggctgagacatatttaagaattccaagaggatattatgtgtcagaatttcagacactgatgagaagtttttaattgttcttttttatttgattttggaattcaggtgcactctattcaagtgcaaggatatcagaagtttttttttatttaaaaaatttttttttcgagatggagtttcactctgttgcccaggctggagtgcaatggcagcttactgcaacctccacctcctggttcaagcgattctcctgcctcagcctcccaagtagctgggattacaggcacgcgccaccacacctggctaattctatttagtagaaatggagtctcaccatgttggtcaggctggtctcgaactcctgacctcaggtgatccacccaccttggcctcccagcgtgctgggattataggcatgagccaccaggccggccccaggattttatattaagccttcttgctctcaaaaaaaaaaaaaggttttaactattccatttccagatgaatcccatgagcgctgcttactgttgaataccaaggtctagggctctgcttcctgtagacacgcacacgttgtctccatccaatggccttttctgaagttacagaaaacaccaacatgggagggagtttatgaagcaaaggcaaaggcaacacgtcggctagcttcagggtagcaccgtgagaaatgggctgtattgatactgtgaatgtttgttttccaagctgttttatacaggtttgttttttcatggtgtagggtatttatgacaaagtaaatgttgtgaaggttaaagataaattaagattatccaccaaatgctaaaaatactgatgtgtaaatcacctttatcgcctcacctcttctacaagcttttgtggcttgagggcttttgtttttggcttttgtctggatgaaagttttgcccagttgtgttttaaaaacaattcctcatgaacactaagattaattgtgtctgtatctctggaactgggtgctcatgttggttttaatgagcttgcaacccttccccgtttgctttgtttaaggaggtgcctctgttctttgtggaggagtgaaatggagctttaagtgtgtgtgtgtgttatgtgtgtttgcacacacgcgtgtgttattgtagcaataacaaaaagtagccatctccttgttccagctgaaaacctgctgtgagagttttgacagagcactttattttcgtcaagtttcaagtctgagttcaaaaccagccctgatcccttatgaccaactgctactcgaccagtcgccactcagtggccacctggtgcccgtttagatttttgcttgggttttactggccacctctatagacgagagttgcaaagttgctttgagcagagagggaaagattaatttacactgctggccaccgaaggcaggtgtttcctgggtagtaatctcacggctcttgatctggaaacttcagagtacaaattggtggatggtggaaggcaggacacgtatctctgtctgacggaaaacagacctcggggctggcgtaaaccctgctgccaggccctctccccactgccccaaaccggcctagacacgaagaccaaagcagcctgcacagggcaaggcccccgcggaatcctgcagagcaaactcaggttaacttgggtccatgaccgtttgcattcgaaacacaatacactgcctcgttctctcagttagcagctgggcagcagcgcaccattcatcatttaggcttgtggtttgttgtttactctaccaatgttatgtcgaaactgcattgtaaaaagagaagaaagtggcaggttttccaggtccacggaaaggtttggcctgacgctggagtgcggtgatgaacttacgtgacaatgattgtattcctcagtagcactttaaacgccgaagacagccctgcagcaagcctgcacacgggcttgggtgggttcctttggagaagatgtggctggaacacaaacaatctttgaaagaaataaatgtgcacacagaacacta

SEQ ID NO: 112678 - DNA, 6345 bp, Homo sapiens
  Payload ID: 2047
  Gene Symbol: C2CD2
  Gene Name: C2 calcium-dependent domain containing 2
  Uniprot ID: Q9Y426
  ENST ID: ENST00000380486
  CDS Start-End: 243-2333
gctcgcgcccctgttccgcaggtgtgcggggcttgcgcccagcccgggccgcggccgccgcgcgtttcctccccgcttgcccgcccagaggcccccggccacgctcctcgccgggctccgaccccgccgcgccccctccacgcccccagcgcgctgtggccgcagccagcgcgtgtcctgagtccgccgttccggcccggggctgccggggaagttggggcgaggcgggccggggatgcgccatggccatggcccggctgggctcgtggctcggggaggcgcagtggctcgcgctggtgtcgctcttcgtcgcggccctggccacggtaggcctgtacctggcgcagtgggcgctggccagggcgcgaccccagccccagcggcgggcggtggagcctggagaggggccgcgcccggggtccgacgcgctgctctcctggatcctgacgctgggcagctggaggagccagtggcaggcggcctgggtgaccgccctgaacgaggaggccgagaggaaagggggcccacctttcctgtcctttgaggaggacccgcggcagcaggcactggagctggtggtgcaggaggtctccagcgtgctcaggtcggcggaggagaaggtggtggtctgtcacgtggtgggccaggctattcagttcttggtcagcgagacgcctgccttgggtgctggatgccggctgtacgacatgcggctctcccctttccatttacagctggagttccacatgaaggagaagagagaggacctccagattagctggtctttcatcagtgtgccggaaatggccgttaatatccagcccaaagcactgggggaggaccaggtggctgagacaagtgcgatgtctgacgttctcaaggacatcttgaagcatttggctggttctgcctctccatcagtggttctgattaccaagcccacgactgtaaaggaagctcagaacttacagtgtgctgcatctactgctcaggaatcctgtcctcctaaacctccaagggctcacgagctgaagctactggtgaggaacatccacgtcttgctgctcagcgagcccggtgcctcaggccacattaatgcagtgtgcgtcgtgcagctgaacgatcctgttcagaggttctccagcaccctgacgaaaaacactccggacctcatgtgggaagaggaattcaccttcgagttgaatgccaagtcgaaggagttacacctgcagatttcagaggctgggcgatcctcagaaggtctgctggcgacggcgacagttcctctggacttatttaagaagcagccttctgggccacagagcttcacgctgaccagcgggtctgcctgcggcagctcggtgctgggctcggtcacggcagagttctcttacatggaacctggtgaattgaaatcctggcccatccctccccctgttcctgctgcaaaaatagaaaaggaccgcacggtgatgccctgtgggactgtggtcactactgtcactgctgtgaagaccaagcctcgcgtcgacgtggggagggcgtccccgctgagctctgattctccggtgaagactcccatcaaggtgaaggtgatcgagaaggacatctctgtccaggccatcgcctgccgcagcgcccccgtcagcaaaacactctcttcttcagacacagaattgttggtgttgaatggttcggatccagtggctgaagtggccattcgacagctcagtgaatcttcaaagctgaaactcaagtcgccacggaagaaaagcactattatcatatcagggatctccaagacctcactatctcaggaccacgacgctgccctgatgcagggctacacggcctctgtggacagcacccaccaggaggacgccccatcccatccggagagggcggcagcctctgccccgccagaggaagccgagtcagcccaggcatcccttgcccccaagccccaggaggacgagctagactcctgggacttggagaaggagccacaggccgcggcatggagcagccaggtcctgctggaccccgacggtgatgagctgtcagagagctccatgagtgtcttggagccgggcactgccaaaaagcataaaggaggaattctaaggaaaggtgcaaagctgttcttccgccggcggcatcaacagaaagacccaggcatgagtcagtcacacaatgaccttgtgttcctggagcagccagagggttcccggaggaaaggcatcaccctcaccaggatcctgaacaagaagctgctctccaggcacagaaacaagaacaccatgaacggtgcccccgtggagccctgcacgtagggcctgaggtcatcacctccaagccagaagacgtgcacccatgttaactaccctcaccaggacgcagccagtgtgtccgccggatgtccagatgccccgcttgtcttgctgggtttcttccaaccatctcgtcatttaaagggaaaacaaaatctgagtctccagccaggaggcttctcccagagaggacaaaaaagcccaacttgccaccagatgctaaatgagacttgacagctgcagagcttgggctgtgctcatagctaagggttagggttcaatattagaaggagattaacattataagtgaaataatatgctctaatagattgtggagggcaggtttgagggacttagtttacctattctacactaacaagtgttgttttgggtccatgcctggaccatgtcacaaaaaggaggtgcccccctgtgctgtcactgtgaatggaaaggatgggtcacctctcttcatctgctgcttggaataaaaaatgcagctggccctgagtacagggaagtggaacataggcaggattttggattaatagagaaattttgataagaatggagacgctacgacagatgtaggaagtcatctacctttgatattagccatagaacttgaacactaactatatcctatgcatagtatgcagaacacttttctaagtttactttgagcctacttgcaagtggaagatatatatattctcacatggtttttacatttttctctatcgtgttaaaagctctaataatgctagtggagcagttgacatccagggttttttttcctgcctgtcatacttgctaaacaagagcacagcgggcctgtcagatgaagtcaggagccatacgtgaccgctcgtagaacacagtaaccaaacacatacatggattttgccaagtgctgccagtagccaaaacaaagtctttttagggcaatagaggaaattattttgtgtctcaggtgtcagtcttaggaatggaagtttaataacaaatgggccaaactcgcaggacattccttctatgagcgcttcagaattttgctgtgaacagtcctcttggacacaggttggggtgcccttgtttgggtttgttttggtggaaaacatcacaaacctggcacaccatttgaatatccctaatatcattccagtcgctttcctcatcagttgcctttctatttcagttcattcacagatctcacttctgaatgtgccacttccagtagacatgctggtcaaagagcagtcatcattggggtgaagtgttcttgacagtttaatatgattcacttttctccaaagacatgtaaaaggctgttacgaaagcttggcttctgtcatggagacggaaatgggcaagcttccttccgtagcctcttgttaatccttaaacattaaatatttcgggggtaatagagccactggtgagtaaaaacctatataaaaaccaaaattataggattttttcttttttagtaaaaaccggtatcaaaaccaaaattataggatttttttcttttttagtaaaaacctatataaaaaccaaaattataggattttttcttttttagtaaaaacctatatgaaaaccaaaattataggatttttttcttttttagtaaaaacctgtataaaaaccaaaattataggatttttttttcttcttttttagagagagagattagaaaacgacattaggaatttcactttaaaatgcgcattacaaacttcttaggtgttccaggaattatcaagtgactttaaaatgacttttccaacctgctttgtttttaaaaattatattccagttttaatcattgtaaaaaaagcacctggagtttcaaaacatgtgaatactaccaagtttctgtccccaaagtcaggcatcactgttagtcttttgggacagatgggacagatgttcactttaatgttttacttgaagttttactgctctttgccatgtggtaaaaagaggctgagacatatttaagaattccaagaggatattatgtgtcagaatttcagacactgatgagaagtttttaattgttcttttttatttgattttggaattcaggtgcactctattcaagtgcaaggatatcagaagtttttttttatttaaaaaatttttttttcgagatggagtttcactctgttgcccaggctggagtgcaatggcagcttactgcaacctccacctcctggttcaagcgattctcctgcctcagcctcccaagtagctgggattacaggcacgcgccaccacacctggctaattctatttagtagaaatggagtctcaccatgttggtcaggctggtctcgaactcctgacctcaggtgatccacccaccttggcctcccagcgtgctgggattataggcatgagccaccaggccggccccaggattttatattaagccttcttgctctcaaaaaaaaaaaaaggttttaactattccatttccagatgaatcccatgagcgctgcttactgttgaataccaaggtctagggctctgcttcctgtagacacgcacacgttgtctccatccaatggccttttctgaagttacagaaaacaccaacatgggagggagtttatgaagcaaaggcaaaggcaacacgtcggctagcttcagggtagcaccgtgagaaatgggctgtattgatactgtgaatgtttgttttccaagctgttttatacaggtttgttttttcatggtgtagggtatttatgacaaagtaaatgttgtgaaggttaaagataaattaagattatccaccaaatgctaaaaatactgatgtgtaaatcacctttatcgcctcacctcttctacaagcttttgtggcttgagggcttttgtttttggcttttgtctggatgaaagttttgcccagttgtgttttaaaaacaattcctcatgaacactaagattaattgtgtctgtatctctggaactgggtgctcatgttggttttaatgagcttgcaacccttccccgtttgctttgtttaaggaggtgcctctgttctttgtggaggagtgaaatggagctttaagtgtgtgtgtgtgttatgtgtgtttgcacacacgcgtgtgttattgtagcaataacaaaaagtagccatctccttgttccagctgaaaacctgctgtgagagttttgacagagcactttattttcgtcaagtttcaagtctgagttcaaaaccagccctgatcccttatgaccaactgctactcgaccagtcgccactcagtggccacctggtgcccgtttagatttttgcttgggttttactggccacctctatagacgagagttgcaaagttgctttgagcagagagggaaagattaatttacactgctggccaccgaaggcaggtgtttcctgggtagtaatctcacggctcttgatctggaaacttcagagtacaaattggtggatggtggaaggcaggacacgtatctctgtctgacggaaaacagacctcggggctggcgtaaaccctgctgccaggccctctccccactgccccaaaccggcctagacacgaagaccaaagcagcctgcacagggcaaggcccccgcggaatcctgcagagcaaactcaggttaacttgggtccatgaccgtttgcattcgaaacacaatacactgcctcgttctctcagttagcagctgggcagcagcgcaccattcatcatttaggcttgtggtttgttgtttactctaccaatgttatgtcgaaactgcattgtaaaaagagaagaaagtggcaggttttccaggtccacggaaaggtttggcctgacgctggagtgcggtgatgaacttacgtgacaatgattgtattcctcagtagcactttaaacgccgaagacagccctgcagcaagcctgcacacgggcttgggtgggttcctttggagaagatgtggctggaacacaaacaatctttgaaagaaataaatgtgcacacagaacacta

SEQ ID NO: 112679 - DNA, 4559 bp, Homo sapiens
  Payload ID: 2047
  Gene Symbol: C2CD2
  Gene Name: C2 calcium-dependent domain containing 2
  ENST ID: ENST00000449165
  CDS Start-End: 1-547
aagcactattatcatatcagggatctccaaggaccacgacgctgccctgatgcagggctacacggcctctgtggacagcacccaccaggaggacgccccatcccatccggagagggcggcagcctctgccccgccagaggaagccgagtcagcccaggcatcccttgcccccaagccccaggaggacgagctagactcctgggacttggagaaggagccacaggccgcggcatggagcagccaggtcctgctggaccccgacggtgatgagctgtcagagagctccatgagtgtcttggagccgggcactgccaaaaagcataaaggaggaattctaaggaaaggtgcaaagctgttcttccgccggcggcatcaacagaaagacccaggcatgagtcagtcacacaatgaccttgtgttcctggagcagccagagggttcccggaggaaaggcatcaccctcaccaggatcctgaacaagaagctgctctccaggcacagaaacaagaacaccatgaacggtgcccccgtggagccctgcacgtagggcctgaggtcatcacctccaagccagaagacgtgcacccatgttaactaccctcaccaggacgcagccagtgtgtccgccggatgtccagatgccccgcttgtcttgctgggtttcttccaaccatctcgtcatttaaagggaaaacaaaatctgagtctccagccaggaggcttctcccagagaggacaaaaaagcccaacttgccaccagatgctaaatgagacttgacagctgcagagcttgggctgtgctcatagctaagggttagggttcaatattagaaggagattaacattataagtgaaataatatgctctaatagattgtggagggcaggtttgagggacttagtttacctattctacactaacaagtgttgttttgggtccatgcctggaccatgtcacaaaaaggaggtgcccccctgtgctgtcactgtgaatggaaaggatgggtcacctctcttcatctgctgcttggaataaaaaatgcagctggccctgagtacagggaagtggaacataggcaggattttggattaatagagaaattttgataagaatggagacgctacgacagatgtaggaagtcatctacctttgatattagccatagaacttgaacactaactatatcctatgcatagtatgcagaacacttttctaagtttactttgagcctacttgcaagtggaagatatatatattctcacatggtttttacatttttctctatcgtgttaaaagctctaataatgctagtggagcagttgacatccagggttttttttcctgcctgtcatacttgctaaacaagagcacagcgggcctgtcagatgaagtcaggagccatacgtgaccgctcgtagaacacagtaaccaaacacatacatggattttgccaagtgctgccagtagccaaaacaaagtctttttagggcaatagaggaaattattttgtgtctcaggtgtcagtcttaggaatggaagtttaataacaaatgggccaaactcgcaggacattccttctatgagcgcttcagaattttgctgtgaacagtcctcttggacacaggttggggtgcccttgtttgggtttgttttggtggaaaacatcacaaacctggcacaccatttgaatatccctaatatcattccagtcgctttcctcatcagttgcctttctatttcagttcattcacagatctcacttctgaatgtgccacttccagtagacatgctggtcaaagagcagtcatcattggggtgaagtgttcttgacagtttaatatgattcacttttctccaaagacatgtaaaaggctgttacgaaagcttggcttctgtcatggagacggaaatgggcaagcttccttccgtagcctcttgttaatccttaaacattaaatatttcgggggtaatagagccactggtgagtaaaaacctatataaaaaccaaaattataggattttttcttttttagtaaaaaccggtatcaaaaccaaaattataggatttttttcttttttagtaaaaacctatataaaaaccaaaattataggattttttcttttttagtaaaaacctatatgaaaaccaaaattataggatttttttcttttttagtaaaaacctgtataaaaaccaaaattataggatttttttttcttcttttttagagagagagattagaaaacgacattaggaatttcactttaaaatgcgcattacaaacttcttaggtgttccaggaattatcaagtgactttaaaatgacttttccaacctgctttgtttttaaaaattatattccagttttaatcattgtaaaaaaagcacctggagtttcaaaacatgtgaatactaccaagtttctgtccccaaagtcaggcatcactgttagtcttttgggacagatgggacagatgttcactttaatgttttacttgaagttttactgctctttgccatgtggtaaaaagaggctgagacatatttaagaattccaagaggatattatgtgtcagaatttcagacactgatgagaagtttttaattgttcttttttatttgattttggaattcaggtgcactctattcaagtgcaaggatatcagaagtttttttttatttaaaaaatttttttttcgagatggagtttcactctgttgcccaggctggagtgcaatggcagcttactgcaacctccacctcctggttcaagcgattctcctgcctcagcctcccaagtagctgggattacaggcacgcgccaccacacctggctaattctatttagtagaaatggagtctcaccatgttggtcaggctggtctcgaactcctgacctcaggtgatccacccaccttggcctcccagcgtgctgggattataggcatgagccaccaggccggccccaggattttatattaagccttcttgctctcaaaaaaaaaaaaaggttttaactattccatttccagatgaatcccatgagcgctgcttactgttgaataccaaggtctagggctctgcttcctgtagacacgcacacgttgtctccatccaatggccttttctgaagttacagaaaacaccaacatgggagggagtttatgaagcaaaggcaaaggcaacacgtcggctagcttcagggtagcaccgtgagaaatgggctgtattgatactgtgaatgtttgttttccaagctgttttatacaggtttgttttttcatggtgtagggtatttatgacaaagtaaatgttgtgaaggttaaagataaattaagattatccaccaaatgctaaaaatactgatgtgtaaatcacctttatcgcctcacctcttctacaagcttttgtggcttgagggcttttgtttttggcttttgtctggatgaaagttttgcccagttgtgttttaaaaacaattcctcatgaacactaagattaattgtgtctgtatctctggaactgggtgctcatgttggttttaatgagcttgcaacccttccccgtttgctttgtttaaggaggtgcctctgttctttgtggaggagtgaaatggagctttaagtgtgtgtgtgtgttatgtgtgtttgcacacacgcgtgtgttattgtagcaataacaaaaagtagccatctccttgttccagctgaaaacctgctgtgagagttttgacagagcactttattttcgtcaagtttcaagtctgagttcaaaaccagccctgatcccttatgaccaactgctactcgaccagtcgccactcagtggccacctggtgcccgtttagatttttgcttgggttttactggccacctctatagacgagagttgcaaagttgctttgagcagagagggaaagattaatttacactgctggccaccgaaggcaggtgtttcctgggtagtaatctcacggctcttgatctggaaacttcagagtacaaattggtggatggtggaaggcaggacacgtatctctgtctgacggaaaacagacctcggggctggcgtaaaccctgctgccaggccctctccccactgccccaaaccggcctagacacgaagaccaaagcagcctgcacagggcaaggcccccgcggaatcctgcagagcaaactcaggttaacttgggtccatgaccgtttgcattcgaaacacaatacactgcctcgttctctcagttagcagctgggcagcagcgcaccattcatcatttaggcttgtggtttgttgtttactctaccaatgttatgtcgaaactgcattgtaaaaagagaagaaagtggcaggttttccaggtccacggaaaggtttggcctgacgctggagtgcggtgatgaacttacgtgacaatgattgtattcctcagtagcactttaaacgccgaagacagccctgcagcaagcctgcacacgggcttgggtgggttcctttggagaagatgtggctggaacacaaacaatctttgaaagaaataaatgtgcacacagaacacta

SEQ ID NO: 112680 - DNA, 6283 bp, Homo sapiens
  Payload ID: 2048
  Gene Symbol: C2CD3
  Gene Name: C2 calcium-dependent domain containing 3
  Uniprot ID: Q4AC94
  ENST ID: ENST00000313663
  CDS Start-End: 228-6119
aaagcgtcctgggtattgtagtgtattggagggaaggcgtcttggcgccttctcttcgcaccgttttccggagactgttagaggaagagtcgctttttcctgcctcccaggctgcccagcggcgccggttgccggggaacgcaggcgccgtggggagggatggcgggaggatactgcttaggtgctggagacggagttgagctggtgaagaagagctcgggctcatcatgaaacaacgaaaaggccaagggtctgggggcagccgtgggcgcaaaaaaagaggtttaagtgacatttctccatctacaagcctgccacctctggttgaaggccagctacgctgttttctaaaacttactgttaatagagtcatatggaagattgcaaagcctcccacttgtgtacttgtccgagtgagatggtggggagaaacatcagatggaaccctcttttgtcccagggatgcattgcagactgaaccaaaagctgtgagaacaactacacgttacgctattcgttgtggtccaaaacagtttacctcttatctaacagatatggctgtgctggtgctggaagtaatcaccaaacttgatggtcttccaattggtagagttcagatcaatggactagctcaactttctccaacccatcaaatcaatggattttttaccattgtttcatcaacgtctaagaaacttggagaactccaggtctcacttgccctggaacctctgtcagaaacttacgacagctaccatccacttcctaccactgacatgacagaaaatgtgcttttatctaagcagggattcagagagaatactgaacccagcagtacccagtttcaggttccatcaaggcctcgcgacatacataccatcaaaattgatggaaaagagttagcagccaacagcagtagatcaaccactccgaggggaaaagaccatgtatgctttgcagagaaccctgatacaataaaggattcttcctttggactacagcacagtcttaattcaggacagagtttagagtctgtaactctgaaaggcagagctccacggaagcagatgtcccttctgaacagttctgaattccagcctcaaattagaacagttgccaagagtcacagtgactcatgcattctttcttcaaacaacctccctaccaaggatcttctttcagctctgttagaacaaggcaataaactgcgtaatgccatggtgatttctgcaatgaaatcaagcccagagaccagcatgttgttggaccaagttcatcctcctattaatgaagattctcttagagcatcaacacagatcagagccttttctaggaatcggtttaaagaccacattgaagatcacctcctcccttcaactgagaatacattttggagacatgacacaaaagctgataccagagctatacagctgctattaggcagtgctgaattatcccaaggcaatttctgggatgggctaggctctcctccagattccccatctcctgggagtgatgtgtattgcatcagtgagctgaatgaccctcagtatgaccagagtcttctggagaatttattttatacagcacctaaatctgataccagcatcagtgatttcctcagtgaagaggatgatatcgtcccttctaaaaaaataagccagtcaacagctcttgccagatcatctaaggttctggagtcaagtgatcataagctgaagaagaggtcagcaggcaagagaaatagaaatttggttgaacaacagatgctctcagaaactccagaagatgcccaaacgatgacactaagtgtggatagactggcccttttgggtagaacacattcagtcagaatcatcatcgaaaccatgggagttcctccagatagtcctcagatgacccctggcaaaaaaagctatgctggtccaccacctaaggtgactacagcaaaaaagcgcactttctttgtagaatatcactttcctgtgggcttttcggaaagcggattgggaaagacagctttgatcactgaggttgttcgactcgcctccagtaaaattacagatggaaaggtgaagttccagcagcgatttgtgtttccagtacagtttggtggcccaatgatagagcactggtggaattccaacctcactttccaaatttatgtaaagaaaactccacagaaaaagccagaagtcattggatctgtgtcactttctttgcgagctgtcattcaatcagagctgctttctttcagtgatcagcttccagtgcaacaagaaaatggtcagtctccatttggccccctcaaggtaaccatggagcttattacagataacaaagatttcactggtatcaatactaagttaagtggcaacacccattataccccactttgtgctcctacaagtccaaataaggcactaccagaacttaaccaagatatgacctgtaccaaaaatccacaaaacttaaaccaaattcatgaggaaactgcaaagaaagcacagaacttggtgctccccaaccgaaagtcaccaagccctgtagcaccacatccttcaaccttcgtagctacgccagcctcccataatttagtcaatcagacaaatgggacaacaaaagagagtgctttgctgttgcatgtgctgttgatggtgccagatgggaaagattttattagtggagaatctgagaaacaatcaccatgcaatgtttatttaaattgtaaactcttcagcacagaggaagtcaccagatctgtcatcgcatggggcacaacacaaccggtctttaacttttctcaggtgattcctgtctctctgtcttccaaatacctggaaaggcttaagaacaatgtgatggtaattgaaacttggaataaggtgcggagcccaggacaggacaagctgctcgggctggtgaaacttcccctccaccagttttacatgtcattcaaagatgctaagatttctcgcctgctgctggatgcccagtacccagttgttgctgtcgacagctacatgcctgtgattgatgtgttttcaggccaccaaaatgggagtcttcgagtctttttagctatgggttcttcaaatcaaataatggcactacaaagattaaagaatgaagaaggaacactccctcccttcagccctaggccagcccatttcctggaccagccaactgcagcatctgttgctatggcagaggaccgaggaaatggactgatggagcactgctttgagatccatatagagatggttaaagggctagcccctcttcaggcaacagtctggggagaagcagattgttatgtccagtactactttccagttcaacactctcaatccagtgtgctgaaaggacctgagttccttgaaaatggaattactctgaagcccttcagaactgcaaccacactctgtgttccagatcccatctttaatagtgaacaccatcactctctcctgttgccagctgaggttccagtgcaaaggctcctactaagtgctttctctgcacagggcctcgtgcctggaggtggagtccagtttgaaatctggtgcagatactattatcctaatgtgagagaccagaaggtcgccaaaggaaccttgccattatcaaggatctgtgctatggtaaccacccagcatcgtgaggatgtgggaatacagacctttaatctccctttaacccccaggattgagaacaggaaagaattgaggaaccagtcatcaggtttactggatgtgggcctaaggtacaggcgtagtccaagaacagcagagggagttcttgctgcccgaactgtttccatctcagtccagattatcagagcctgtggtctgcaagcagcagccaaggctttggctgaacgggaacccgctctacagtttagtgccacagtcggggtcaatgcctctgtcaccactcatctctccttcctgccccagggagaacagcgccgaacccaccctgtggcctgttctttctgccctgagttctcccatcacgttgagttcacatgtaacttggtgactcagcactgtagtggagaggcctgtttcctagcagagttgttggagtttgcagaagttatttttgctgtctatcatgaaaataccaagtcagcaagtgatataatcagtattgagtcatgcaaagagtatctgcttggagtagtaaaagttccaacaaaagagctgctgatcaagagatctgggatcacaggatggtatcctatcattttaccagaagacgggggcctacctcatggcctggagctcatgcagaagatcgtgggtggtctggagctttcgatttccttcacgcatcgtggagatagagaacgggtgttggaagctgctgagcatttgggctggagctttgagaacagcctgaaagattttgtcagaatggatgaaggggagccagccactgtcaccatctccaccccaaggctgtggctgcccatccattgtgtgctgcttgctggccacaaccacattcataagaatacatattgctaccttcgctacaagttctatgatcatgaagccttttggacccctctcaagaagcctaaggaatctgtaaacaaaaagcagattatggtcactttcaaggcatccaaaagagcagaagtcaccaggggcccatcactgctttggtacttcagggaggagaggctagagatccaagtgtggcgagcttatggcaatgacagtgtggagagaccccatcagacagacagctggattggctcagcctatgtggacctggccagacttggggagaggtcagcgaggacgctaactgtcagtggtgtgtatcctctgtttggacgaaatgcttccaacctctcaggagctgccttgcgagttcatgtggttctttcctctctttcctcacaccttgagcccactcatgagctggactccatggactgcagcagccacagtgagtctgagcagctccccagaaggaatgatgaggtccagctctctccaccagaagtcatctcctgccaccagaagtctcctgcctccacccaggtcccctgcagcagcaccacagctgaagtccgcctgacgcaggagggccctgctgatttggatggaacgtttgcagtcagcatcctagtagaaagagcaatgcacttgagcttgaaagggagccccttgacagagcggaaagtatcgatacccagttgttgtgtatcctttgcaacagccgatgagtcatctcctgtatacacccaagtggttgaaaacacagattcccccatctggaattttcaacagcagtcaaggctatcaaaagagctgcttctggacccacaacaaaccctggtcttcaaagtttggcataaaggagatgaggagagggtgattggctttgcctcggtggacctctccccacttctctctggcttccagtttgtctgtggctggtacaacatcacagacttcagtggagagtgccaggggcagataaaagttgctgtctcccctttggagagtttgatacacttcaaagaagaaaggcaagcaaggcgtggagtggagacctcaaaatcactgatcccaatatacagtcccttttccttccctgcctctgatacgtatgctgcattctccagccacatggcaaggcagaccctagaccaacttgctcatgcctcctcaaaggagcttgatttctcctctcctgggagaagtgataccacaagaagccaagcatcacgccatgaagagcatgtgcagaacattcgccggtttcatgaatccctgcatcttcagggagaggcacccttgccatgtgatgacaaactgaccacatcacctttgtcctcccaaacctccattctgacttctctcaggaagaatctgagtgagcttgatcagattcagaggtacttccgccagaagctcaccaagcctttcctacccctcagccctcagactcaaacggccatctcacagcaccaggagagctgtagggaccatcttgggccaggtgccagcagcctagaccctgggagccagtgtatcctggagaaatccagtaacctggtgttgcaagtcagctccttaatcacaggtagttactgaagtaactggaagcatgaacatgcccaccaggactcccagctcccaacgattcctgagcatgagcagatagtctctgaaagcatttccacagatgtatccacaactatagattagattctggtcctctgatattagaataaagtactaaaaattgtaccgccttg

SEQ ID NO: 112681 - DNA, 7960 bp, Homo sapiens
  Payload ID: 2048
  Gene Symbol: C2CD3
  Gene Name: C2 calcium-dependent domain containing 3
  Uniprot ID: Q4AC94
  ENST ID: ENST00000334126
  CDS Start-End: 228-7289
aaagcgtcctgggtattgtagtgtattggagggaaggcgtcttggcgccttctcttcgcaccgttttccggagactgttagaggaagagtcgctttttcctgcctcccaggctgcccagcggcgccggttgccggggaacgcaggcgccgtggggagggatggcgggaggatactgcttaggtgctggagacggagttgagctggtgaagaagagctcgggctcatcatgaaacaacgaaaaggccaagggtctgggggcagccgtgggcgcaaaaaaagaggtttaagtgacatttctccatctacaagcctgccacctctggttgaaggccagctacgctgttttctaaaacttactgttaatagagtcatatggaagattgcaaagcctcccacttgtgtacttgtccgagtgagatggtggggagaaacatcagatggaaccctcttttgtcccagggatgcattgcagactgaaccaaaagctgtgagaacaactacacgttacgctattcgttgtggtccaaaacagtttacctcttatctaacagatatggctgtgctggtgctggaagtaatcaccaaacttgatggtcttccaattggtagagttcagatcaatggactagctcaactttctccaacccatcaaatcaatggattttttaccattgtttcatcaacgtctaagaaacttggagaactccaggtctcacttgccctggaacctctgtcagaaacttacgacagctaccatccacttcctaccactgacatgacagaaaatgtgcttttatctaagcagggattcagagagaatactgaacccagcagtacccagtttcaggttccatcaaggcctcgcgacatacataccatcaaaattgatggaaaagagttagcagccaacagcagtagatcaaccactccgaggggaaaagaccatgtatgctttgcagagaaccctgatacaataaaggattcttcctttggactacagcacagtcttaattcaggacagagtttagagtctgtaactctgaaaggcagagctccacggaagcagatgtcccttctgaacagttctgaattccagcctcaaattagaacagttgccaagagtcacagtgactcatgcattctttcttcaaacaacctccctaccaaggatcttctttcagctctgttagaacaaggcaataaactgcgtaatgccatggtgatttctgcaatgaaatcaagcccagagaccagcatgttgttggaccaagttcatcctcctattaatgaagattctcttagagcatcaacacagatcagagccttttctaggaatcggtttaaagaccacattgaagatcacctcctcccttcaactgagaatacattttggagacatgacacaaaagctgataccagagctatacagctgctattaggcagtgctgaattatcccaaggcaatttctgggatgggctaggctctcctccagattccccatctcctgggagtgatgtgtattgcatcagtgagctgaatgaccctcagtatgaccagagtcttctggagaatttattttatacagcacctaaatctgataccagcatcagtgatttcctcagtgaagaggatgatatcgtcccttctaaaaaaataagccagtcaacagctcttgccagatcatctaaggttctggagtcaagtgatcataagctgaagaagaggtcagcaggcaagagaaatagaaatttggttgaacaacagatgctctcagaaactccagaagatgcccaaacgatgacactaagtgtggatagactggcccttttgggtagaacacattcagtcagaatcatcatcgaaaccatgggagttcctccagatagtcctcagatgacccctggcaaaaaaagctatgctggtccaccacctaaggtgactacagcaaaaaagcgcactttctttgtagaatatcactttcctgtgggcttttcggaaagcggattgggaaagacagctttgatcactgaggttgttcgactcgcctccagtaaaattacagatggaaaggtgaagttccagcagcgatttgtgtttccagtacagtttggtggcccaatgatagagcactggtggaattccaacctcactttccaaatttatgtaaagaaaactccacagaaaaagccagaagtcattggatctgtgtcactttctttgcgagctgtcattcaatcagagctgctttctttcagtgatcagcttccagtgcaacaagaaaatggtcagtctccatttggccccctcaaggtaaccatggagcttattacagataacaaagatttcactggtatcaatactaagttaagtggcaacacccattataccccactttgtgctcctacaagtccaaataaggcactaccagaacttaaccaagatatgacctgtaccaaaaatccacaaaacttaaaccaaattcatgaggaaactgcaaagaaagcacagaacttggtgctccccaaccgaaagtcaccaagccctgtagcaccacatccttcaaccttcgtagctacgccagcctcccataatttagtcaatcagacaaatgggacaacaaaagagagtgctttgctgttgcatgtgctgttgatggtgccagatgggaaagattttattagtggagaatctgagaaacaatcaccatgcaatgtttatttaaattgtaaactcttcagcacagaggaagtcaccagatctgtcatcgcatggggcacaacacaaccggtctttaacttttctcaggtgattcctgtctctctgtcttccaaatacctggaaaggcttaagaacaatgtgatggtaattgaaacttggaataaggtgcggagcccaggacaggacaagctgctcgggctggtgaaacttcccctccaccagttttacatgtcattcaaagatgctaagatttctcgcctgctgctggatgcccagtacccagttgttgctgtcgacagctacatgcctgtgattgatgtgttttcaggccaccaaaatgggagtcttcgagtctttttagctatgggttcttcaaatcaaataatggcactacaaagattaaagaatgaagaaggaacactccctcccttcagccctaggccagcccatttcctggaccagccaactgcagcatctgttgctatggcagaggaccgaggaaatggactgatggagcactgctttgagatccatatagagatggttaaagggctagcccctcttcaggcaacagtctggggagaagcagattgttatgtccagtactactttccagttcaacactctcaatccagtgtgctgaaaggacctgagttccttgaaaatggaattactctgaagcccttcagaactgcaaccacactctgtgttccagatcccatctttaatagtgaacaccatcactctctcctgttgccagctgaggttccagtgcaaaggctcctactaagtgctttctctgcacagggcctcgtgcctggaggtggagtccagtttgaaatctggtgcagatactattatcctaatgtgagagaccagaaggtcgccaaaggaaccttgccattatcaaggatctgtgctatggtaaccacccagcatcgtgaggatgtgggaatacagacctttaatctccctttaacccccaggattgagaacaggaaagaattgaggaaccagtcatcaggtttactggatgtgggcctaaggtacaggcgtagtccaagaacagcagagggagttcttgctgcccgaactgtttccatctcagtccagattatcagagcctgtggtctgcaagcagcagccaaggctttggctgaacgggaacccgctctacagtttagtgccacagtcggggtcaatgcctctgtcaccactcatctctccttcctgccccagggagaacagcgccgaacccaccctgtggcctgttctttctgccctgagttctcccatcacgttgagttcacatgtaacttggtgactcagcactgtagtggagaggcctgtttcctagcagagttgttggagtttgcagaagttatttttgctgtctatcatgaaaataccaagtcagcaagtgatataatcagtattgagtcatgcaaagagtatctgcttggagtagtaaaagttccaacaaaagagctgctgatcaagagatctgggatcacaggatggtatcctatcattttaccagaagacgggggcctacctcatggcctggagctcatgcagaagatcgtgggtggtctggagctttcgatttccttcacgcatcgtggagatagagaacgggtgttggaagctgctgagcatttgggctggagctttgagaacagcctgaaagattttgtcagaatggatgaaggggagccagccactgtcaccatctccaccccaaggctgtggctgcccatccattgtgtgctgcttgctggccacaaccacattcataagaatacatattgctaccttcgctacaagttctatgatcatgaagccttttggacccctctcaagaagcctaaggaatctgtaaacaaaaagcagattatggtcactttcaaggcatccaaaagagcagaagtcaccaggggcccatcactgctttggtacttcagggaggagaggctagagatccaagtgtggcgagcttatggcaatgacagtgtggagagaccccatcagacagacagctggattggctcagcctatgtggacctggccagacttggggagaggtcagcgaggacgctaactgtcagtggtgtgtatcctctgtttggacgaaatgcttccaacctctcaggagctgccttgcgagttcatgtggttctttcctctctttcctcacaccttgagcccactcatgagctggactccatggactgcagcagccacagtgagtctgagcagctccccagaaggaatgatgaggtccagctctctccaccagaagtcatctcctgccaccagaagtctcctgcctccacccaggtcccctgcagcagcaccacagctgaagtccgcctgacgcaggagggccctgctgatttggatggaacgtttgcagtcagcatcctagtagaaagagcaatgcacttgagcttgaaagggagccccttgacagagcggaaagtatcgatacccagttgttgtgtatcctttgcaacagccgatgagtcatctcctgtatacacccaagtggttgaaaacacagattcccccatctggaattttcaacagcagtcaaggctatcaaaagagctgcttctggacccacaacaaaccctggtcttcaaagtttggcataaaggagatgaggagagggtgattggctttgcctcggtggacctctccccacttctctctggcttccagtttgtctgtggctggtacaacatcacagacttcagtggagagtgccaggggcagataaaagttgctgtctcccctttggagagtttgatacacttcaaagaagaaaggcaagcaaggcgtggagtggagacctcaaaatcactgatcccaatatacagtcccttttccttccctgcctctgatacgtatgctgcattctccagccacatggcaaggcagaccctagaccaacttgctcatgcctcctcaaaggagcttgatttctcctctcctgggagaagtgataccacaagaagccaagcatcacgccatgaagagcatgtgcagaacattcgccggtttcatgaatccctgcatcttcagggagaggcacccttgccatgtgatgacaaactgaccacatcacctttgtcctcccaaacctccattctgacttctctcaggaagaatctgagtgagcttgatcagattcagaggtacttccgccagaagctcaccaagcctttcctacccctcagccctcagactcaaacggccatctcacagcaccaggagagctgtagggaccatcttgggccaggtgccagcagcctagaccctgggagccagtgtatcctggagaaatccagtaacctggtgttgcaagtcagctccttaatcacagatctgcagactatcaccagggattcgcaagcagctttgagttctcaccgagccaggagtagaagcaacaaggccaccaccctcccagatgctcaggacacagaagcactgcaagaacgatgcacaatgccagatgagccattggtaagagctccagataaaggcacagattccccatcaccccctcctctcgaagagacttcaaatggaggaagaatgctccatgagtccctgaggcatgcagtacccattacaaggatgcagagcagtgaagacactgaggcaggcccagcctacagtgatgaggactatgaagaagacatcattgagcccaggaccttaaatgagatcaccacggtgacagacaaaactagcccttggtctagtgtcatatcagacacaagtgaggtcatcagccctcagcctgacgaggtgcagagggaaggcccctcttgtccttctccagggcctttctgcagagaggagcttatggtcaaaagtagctttctctccagcccagaaagggctgtcaacccccacctgcctaggcagggttctcctagccaaagtcttgttgcttgtgagtgtgaggcctctaaggccagggttggtggcgagtctgcctcagccaaccctcagcccatcccatgcccaacactctcaggagctcaacagagcagcacgtttgttggatggagctcaccacagacagatcagaacaaggagcccaagtcagaggccccagctgagaatgaagctgccaccagtgagctcggtgactctgctgatagcttcaagaagttgccgctaaatctagcctcccagagcagaagggaaaaccataagggaccacccatcgactcctctgacatcaggcagaggcaggtgacaactggatcagagacgtccacaaagcagagcctcctgctcccagggcccattgtggtgcccaacttctttttgcctccccagcagttggaggcttccctgcggatgctttcactctcagcaactttgccaccagcagccacaacagatcaggacaagagcgaagccaccaggggagctctctcccaaaggccttgtcgccccagacctaactcgctccccctcaacctgcctgaggaagaaactctcaggattgcacggatattttcttctcagtactcccagaaagactgacgcagcctgaggggctggggggaaggagacacctgcccaccctccgtcagctttgtccagcttgcaggaggcaccaggtctggctccttcagggctgtcacagtcctgaaaccaccacttgcctaggccacggatgcctcaagagacccggtcagcccagactggaggagtgccccaaaccagtccagtgtccacttgccagaatttcagctccttttttctgtggtgaggcaaaggctagaaataaaatggaatccgcgcccaagtgggacccaagcaggcatctttcggtggagaaacgccccccagtgtccttgacacagctgactgctggcatgagcccaccctctgcctgaagatgcaggaccatttttgccttaaaagttggggaggagggacatgtagattgtgtgcattgtgcatagtcaaggaaatcctagggccacctccagttcatttgtgtgggaacaaggatattttatagatacaaattatttttatgctgtgttgaattaatcaattaggagaggaaggggaaatcacttccttcaaactttttatctgattgtctaaaattctaaccatgcttttaacttattatttttacccagctctgaaggtcattgttcttgcctgtgtttgaataaaatcatattggtgtttgtaatctg

SEQ ID NO: 112682 - DNA, 2431 bp, Homo sapiens
  Payload ID: 2048
  Gene Symbol: C2CD3
  Gene Name: C2 calcium-dependent domain containing 3
  ENST ID: ENST00000414160
  CDS Start-End: 1-2331
gctgcccgaactgtttccatctcagtccagattatcagagcctgtggtctgcaagcagcagccaaggctttggctgaacgggaacccgctctacagtttagtgccacagtcggggtcaatgcctctgtcaccactcatctctccttcctgccccagggagaacagcgccgaacccaccctgtggcctgttctttctgccctgagttctcccatcacgttgagttcacatgtaacttggtgactcagcactgtagtggagaggcctgtttcctagcagagttgttggagtttgcagaagttatttttgctgtctatcatgaaaataccaagtcagcaagtgatataatcagtattgagtcatgcaaagagtatctgcttggagtagtaaaagttccaacaaaagagctgctgatcaagagatctgggatcacaggatggtatcctatcattttaccagaagacgggggcctacctcatggcctggagctcatgcagaagatcgtgggtggtctggagctttcgatttccttcacgcatcgtggagatagagaacgggtgttggaagctgctgagcatttgggctggagctttgagaacagcctgaaagattttgtcagaatggatgaaggggagccagccactgtcaccatctccaccccaaggctgtggctgcccatccattgtgtgctgcttgctggccacaaccacattcataagaatacatattgctaccttcgctacaagttctatgatcatgaagccttttggacccctctcaagaagcctaaggaatctgtaaacaaaaagcagattatggtcactttcaaggcatccaaaagagcagaagtcaccaggggcccatcactgctttggtacttcagggaggagaggctagagatccaagtgtggcgagcttatggcaatgacagtgtggagagaccccatcagacagacagctggattggctcagcctatgtggacctggccagacttggggagaggtcagcgaggacgctaactgtcagtggtgtgtatcctctgtttggacgaaatgcttccaacctctcaggagctgccttgcgagttcatgtggttctttcctctctttcctcacaccttgagcccactcatgagctggactccatggactgcagcagccacagtgagtctgagcagctccccagaaggaatgatgaggtccagctctctccaccagaagtcatctcctgccaccagaagtctcctgcctccacccaggtcccctgcagcagcaccacagctgaagtccgcctgacgcaggagggccctgctgatttggatggaacgtttgcagtcagcatcctagtagaaagagcaatgcacttgagcttgaaagggagccccttgacagagcggaaagtatcgatacccagttgttgtgtatcctttgcaacagccgatgagtcatctcctgtatacacccaagtggttgaaaacacagattcccccatctggaattttcaacagcagtcaaggctatcaaaagagctgcttctggacccacaacaaaccctggtcttcaaagtttggcataaaggagatgaggagagggtgattggctttgcctcggtggacctctccccacttctctctggcttccagtttgtctgtggctggtacaacatcacagacttcagtggagagtgccaggggcagataaaagttgctgtctcccctttggagagtttgatacacttcaaagaagaaaggcaagcaaggcgtggagtggagacctcaaaatcactgatcccaatatacagtcccttttccttccctgcctctgatacgtatgctgcattctccagccacatggcaaggcagaccctagaccaacttgctcatgcctcctcaaaggagcttgatttctcctctcctgggagaagtgataccacaagaagccaagcatcacgccatgaagagcatgtgcagaacattcgccggtttcatgaatccctgcatcttcagggagaggcacccttgccatgtgatgacaaactgaccacatcacctttgtcctcccaaacctccattctgacttctctcaggaagaatctgagtgagcttgatcagattcagaggtacttccgccagaagctcaccaagcctttcctacccctcagccctcagactcaaacggccatctcacagcaccaggagagctgtagggaccatcttgggccaggtgccagcagcctagaccctgggagccagtgtatcctggagaaatccagtaacctggtgttgcaagtcagctccttaatcacaggactcccagctcccaacgattcctgagcatgagcagatagtctctgaaagcatttccacagatgtatccacaactatagattagattctggtcctctgatattagaataaagtactaaaaattgta

SEQ ID NO: 112683 - DNA, 3951 bp, Homo sapiens
  Payload ID: 2048
  Gene Symbol: C2CD3
  Gene Name: C2 calcium-dependent domain containing 3
  ENST ID: ENST00000442398
  CDS Start-End: 1-2034
ggagaacagcgccgaacccaccctgtggcctgttctttctgccctgagttctcccatcacgttgagttcacatgtaacttggtgactcagcactgtagtggagaggcctgtttcctagcagagttgttggagtttgcagaagttatttttgctgtctatcatgaaaataccaagtcagcaagtgatataatcagtattgagtcatgcaaagagtatctgcttggagtagtaaaagttccaacaaaagagctgctgatcaagagatctgggatcacaggatggtatcctatcattttaccagaagacgggggcctacctcatggcctggagctcatgcagaagatcgtgggtggtctggagctttcgatttccttcacgcatcgtggagatagagaacgggtgttggaagctgctgagcatttgggctggagctttgagaacagcctgaaagattttgtcagaatggatgaaggggagccagccactgtcaccatctccaccccaaggctgtggctgcccatccattgtgtgctgcttgctggccacaaccacattcataagaatacatattgctaccttcgctacaagttctatgatcatgaagccttttggacccctctcaagaagcctaaggaatctgtaaacaaaaagcagattatggtcactttcaaggcatccaaaagagcagaagtcaccaggggcccatcactgctttggtacttcagggaggagaggctagagatccaagtgtggcgagcttatggcaatgacagtgtggagagaccccatcagacagacagctggattggctcagcctatgtggacctggccagacttggggagaggtcagcgaggacgctaactgtcagtggtgtgtatcctctgtttggacgaaatgcttccaacctctcaggagctgccttgcgagttcatgtggttctttcctctctttcctcacaccttgagcccactcatgagctggactccatggactgcagcagccacagtgagtctgagcagctccccagaaggaatgatgaggtccagctctctccaccagaagtcatctcctgccaccagaagtctcctgcctccacccaggtcccctgcagcagcaccacagctgaagtccgcctgacgcaggagggccctgctgatttggatggaacgtttgcagtcagcatcctagtagaaagagcaatgcacttgagcttgaaagggagccccttgacagagcggaaagtatcgatacccagttgttgtgtatcctttgcaacagccgatgagtcatctcctgtatacacccaagtggttgaaaacacagattcccccatctggaattttcaacagcagtcaaggctatcaaaagagctgcttctggacccacaacaaaccctggtcttcaaagtttggcataaaggagatgaggagagggtgattggctttgcctcggtggacctctccccacttctctctggcttccagtttgtctgtggctggtacaacatcacagacttcagtggagagtgccaggggcagataaaagttgctgtctcccctttggagagtttgatacacttcaaagaagaaaggcaagcaaggcgtggagtggagacctcaaaatcactgatcccaatatacagtcccttttccttccctgcctctgatacgtatgctgcattctccagccacatggcaaggcagaccctagaccaacttgctcatgcctcctcaaaggagcttgatttctcctctcctgggagaagtgataccacaagaagccaagcatcacgccatgaagagcatgtgcagaacattcgccggtttcatgaatccctgcatcttcagggagaggcacccttgccatgtgatgacaaactgaccacatcacctttgtcctcccaaacctccattctgacttctctcagaagctcaccaagcctttcctacccctcagccctcagactcaaacggccatctcacagcaccaggagagctgtagggaccatcttgggccaggtgccagcagcctagaccctgggagccagtgtatcctggagaaatccagtaacctggtgttgcaagtcagctccttaatcacagatctgcagactatcaccagggattcgcaagcagctttgagttctcaccgagccaggagtagaagcaacaaggccaccaccctcccagatgctcaggacacagaagcactgcaagaacgatgcacaatgccagatgagccattggtaagagctccagataaaggcacagattccccatcaccccctcctctcgaagagacttcaaatggaggaagaatgctccatgagtccctgaggcatgcagtacccattacaaggatgcagagcagtgaagacactgaggcaggcccagcctacagtgatgaggactatgaagaagacatcattgagcccaggaccttaaatgagatcaccacggtgacagacaaaactagcccttggtctagtgtcatatcagacacaagtgaggtcatcagccctcagcctgacgaggtgcagagggaaggcccctcttgtccttctccagggcctttctgcagagaggagcttatggtcaaaagtagctttctctccagcccagaaagggctgtcaacccccacctgcctaggcagggttctcctagccaaagtcttgttgcttgtgagtgtgaggcctctaaggccagggttggtggcgagtctgcctcagccaaccctcagcccatcccatgcccaacactctcaggagctcaacagagcagcacgtttgttggatggagctcaccacagacagatcagaacaaggagcccaagtcagaggccccagctgagaatgaagctgccaccagtgagctcggtgactctgctgatagcttcaagaagttgccgctaaatctagcctcccagagcagaagggaaaaccataagggaccacccatcgactcctctgacatcaggcagaggcaggtgacaactggatcagagacgtccacaaagcagagcctcctgctcccagggcccattgtggtgcccaacttctttttgcctccccagcagttggaggcttccctgcggatgctttcactctcagcaactttgccaccagcagccacaacagatcaggacaagagcgaagccaccaggggagctctctcccaaaggccttgtcgccccagacctaactcgctccccctcaacctgcctgaggaagaaactctcaggattgcacggatattttcttctcagtactcccagaaagactgacgcagcctgaggggctggggggaaggagacacctgcccaccctccgtcagctttgtccagcttgcaggaggcaccaggtctggctccttcagggctgtcacagtcctgaaaccaccacttgcctaggccacggatgcctcaagagacccggtcagcccagactggaggagtgccccaaaccagtccagtgtccacttgccagaatttcagctccttttttctgtggtgaggcaaaggctagaaataaaatggaatccgcgcccaagtgggacccaagcaggcatctttcggtggagaaacgccccccagtgtccttgacacagctgactgctggcatgagcccaccctctgcctgaagatgcaggaccatttttgccttaaaagttggggaggagggacatgtagattgtgtgcattgtgcatagtcaaggaaatcctagggccacctccagttcatttgtgtgggaacaaggatattttatagatacaaattatttttatgctgtgttgaattaatcaattaggagaggaaggggaaatcacttccttcaaactttttatctgattgtctaaaattctaaccatgcttttaacttattatttttacccagctctgaaggtcattgttcttgcctgtgtttgaataaaatcatattggtgtttgtaa

SEQ ID NO: 112684 - DNA, 574 bp, Homo sapiens
  Payload ID: 2048
  Gene Symbol: C2CD3
  Gene Name: C2 calcium-dependent domain containing 3
  ENST ID: ENST00000535954
  CDS Start-End: 1-574
tacaaaggaagctgggtaacagagtatgagaactccgcagactcccggctgggaacccgacgactttcaccggaaggaggagcgctcttcagggcaatgcaccctgcgcaatggagtccacaaagggcgcatccctatgcgcttgcgcagctggaggcgccccccagccaaccccggagaggtttaagtgacatttctccatctacaagcctgccacctctggttgaaggccagctacgctgttttctaaaacttactgttaatagagtcatatggaagattgcaaagcctcccacttgtgtacttgtccgagtgagatggtggggagaaacatcagatggaaccctcttttgtcccagggatgcattgcagactgaaccaaaagctgtgagaacaactacacgttacgctattcgttgtggtccaaaacagtttacctcttatctaacagatatggctgtgctggtgctggaagtaatcaccaaacttgatggtcttccaattggtagagttcagatcaatggactagctcaactttctccaacccatcaaatcaatggattttttaccattg

SEQ ID NO: 112685 - DNA, 863 bp, Homo sapiens
  Payload ID: 2048
  Gene Symbol: C2CD3
  Gene Name: C2 calcium-dependent domain containing 3
  ENST ID: ENST00000538361
  CDS Start-End: 1-514
tttgatacacttcaaagaagaaaggcaagcaaggcgtggagtggagacctcaaaatcactgatcccaatatacagtcccttttccttccctgcctctgatacgtatgctgcattctccagccacatggcaaggcagaccctagaccaacttgctcatgcctcctcaaaggagcttgatttctcctctcctgggagaagtgataccacaagaagccaagcatcacgccatgaagagcatgtgcagaacattcgccggtttcatgaatccctgcatcttcagggagaggcacccttgccatgtgatgacaaactgaccacatcacctttgtcctcccaaacctccattctgacttctctcagccctcagactcaaacggccatctcacagcaccaggagagctgtagggaccatcttgggccaggtgccagcagcctagaccctgggagccagtgtatcctggagaaatccagtaacctggtgttgcaagtcagctccttaatcacagatacctaacctgttggtatccatggcctcagataaatgctctgtgtttgacttccacttgcttggatattttcagtcaagtgtttattgagcaccatctgtgccaggcactattctgttatttgtcccaggaagatacagtggtggatatgacaggcattatctcccttcatcaagcttatattctatagtcaaccaaagaaaaatcctctcacaaagaaagtatgacagcaaaacagatgaaggcttgtttggagtagaggtggaaacaaataggggaatctttctaaaggggcatattaaaagaggagagagaagggaattgtggccaggcacggtggctcacacctgtaatccc

SEQ ID NO: 112686 - DNA, 2722 bp, Homo sapiens
  Payload ID: 2048
  Gene Symbol: C2CD3
  Gene Name: C2 calcium-dependent domain containing 3
  ENST ID: ENST00000539061
  CDS Start-End: 193-1713
ggcgtcttggcgccttctcttcgcaccgttttccggagactgttagaggaagagtcgctttttcctgcctcccaggctgcccagcggcgccggttgccggggaacgcaggcgccgtggggagggatggcgggaggatactgcttaggtgctggagacggagttgagctggtgaagaagagctcgggctcatcatgaaacaacgaaaaggccaagggtctgggggcagccgtgggcgcaaaaaaagaggtttaagtgacatttctccatctacaagcctgccacctctggttgaaggccagctacgctgttttctaaaacttactgttaatagagtcatatggaagattgcaaagcctcccacttgtgtacttgtccgagtgagatggtggggagaaacatcagatggaaccctcttttgtcccagggatgcattgcagactgaaccaaaagctgtgagaacaactacacgttacgctattcgttgtggtccaaaacagtttacctcttatctaacagatatggctgtgctggtgctggaagtaatcaccaaacttgatggtcttccaattggtagagttcagatcaatggactagctcaactttctccaacccatcaaatcaatggattttttaccattgtttcatcaacgtctaagaaacttggagaactccaggtctcacttgccctggaacctctgtcagaaacttacgacagctaccatccacttcctaccactgacatgacagaaaatgtgcttttatctaagcagggattcagagagaatactgaacccagcagtacccagtttcaggttccatcaaggcctcgcgacatacataccatcaaaattgatggaaaagagttagcagccaacagcagtagatcaaccactccgaggggaaaagaccatgtatgctttgcagagaaccctgatacaataaaggattcttcctttggactacagcacagtcttaattcaggacagagtttagagtctgtaactctgaaaggcagagctccacggaagcagatgtcccttctgaacagttctgaattccagcctcaaattagaacagttgccaagagtcacagtgactcatgcattctttcttcaaacaacctccctaccaaggatcttctttcagctctgttagaacaaggcaataaactgcgtaatgccatggtgatttctgcaatgaaatcaagcccagagaccagcatgttgttggaccaagttcatcctcctattaatgaagattctcttagagcatcaacacagatcagagccttttctaggaatcggtttaaagaccacattgaagatcacctcctcccttcaactgagaatacattttggagacatgacacaaaagctgataccagagctatacagctgctattaggcagcctcggcctcacgaggtgccgggattgcagacggagtctcgttcacgcagtgctcaatggtgcccaggctggagtgcagtggcgtgatatcggctcgctacaacctccacctcccagccgcctgccttggcctcccaaagtgccgagattgcagcctctgcccggccgccaccccgtctgggaagtgaggagcgtctctgcctggccgcccatcgtctgggatgtgaggatcccctctgcctggctgcccagtctggaaagtgaggagcgtctctgcccgcccgccatcccatctaggaagtgaggagcgcctcttcccggccgccatcccatctaggaagtgaggagtgtctctgcccggccacccatcgtctgagatgtggggagcgcctctgccccgccgccccgtctgggatgtgaggagcgcctctgcccggccgcgaccccgtctgggaggtgaggaccgtctctgcccagccgccccgtctgagaaatgaggagacctctgcccggcagccaccccatctgagaagtgaggagcccctccgcccagcagccgccccgtctgagaagtgaggagcccctccgcccagcagccaccccgtctgggaagtgaggagcgtctccgcccggcagccaccccgtcccggagggaggtgaggggtcagctccccgcccggccagccgccccgtccgggaggtgaggggcgcctctgcccggccgcccctactgggaagtgaggagcccctctgcccggccaccaccctgtctgggaggtgtacccaacagctcattgagaacgggccatgatgacaatggcggttttgtggaataggaaagggggaaaggtggggaaaagattgagaaatcggatggttgctgtgtctgtgtagaaagaagtagacatgggagacttttcattttgttctgtactacgaaaaattcttctgccttgggatcctgttgatctatgaccttatccccaaccctgtgctctctgaaacatgtgctgtgtccactcagggttgaatggattaagggcggtgcaagatgtgctttgttaaacagatgcttgaaggcagcatgctcgttaagagtcatcaccactccctaatctcaagtacccagggacacaaacactgcggaaggccgcagggtcctctgcctaggaaaaccagagacctttgttcacttgtttatctgctgaccttccctccactattgtcctatgaccctgccaaatccccctctgcgagaaacacccaagaatgatcaataaaaaataaataaataaataaataaataaaatgta

SEQ ID NO: 112687 - DNA, 3445 bp, Homo sapiens
  Payload ID: 2049
  Gene Symbol: C2CD4A
  Gene Name: C2 calcium-dependent domain containing 4A
  Uniprot ID: Q8NCU7
  ENST ID: ENST00000355522
  CDS Start-End: 142-1251
actggtgctgaaccccgccgcgcgcgctttgaatttcccagccgctaagcgcctctcctggtcggtgtcccaggcagaaaggtgcagagacccatctgacgcaggactccaggtagacaagctccagcagagagtggccagatgtggtgcctggagcgactccgcttgggtcctgagtgccttcggcggagcggagactggcttctcccgggtcgggcccgcggagccaagtctcgcaccaccgccgcgtgcgcaaatgtgctcactccggaccgcatccctgagttctgcatcccgccacggctcatgccccgcctggccttggctgcgctccggaattcttgggtcgaagaagcagggatggacgagggcgccggccgcacagactgggacccgcgctcgcaggccgcgctgtcactgccgcacctgccccgtgtgcgcaccgcctacggcttctgcgcgctgctcgagagcccgcacacgcgccgcaaggagtcgctcctgctcgggggcccgcccgcgccccggccccgggcccacacctacggcggcggcggcggcccggacgccctcctggggaccctgcgcgtcccgcgagctccgggcccggcgacccccgcggcccccggctgtccccgcccgccccaggacgcgctcgcccggcggccccgcggctgccgcctcctgcgcgtccccgacgggctgctgagtcgcgcgctgcgggctgggaggagtcgccgcctgacccgcgtccgctccgtctccagcgggaacgaggacaaggagcgccgcgcgggctcccagtccccggcccgggccccctccacgagcccgccgtcgtcccgggtcccgtttcccgagcgcctggaggccgagggcaccgtggctctgggccgcgccggcgacgccctgcgcctggccgccgagtactgtccgggaaccgggcggctccgcctccggctgctccgcgccgagagcccggccggaggcgcccccgggccccgagccgtcagctgtcgcctcagcctcgtcctgcggccgccgggcaccgcgcttcggcaatgcagcactgtggtggggcgcagccgcaaggcctcctttgaccaggacttctgcttcgacggcctctcggaggacgaagtgcgccgcctggccgttcgagtcaaggcccgggacgagggccgcggccgggagcggggccgcctgctgggccagggtgagctgtccctgggcgccctcctgctgctctgagggcccagccctccccggggcgctctgcccgggggactccggacactgacagccgcgtggtacaaaataaacgtgtatttgttgttcttatcagtcccgtttcagtacaacactggcagagatgattctagattaactatcccagtaaaagatatgatattttccatagatacctccagaatttttttcagcaaatggaatggttctacagtgtttcccaatatagacagccatttgcataccatatgtaccacacacgcctaggaaataatgaatcacatgaagtgttagaactagaaagtgtcttggcgatctgtttgctccaatcacctcattttaaaattggtgctttccacaacatgcatggagaccatcttggagcatttacttttgaagcattttgtttaagaccccggataagaaaatgagggcaaaagaggtgaagtgacttgtccaagatcaacagtgaattattagttggaacgccagcctgatactcctagctatatctcactggaaaagcattggagaaaatgaaaccattttaatattctaagcttaaataatagttataataggctaggtgtggcggctcacgcctgtaatcctggcactttgggaggccgaggcgggcagatggcttgagcccaggaatttgagaccaggctgggcaacatgggaagaccgcgtctccataaaaaatacaaaatttagccggacgtggtggcacgcacctgtagttccagctactctggggctgaggcgcaaggatcacttgagcctgggaggtcaaggctgcagtgagccgagatcgtgccactgcactccaacctgggcaaccggagtgagaccctgtctgcaaataataataataataataaatagttttacaagcgttaatttatgttttaacccccaaaaggaggcactgctatgcccattttacagatgaggatattgaggcacagaataaagagcagagccagaatttgaacctagacaatcagcatttcactcattactcttatgtaggtaataccacagtgtctaaagggctcgctattaaagttgcgagtattgtgcaacttctctctgaaactgttgacactgaagttcgtgtctacttgtattcctcatcctgcttttggtgaaaaaacaaattgcttgaaatgaataatttattatctcatgctaataacttcaggcattgagatgagctgatgggtctaaagctctgaggaggaagctaaccggcctcagaatcatagaaatgggtgccagccttgttgtaaccaggtgagtttatctgctggaacaggcagtggagagtgtacagatagcatggttttacctctggcttctgataataattccagatttaacaatcctgttttagaggacgattttccctcatcccttgaattcactgccagcagggcatttttttcttttttttatgcaaataggaaaatgcatcctaaatgagggtttaaaaaattgaaaatatttaaatatacaggatggtgttaaatatgactccattatcaatctggattcagaaatggtttctgctttattttatttcattttatcttttagaaacaaggcgtcactctgtcacccaggctggagtgcagtggtgtgatcatagctcactgcagcctctacctcctgacacaagctgtcatcccgctttggcttctcaaagtgctaggattataggcgtgagccaccatgcccgaccagtttctgcttttattaaaattgttcacagttttatacattcatgttcattaaaaatgctatttagaaaagagtttgataaaataaatattatacaaaattcgaagaaaaaagaaaagagtttctgtttcagtcacaaattagggttattgtgatgtgtatttatgatgaccattgaacaaatgtgaagaatactgtgaattctatgactttatcaaaatcagccacatccaggagcttgcagttgttgaccaaatgaatgatgacatagagtagttcagatctatcatgtgctcttctatctaatcagtcaatatttccttggccctcaagccaacattcattttttatgtataaccttcttcatgattttgaaattttgatagggtaactgctaatgagttcacaaatgtagcactttaaaaggaaaataaatggagagtgaaaacaa

SEQ ID NO: 112688 - DNA, 1579 bp, Homo sapiens
  Payload ID: 2050
  Gene Symbol: C2CD4B
  Gene Name: C2 calcium-dependent domain containing 4B
  Uniprot ID: A6NLJ0
  ENST ID: ENST00000380392
  CDS Start-End: 130-1224
agtactgaaggtggcgcctcggcagcgggctagaggccactggcactgagcttgcaaccagatccagagacactgaagaagagagaaaggcgcacctcttcccgccactcctagccccagcctccaaggatgcggctcctcgagaaactctgttcctcggccgcaggcagctccgcgccgaagcccgccttcgccaaagtgctcacgccgaatcgcatccccgaattctgcatcccgccgcggctgccggccccttgcacgctcgagtctccaatccgggccgccgccgtgccccggcgctgcgccgctgaaagcgacctgtggccccgcgcggcagacgaggacgccggccgcacggactgggacccgcgctcgcaggcagcgctgtcactgccgcacctgccccgtgtgcgcaccacctacggcttctgcgcgctgctcgagagcccgcacacgcgccgcaaggagtcgctcctgctcgggggcccgcccgcgccccggccccgggcccacagctgcggcggcggcggaggcccggacgcccccctggggaccctgtgcggcccgcgaggtccgggcccggccacccccgcggcccccggcggtccccgcctgccccaggacgcgctcgctgcggggccccgccgctgccgcctcctgcgcgtccccgacgggctgctgagtcgcgcgctgcgggctggaaggagtcgccgcctggcccgcgtccgctccgtctccagcgggaacgaggacgaggagcgccgcgcgggatccgagtccccggcccgggccccctcctcgagcccgctgtcatccagggccccgcttcctgagcgcctggaggccaagggcaccgtggctctgggccgcgccggcgacgccctgcgcctggctgctgagtactgtccgggaacccggcgtctccgcctccggctgctccgcgcggagagcctgttcggaggcgcccccgggccccgcgccgtccgctgccgcctcagcctcgtcctgcggccgccgggcactgcgcgttggcaatgcagcgctgtggtggggcgcagccgcaaggcctcctttgaccaggacttttgcttcgacggcctctcggaagacgaggtgcgccgcctggccgttcgcgtcaaggcccgggatgagggtcgcggccgggatcggggccgcctgctgggccagggtgagctgtccctgggcgccctcctgctgctctgagggcccagccctccccggggcgctctgccctggagactccggacactgacagccgcgtggtacagaataaacgttatttatttttttatttatgatactgctttattgacgttttacttcctcaccatccacatttgtcatcgtctattggtaaagaagaaaaagataatgactccctgttctgttcacaggacccccatatctctttccagaccatttttgcattccaaggaaaaatgggttggcttgggactgggagagaaaggaagtacacccatctgcattgtttttaattccttccggttttctatcaatgttacagtttttttttaataaagcaagttattcattcaga

SEQ ID NO: 112689 - DNA, 3129 bp, Homo sapiens
  Payload ID: 2051
  Gene Symbol: C2CD4C
  Gene Name: C2 calcium-dependent domain containing 4C
  Uniprot ID: Q8TF44
  ENST ID: ENST00000332235
  CDS Start-End: 206-1471
gcggtttcccgccgcgggtgaatgagtccgactgcgctgccgccgccgccgccgcccgcatcgaagctccggccgcgtcccccgcgccagccccgggagcctgcgcgccgagacccctgcgtgtctgcgaacagacctccggcctcgggccatcaccccgggcagacgctgcagcccctgtccgggcctcttgcctgccgcccccatgagaaaaaccaacatgtggttcttggagcggcttcgggggtctggggaaaacggtgctgcccggggcgtggggagtgaggcgggggacaaggcctccaaggggcccctgtacagcaatgtgttgacgcccgacaagatccccgactttttcatcccccccaagctgccctcgggccccgcggagggcgagggacaggccgcgctgggcccctccacgtcggaacagaacctggcctctgcggccccccgccagaccccacggagcccccggctgcctgccaagctggcagccgagagcaagagcctgctgaaggcagccacccggcacgtgatccagatcgagagtgccgaggactggctgtccgaggaggccactgacgccgacccccaggcccagggtgccatgtccctgccctcggtgcccaaggcccagacgtcctacggcttcgccatgctggctgagagcccccacacgaggcgcaaggagtctctgttccacagtgagcacggggctctggcccaggtgggctccccaggggccgggcgccgccgggcagctgccaaggccaacgggggtgatgggggccccagggaggctggcggggccctcatgagccccggccgctacttcagtggcggggagagcgacacagggtcctcggccgagtcctcccccttcgggtcccctctgctgtcccgctccgtgtctctgctcaaaggtttcgcccaggacagccaggccaaggtgagccagctccggcactccgtgggccgccacggctccctgtctgcggacgacagcaccccggacgccagccccgggagccggcgccgcctgacccgccgggcacccccggaacctggccccgagtcgggccaggcgcgtggggagcacacggtccacgtgggccctcggggcagcgtgcggctgctggccgagtacgaggccggccaggcccgcctgcgggtgcacctgctggccgccgagggcctctacgaccgcctgtgcgacgcccgcagcatcaactgctgcgtgggcctgtgcctggtgccgggcaagctgcagaagcagcgcagcaccatcgtgaagaacagccgccgccccgtcttcaacgaggatttcttcttcgacggcctggggcccgccagcgtccggaaactggccctcaggatcaaggtggtgaacaagggcagcagcctcaagcgggacacgctgctcggggagaaggagctgcccctgacctccctgctccccttcctgtagagcggggacctgctcgctgtccgctcgggtgcagagggcagaccccggtctctcctccacaccgggtgctggcgggcgggtccgctggcttgggctggggctggccggggaggggctcacactcaggctgggctgggcgctgatgctgtagctgacgcagggtttcctgggtcacccgatgctgactggagtattatttttcatgaattaatttctcctttggaggaggaggaggaggaggagaggggcctcgggggaagagaaggggccacttcgcggggcagagggtccccctttgcccctccacactgcctcgcgcctttcacgcagagttctagaaggaggttctcaggggttcaggaatccgtgcatgtggccagggcggggccgtggacagggaggtgacaagtcttggagcccacagtctccttcactgcacgtgtgtcttcctcccccacagcctgccgccatccagttcccaccccgcggagagcagggcctcgcggccacaccaggcccaggctctgcccgggacgccccctcccaggggtcaggcttggctctgggagaccccagcttcccaggctccggtggggagtggggccaggcgagggtgccctgacgagggtgggcgcggagggagcagccgctgccacagtcggagcagaggaggtcttggcagaggtccgcggggaggagacggctctcctggcctgttttcctccaacactgtcgccgctggctttttgggtacaggcccgtctggccatttctgctgtggcgccggagggtcttgctcagagatgcccagagagcagccctatggcccatccgtcctcgctgggggctgccaccccgtcgcccttttgtccagcgtctgcagctgggagcgacacgcagtgattgacggccgtggctttgacgccacgtgtgtaaataggctgtggctacggtgggtgggtcggagcccaggaggcagctggggggacctggctatggcctttcctgctgttaggtggctgcaaggcttccattgtgtggttatgtgggtccttgaatgattttggggaggtttccagctcagaatgatgcagaaatgataagactcaaagcaggggccaggccaggccagtgccttcgcctctcccggctgctggtgggcacggaggaaccagggcacatctgtggtacccagggacgtcccttgtcagcccgtttgccacacattgttcctcttgtccaggggagggtggaggagctgcttcccaggactggaggagcagctgggcccctgctgcacgtccggtgggacacacctgtgagccctccagagggagagtgcaggccccttctgagcctggtgttgcagggctccgctctctcccggaagccagggcacccagggcggaggctcctcaggccggggaggcggggagggtgccctgcatggagagagacgccggcgctccccgccttctctgatgctcacccctcccaggccctgttctccctggggtcccccgtttagtagcccccctgcactctttgatatcttagtgtctgaggttgactgtgggtaaatctttaagacactccccagctgtgtttgtttataaatgctgtttatagtgcaataaaggtgtttcgggaatacgggg

SEQ ID NO: 112690 - DNA, 1757 bp, Homo sapiens
  Payload ID: 2052
  Gene Symbol: C2CD4D
  Gene Name: C2 calcium-dependent domain containing 4D
  Uniprot ID: B7Z1M9
  ENST ID: ENST00000454109
  CDS Start-End: 587-1648
agaataatgcagacaactgatcactgcaagtcactctgccttggagctattggaatggctccagaacagggcactgggggccaaggcaggatttcaaccaggagggttttacagaagatggacttcacctgtgagggctggggttggaaccgagcaccaaagaagtggccactgtccactgatggccgtctccctcttctctgtagccctcccccacccctaagcagcccagcttcagcagaggaggcctgggcacaggaatggattgttgctagaaacctggcttcagctggaggaagtcagaagaccgggctgatggccgcgcagacagagctgtgtttatccaggaaaagagccccccagactgcgccgccctttctttttctgctcaaataggggtccgcgctcccagtgggtccggagaccggggcgcggtggctgaccgcccggtgtacgccagcatcactcacctctgactcctctgcgctcctcgcccagccccgctccgccgagcactcccatctgagacgggatttggaccctctcggccctgcggaattcggaattccattaccccacccaccgcatgtggctcttggaaaaagctggctataaggtgggggccgcggagcctgcggcccgttgggcgccttccggcctgttctccaagcgtcgcgccccgggcccgcccacaagcgcctgccccaacgtcctcaccccggatcgcatcccgcagttcttcatcccgcctcggctcccggacccgggcggcgcagtgcccgcggcccggcggcacgtggcggggcgcggcctccccgcgacctgctcgctgcctcacctggcgggccgcgaaggctgggccttcctgcccgagagcccgcacacgcgccggcgggaatccctgttccacgggccgccacctgccccggccgggggactccccgcggcgcagtcccggctgcacgtctccgccccggacctgcgcctctgccgggcccccgacagcgacacggcctcgtcgccggactcgtcgcccttcggctccccgcggccaggcctgggccggcgccgggtgtccaggcctcactctctgtccccagaaaaagcgagctcggccgataccagcccgcactcgccgcgccgcgccgggccgcccacgccgccgctcttccacctggacttcctgtgctgccagctgcggcccacgcgcgagagcgtgctgcgcctggggccccgcggcgggcagctgcggctctccaccgaatatcaggccgggcccgggcggctgcggctgcgcctagtgagcgccgagggcctgccccggccgcggtcccgccccgggagcggcggcggcggctgctgtgtggtgctgaggctgcggccccgcgtccggccgcgggagcagcagagccgcgtggtcaagtgcagcgccaaccccatcttcaacgaggatttctttttcgacgggctcggccccccggacctggccgcccgcagcctgagagccaaggtgctagacaggggcgcgggacttcgcagggatgtgctgctgggggagtgcgagacgcccctcattgcgctgctgcccccgctgggtgggggactaggtcccgggtcatccctggcgcccacccatctcagcctgtagcctgagcccctggcttcctcaggacgtctccactgtgtctgcagtccacattctttccaccctgcccggcttgtatttatttttgctaataaaatgtccccttgtcctt

SEQ ID NO: 112691 - DNA, 4436 bp, Homo sapiens
  Payload ID: 2053
  Gene Symbol: C2CD5
  Gene Name: C2 calcium-dependent domain containing 5
  Uniprot ID: Q86YS7
  ENST ID: ENST00000333957
  CDS Start-End: 257-3259
gaacgatcgatgctttcttccgcgccccgagagccgccatttttgagagcgggggaggagagacaagcaggggcggcagaggctcaacgggatgctgactgggttttgcttttcgtcccagccttgtggggccgggacggaagaacccatcaaagcccttcctcccgccgcctctccggaatgaggtctcagcacccgcgcgggacagcacccttcctcctgcgacagagcccaagaagaggccgaaaccgagaccatgccagggaagctgaaggtgaaaatcgtggccgggcgccatttgccagtgatggaccgtgctagtgacctgactgatgccttcgtggaggtaaaatttggtaataccacctttaaaacagatgtgtaccttaagtcactcaaccctcagtggaactcggagtggtttaaatttgaggtggatgatgaagacttacaagatgaacctttacagatcacagttcttgaccatgatacttacagtgcaaatgatgccattggtaaagtgtacattgatattgatcctttactgtatagtgaagctgcaacagtcatctcaggatggtttccaatttatgacaccatacatggtatccgtggggaaatcaatgtagttgtcaaagtagacctcttcaatgatttaaatcgatttaggcagtcatcatgtggagtcaaattcttttgcacaacgtctattccaaaatgctatagagctgtgataattcatggatttgtagaagaacttgtggtcaatgaagacccagaatatcagtggattgatcgaattcgcacaccaagggcatcaaatgaggccagacagagactcatttcgttaatgtcaggtgagctgcagaggaagattggcttgaaagtacttgaaatgagaggaaatgcagttgtggggtacttacagtgtttcgatctggagggcgagtctgggttagtggtgcgagccataggaacggcgtgtactctggataaattaagtagcccagcagcattccttcctgcatgtaattccccatccaaagaaatgaaggagattcccttcaatgaagatcccaatcccaatactcactcatcaggaccctcaacccctctgaaaaaccaaacttattccttttcaccttccaagtcctacagtcgacagtcctcttcttctgacacagatttgagtttgacacccaaaactggaatgggaagtggtagtgctggaaaagaaggggggccctttaaagctcttttaagacaacagactcaatcagcgttggaacagagggaatttccattttttaccttgacggcatttcctcctggattccttgtacacgttgggggtgtagttagtgcacgttctgtgaagcttttggatcgtatccacaatcctgatgaaccagaaactcgagatgcatggtgggcagaaatcagacaagaaataaaatcacatgctaaagcattaggctgtcatgctgtagtgggctacagtgaatcaactagcatctgtgaagaggtctgcattttatctgcatctggcacagcggctgtactgaatcctagatttctgcaggatggcaccgtggaaggctgtttggaacagaggcttgaagaaaatttgcctacacgttgtggattttgtcatataccatatgatgaactgaatatgccatttccagctcatctcacatattgctataactgcaggaaacaaaaagttcctgatgttctgtttacaactatagacctcccaacagatgcaacagttattggaaaaggttgtcttattcaagcaaggttatgtcgcttaaaaaagaaagcacaggcagaagcaaatgctacagctatcagtaatctcttgccatttatggaatatgaagtgcatactcagctaatgaataaactaaaactcaaaggaatgaatgctttgtttggactaagaattcagatcacagtgggtgaaaatatgttgatgggcttagcgtctgccacaggtgtgtatttagcagctttaccaactcctggtggtattcagattgctgggaagactcctaatgatggctcatatgaacaacacatctctcatatgcagaagaagataaatgacacaattgctaaaaacaaagagttatatgaaatcaatcctccagagatatctgaagagattataggatcacccatcccagaacctaggcaacgctcaagacttctaagatctcaatcagaaagctcggatgaagttacagaattagacctttcacatgggaaaaaagatgcttttgttttggagattgatgacacagatgccatggaagatgtccattctctacttactgatgttcctcctccttcaggcttttatagttgtaatacagaaattatgcccggtataaataattggacctctgaaatacagatgttcacttcagtaagagtaatcagattaagcagcctcaacctgactaatcaagctctcaataagaactttaatgatctctgtgaaaatttgctcaagagcctgtactttaaactacgatctatgatcccctgctgcctttgccatgtaaattttacagtatctctgcctgaagatgaattaattcaggttacagtcacggcagtcgcaatcacttttgacaaaaatcaggctttacaaaccacaaaaacccctgttgaaaagtcattgcaaagagcctcaacagataatgaagaacttttacaatttccactggaactgtgttcagattcacttccttctcatccttttccaccagctaaagccatgacagttgaaaaagcaagtccagtgggtgatggaaatttccggaatcgttctgctccaccttgtgcaaattccacagttggggttgttaagatgacacctctttcttttattcctggagcaaaaataactaagtatcttgggataattaacatgttttttattcgagagactacttctcttcgggaggaaggaggagtcagtggttttctccatgcttttattgctgaagtgtttgcaatggtgagagctcatgttgctgcattaggagggaatgctgttgtctcctacataatgaagcagtgtgtcttcatggagaatccaaataaaaaccaggcacagtgtcttataaatgtaagtggtgatgcagtggtttttgttcgtgaatctgacttagaagtggtgtcatctcagcaacctactaccaactgccagtcatcatgtactgaaggcgaagttacaacctgaggaaaattaggaaaaaagagctcaactaaatgaaattcatcaatctctgttattttgtcattaattatcttcttagacttaaaattgaacttgagataaataaggaagaattgagtagatttgatttgcctggagtcttttggaggcatgagaattttctaatcttgacattttgtttgcctgttctagacaggccctgtggggtcttgacccttcagtaagttaagataaatttttaaaagaaccgtagcaaagatggaacctttgtaatttatgttgattttaataaaatcataatttaaaaaatgaaatgggaagattgtcaggaaattaggatagctactctagtataatttagaaaaactaagcaagagattctccagttgctagtgagtaagcactctgatttgagaaatgtgtggggacaatggagaaaagttttcagaaaactgctatgtagatttctgaatgtgttgtattttgctgaggaattcggtaacaactgaaagggaaaagtgcttcagccatcttttgaaaacaagttaaaattctggaacttgtatctgtaatacatcctaactcttgtaaaagaaaataatttatcatagctggtgtcctttcattgaaagttgtaatactgtctctaaggagggaggaaaagattattatataattttataactggcaacatttgagttagtattgactttgtctaaaagaggcttgacttcaactgggataaaaatgtcagtgaattttgttaaagtagtaaaaatgcagttgacttagtaggaacataaaattatttcctaataagataatattgcactcctaccaaataaacaggattttagtaatatctgagggattgttgatggtgagttagactgtatttggcatagaatttggaaatgtaacttgaatgtaaatatgctgcaaaatgttgaatgtatacatagaaagactttttctgtcgacgccaaatgcccgttgtaaatgaaccttaaatattacattcctcctttgcacaataatatttctttataacacttatgattttttcccccaggacaacaaactgcccttaagagtcatttccttgttatcacaggtgtcaatatttttctgtattttgtttataattttattttttaaataaaaagtgtataaaaataaa

SEQ ID NO: 112692 - DNA, 3463 bp, Homo sapiens
  Payload ID: 2053
  Gene Symbol: C2CD5
  Gene Name: C2 calcium-dependent domain containing 5
  Uniprot ID: Q86YS7
  ENST ID: ENST00000396028
  CDS Start-End: 120-3248
cggaagaacccatcaaagcccttcctcccgccgcctctccggaatgaggtctcagcacccgcgcgggacagcacccttcctcctgcgacagagcccaagaagaggccgaaaccgagaccatgccagggaagctgaaggtgaaaatcgtggccgggcgccatttgccagtgatggaccgtgctagtgacctgactgatgccttcgtggaggtaaaatttggtaataccacctttaaaacagatgtgtaccttaagtcactcaaccctcagtggaactcggagtggtttaaatttgaggtggatgatgaagacttacaagatgaacctttacagatcacagttcttgaccatgatacttacagtgcaaatgatgccattggtaaagtgtacattgatattgatcctttactgtatagtgaagctgcaacagtcatctcaggatggtttccaatttatgacaccatacatggtatccgtggggaaatcaatgtagttgtcaaagtagacctcttcaatgatttaaatcgatttaggcagtcatcatgtggagtcaaattcttttgcacaacgtctattccaaaatgctatagagctgtgataattcatggatttgtagaagaacttgtggtcaatgaagacccagaatatcagtggattgatcgaattcgcacaccaagggcatcaaatgaggccagacagagactcatttcgttaatgtcaggtgagctgcagaggaagattggcttgaaagtacttgaaatgagaggaaatgcagttgtggggtacttacagtgtttcgatctggagggcgagtctgggttagtggtgcgagccataggaacggcgtgtactctggataaattaagtagcccagcagcattccttcctgcatgtaattccccatccaaagaaatgaaggagtctccgctggttcatcctccaagccatggatgccgctcgactcacaacagcccaattcacactgctactggctcacgacttactcagaacttctctgtgtctgttcccactctcatctatactggaatgggaagtggtagtgctggaaaagaaggggggccctttaaagctcttttaagacaacagactcaatcagcgttggaacagagggaatttccattttttaccttgacggcatttcctcctggattccttgtacacgttgggggtgtagttagtgcacgttctgtgaagcttttggatcgtatccacaatcctgatgaaccagaaactcgagatgcatggtgggcagaaatcagacaagaaataaaatcacatgctaaagcattaggctgtcatgctgtagtgggctacagtgaatcaactagcatctgtgaagaggtctgcattttatctgcatctggcacagcggctgtactgaatcctagatttctgcaggatggcaccgtggaaggctgtttggaacagaggcttgaagaaaatttgcctacacgttgtggattttgtcatataccatatgatgaactgaatatgccatttccagctcatctcacatattgctataactgcaggaaacaaaaagttcctgatgttctgtttacaactatagacctcccaacagatgcaacagttattggaaaaggttgtcttattcaagcaaggttatgtcgcttaaaaaagaaagcacaggcagaagcaaatgctacagctatcagtaatctcttgccatttatggaatatgaagtgcatactcagctaatgaataaactaaaactcaaaggaatgaatgctttgtttggactaagaattcagatcacagtgggtgaaaatatgttgatgggcttagcgtctgccacaggtgtgtatttagcagctttaccaactcctggtggtattcagattgctgggaagactcctaatgatggctcatatgaacaacacatctctcatatgcagaagaagataaatgacacaattgctaaaaacaaagagttatatgaaatcaatcctccagagatatctgaagagattataggatcacccatcccagaacctaggcaacgctcaagacttctaagatctcaatcagaaagctcggatgaagttacagaattagacctttcacatgggaaaaaagatgcttttgttttggagattgatgacacagatgccatggaagatgtccattctctacttactgatgttcctcctccttcaggcttttatagttgtaatacagaaattatgcccggtataaataattggacctctgaaatacagatgttcacttcagtaagagtaatcagattaagcagcctcaacctgactaatcaagctctcaataagaactttaatgatctctgtgaaaatttgctcaagagcctgtactttaaactacgatctatgatcccctgctgcctttgccatgtaaattttacagtatctctgcctgaagatgaattaattcaggttacagtcacggcagtcgcaatcacttttgacaaaaatcaggctttacaaaccacaaaaacccctgttgaaaagtcattgcaaagagcctcaacagataatgaagaacttttacaatttccactggaactgtgttcagattcacttccttctcatccttttccaccagctaaagaacacctggagagtgcaagttctaactcaggtataccagctgcacagagagcaacgtcagttgattacagttcctttgcagacagatgcagcagctggatagagctcattaaactgaaagctcagaccataaggcgtggatcaattaagacaaccatgacagttgaaaaagcaagtccagtgggtgatggaaatttccggaatcgttctgctccaccttgtgcaaattccacagttggggttgttaagatgacacctctttcttttattcctggagcaaaaataactaagtatcttgggataattaacatgttttttattcgagagactacttctcttcgggaggaaggaggagtcagtggttttctccatgcttttattgctgaagtgtttgcaatggtgagagctcatgttgctgcattaggagggaatgctgttgtctcctacataatgaagcagtgtgtcttcatggagaatccaaataaaaaccaggcacagtgtcttataaatgtaagtggtgatgcagtggtttttgttcgtgaatctgacttagaagtggtgtcatctcagcaacctactaccaactgccagtcatcatgtactgaaggcgaagttacaacctgaggaaaattaggaaaaaagagctcaactaaatgaaattcatcaatctctgttattttgtcattaattatcttcttagacttaaaattgaacttgagataaataaggaagaattgagtagatttgatttgcctggagtcttttggaggcatgagaattttctaatcttgacattttgtttgcctgttctagacaggccctgtggggtcttgaccctt

SEQ ID NO: 112693 - DNA, 3490 bp, Homo sapiens
  Payload ID: 2053
  Gene Symbol: C2CD5
  Gene Name: C2 calcium-dependent domain containing 5
  Uniprot ID: Q86YS7
  ENST ID: ENST00000446597
  CDS Start-End: 120-3275
cggaagaacccatcaaagcccttcctcccgccgcctctccggaatgaggtctcagcacccgcgcgggacagcacccttcctcctgcgacagagcccaagaagaggccgaaaccgagaccatgccagggaagctgaaggtgaaaatcgtggccgggcgccatttgccagtgatggaccgtgctagtgacctgactgatgccttcgtggaggtaaaatttggtaataccacctttaaaacagatgtgtaccttaagtcactcaaccctcagtggaactcggagtggtttaaatttgaggtggatgatgaagacttacaagatgaacctttacagatcacagttcttgaccatgatacttacagtgcaaatgatgccattggtaaagtgtacattgatattgatcctttactgtatagtgaagctgcaacagtcatctcaggatggtttccaatttatgacaccatacatggtatccgtggggaaatcaatgtagttgtcaaagtagacctcttcaatgatttaaatcgatttaggcagtcatcatgtggagtcaaattcttttgcacaacgtctattccaaaatgctatagagctgtgataattcatggatttgtagaagaacttgtggtcaatgaagacccagaatatcagtggattgatcgaattcgcacaccaagggcatcaaatgaggccagacagagactcatttcgttaatgtcaggtgagctgcagaggaagattggcttgaaagtacttgaaatgagaggaaatgcagttgtggggtacttacagtgtttcgatctggagggcgagtctgggttagtggtgcgagccataggaacggcgtgtactctggataaattaagtagcccagcagcattccttcctgcatgtaattccccatccaaagaaatgaaggagattcccttcaatgaagatcccaatcccaatactcactcatcaggaccctcaacccctctgaaaaaccaaacttattccttttcaccttccaagtcctacagtcgacagtcctcttcttctgacacagatttgagtttgacacccaaaactggaatgggaagtggtagtgctggaaaagaaggggggccctttaaagctcttttaagacaacagactcaatcagcgttggaacagagggaatttccattttttaccttgacggcatttcctcctggattccttgtacacgttgggggtgtagttagtgcacgttctgtgaagcttttggatcgtatccacaatcctgatgaaccagaaactcgagatgcatggtgggcagaaatcagacaagaaataaaatcacatgctaaagcattaggctgtcatgctgtagtgggctacagtgaatcaactagcatctgtgaagaggtctgcattttatctgcatctggcacagcggctgtactgaatcctagatttctgcaggatggcaccgtggaaggctgtttggaacagaggcttgaagaaaatttgcctacacgttgtggattttgtcatataccatatgatgaactgaatatgccatttccagctcatctcacatattgctataactgcaggaaacaaaaagttcctgatgttctgtttacaactatagacctcccaacagatgcaacagttattggaaaaggttgtcttattcaagcaaggttatgtcgcttaaaaaagaaagcacaggcagaagcaaatgctacagctatcagtaatctcttgccatttatggaatatgaagtgcatactcagctaatgaataaactaaaactcaaaggaatgaatgctttgtttggactaagaattcagatcacagtgggtgaaaatatgttgatgggcttagcgtctgccacaggtgtgtatttagcagctttaccaactcctggtggtattcagattgctgggaagactcctaatgatggctcatatgaacaacacatctctcatatgcagaagaagataaatgacacaattgctaaaaacaaagagttatatgaaatcaatcctccagagatatctgaagagattataggatcacccatcccagaacctaggcaacgctcaagacttctaagatctcaatcagaaagctcggatgaagttacagaattagacctttcacatgggaaaaaagatgcttttgttttggagattgatgacacagatgccatggaagatgtccattctctacttactgatgttcctcctccttcaggcttttatagttgtaatacagaaattatgcccggtataaataattggacctctgaaatacagatgttcacttcagtaagagtaatcagattaagcagcctcaacctgactaatcaagctctcaataagaactttaatgatctctgtgaaaatttgctcaagagcctgtactttaaactacgatctatgatcccctgctgcctttgccatgtaaattttacagtatctctgcctgaagatgaattaattcaggttacagtcacggcagtcgcaatcacttttgacaaaaatcaggctttacaaaccacaaaaacccctgttgaaaagtcattgcaaagagcctcaacagataatgaagaacttttacaatttccactggaactgtgttcagattcacttccttctcatccttttccaccagctaaagaacacctggagagtgcaagttctaactcaggtataccagctgcacagagagcaacgtcagttgattacagttcctttgcagacagatgcagcagctggatagagctcattaaactgaaagctcagaccataaggcgtggatcaattaagacaaccatgacagttgaaaaagcaagtccagtgggtgatggaaatttccggaatcgttctgctccaccttgtgcaaattccacagttggggttgttaagatgacacctctttcttttattcctggagcaaaaataactaagtatcttgggataattaacatgttttttattcgagagactacttctcttcgggaggaaggaggagtcagtggttttctccatgcttttattgctgaagtgtttgcaatggtgagagctcatgttgctgcattaggagggaatgctgttgtctcctacataatgaagcagtgtgtcttcatggagaatccaaataaaaaccaggcacagtgtcttataaatgtaagtggtgatgcagtggtttttgttcgtgaatctgacttagaagtggtgtcatctcagcaacctactaccaactgccagtcatcatgtactgaaggcgaagttacaacctgaggaaaattaggaaaaaagagctcaactaaatgaaattcatcaatctctgttattttgtcattaattatcttcttagacttaaaattgaacttgagataaataaggaagaattgagtagatttgatttgcctggagtcttttggaggcatgagaattttctaatcttgacattttgtttgcctgttctagacaggccctgtggggtcttgaccctt

SEQ ID NO: 112694 - DNA, 850 bp, Homo sapiens
  Payload ID: 2053
  Gene Symbol: C2CD5
  Gene Name: C2 calcium-dependent domain containing 5
  ENST ID: ENST00000539615
  CDS Start-End: 1-850
attggacctctgaaatacagatgttcacttcagtaagagtaatcagattaagcagcctcaacctgactaatcaagctctcaataagaactttaatgatctctgtgaaaatttgctcaagagcctgtactttaaactacgatctatgatcccctgctgcctttgccatgtaaattttacagtatctctgcctgaagatgaattaattcaggttacagtcacggcagtcgcaatcacttttgacaaaaatcaggctttacaaaccacaaaaacccctgttgaaaagtcattgcaaagagcctcaacagataatgaagaacttttacaatttccactggaactgtgttcagattcacttccttctcatccttttccaccagctaaagaacacctggagagtgcaagttctaactcaggtataccagctgcacagagagccatgacagttgaaaaagcaagtccagtgggtgatggaaatttccggaatcgttctgctccaccttgtgcaaattccacagttggggttgttaagatgacacctctttcttttattcctggagcaaaaataactaagtatcttgggataattaacatgttttttattcgagagactacttctcttcgggaggaaggaggagtcagtggttttctccatgcttttattgctgaagtgtttgcaatggtgagagctcatgttgctgcattaggagggaatgctgttgtctcctacataatgaagcagtgtgtcttcatggagaatccaaataaaaaccaggcacagtgtcttataaatgtaagtggtgatgcagtggtttttgttcgtgaatctgacttagaagtggtgtcatctca

SEQ ID NO: 112695 - DNA, 791 bp, Homo sapiens
  Payload ID: 2053
  Gene Symbol: C2CD5
  Gene Name: C2 calcium-dependent domain containing 5
  ENST ID: ENST00000542683
  CDS Start-End: 1-497
taatgtcaggtgagctgcagaggaagattggcttgaaagtacttgaaatgagaggaaatgcagttgtggggtacttacagtgtttcgatctggagggcgagtctgggttagtggtgcgagccataggaacggcgtgtactctggataaattaagtagcccagcagcattccttcctgcatgtaattccccatccaaagaaatgaaggagattcccttcaatgaagatcccaatcccaatactcactcatcaggaccctcaacccctctgaaaaaccaaacttattccttttcaccttccaagtcctacagtcgacagtcctcttcttctgacacagatttgagtttgacacccaaaactggaatgggaagtggtagtgctggaaaagaaggggggccctttaaagctcttttaagacaacagactcaatcagcgttggaacagaggatgaaccagaaactcgagatgcatggtgggcagaaatcagacaagaaataaaatcacatgctaaagcattaggctgtcatgctgtagtgggctacagtgaatcaactagcatctgtgaagaggtctgcattttatctgcatctggcacagcggctgtactgaatcctagatttctgcaggatggcaccgtggaaggctgtttggaacagaggcttgaagaaaatttgcctacacgttgtggattttgtcatataccatatgatgaactgaatatgccatttccagctcatctcacatattgctataactgcaggaaacaaaaagttcctgatgttctgtttacaa

SEQ ID NO: 112696 - DNA, 3496 bp, Homo sapiens
  Payload ID: 2053
  Gene Symbol: C2CD5
  Gene Name: C2 calcium-dependent domain containing 5
  Uniprot ID: Q86YS7
  ENST ID: ENST00000536386
  CDS Start-End: 120-3281
cggaagaacccatcaaagcccttcctcccgccgcctctccggaatgaggtctcagcacccgcgcgggacagcacccttcctcctgcgacagagcccaagaagaggccgaaaccgagaccatgccagggaagctgaaggtgaaaatcgtggccgggcgccatttgccagtgatggaccgtgctagtgacctgactgatgccttcgtggaggtaaaatttggtaataccacctttaaaacagatgtgtaccttaagtcactcaaccctcagtggaactcggagtggtttaaatttgaggtggatgatgaagacttacaagatgaacctttacagatcacagttcttgaccatgatacttacagtgcaaatgatgccattggtaaagtgtacattgatattgatcctttactgtatagtgaagctgcaacagtcatctcaggatggtttccaatttatgacaccatacatggtatccgtggggaaatcaatgtagttgtcaaagtagacctcttcaatgatttaaatcgatttaggcagtcatcatgtggagtcaaattcttttgcacaacgtctattccaaaatgctatagagctgtgataattcatggatttgtagaagaacttgtggtcaatgaagacccagaatatcagtggattgatcgaattcgcacaccaagggcatcaaatgaggccagacagagactcatttcgttaatgtcaggtgagctgcagaggaagattggcttgaaagtacttgaaatgagaggaaatgcagttgtggggtacttacagtgtttcgatctggagggcgagtctgggttagtggtgcgagccataggaacggcgtgtactctggataaattaagtagcccagcagcattccttcctgcatgtaattccccatccaaagaaatgaaggagtctccgctggttcatcctccaagccatggatgccgctcgactcacaacagcccaattcacactgctactggctcacgacttactcagaacttctctgtgtctgttcccactctcatctatactggaatgggaagtggtagtgctggaaaagaaggggggccctttaaagctcttttaagacaacagactcaatcagcgttggaacagaggggaggatcgcctcataggttctgtagaaggcgggaatttccattttttaccttgacggcatttcctcctggattccttgtacacgttgggggtgtagttagtgcacgttctgtgaagcttttggatcgtatccacaatcctgatgaaccagaaactcgagatgcatggtgggcagaaatcagacaagaaataaaatcacatgctaaagcattaggctgtcatgctgtagtgggctacagtgaatcaactagcatctgtgaagaggtctgcattttatctgcatctggcacagcggctgtactgaatcctagatttctgcaggatggcaccgtggaaggctgtttggaacagaggcttgaagaaaatttgcctacacgttgtggattttgtcatataccatatgatgaactgaatatgccatttccagctcatctcacatattgctataactgcaggaaacaaaaagttcctgatgttctgtttacaactatagacctcccaacagatgcaacagttattggaaaaggttgtcttattcaagcaaggttatgtcgcttaaaaaagaaagcacaggcagaagcaaatgctacagctatcagtaatctcttgccatttatggaatatgaagtgcatactcagctaatgaataaactaaaactcaaaggaatgaatgctttgtttggactaagaattcagatcacagtgggtgaaaatatgttgatgggcttagcgtctgccacaggtgtgtatttagcagctttaccaactcctggtggtattcagattgctgggaagactcctaatgatggctcatatgaacaacacatctctcatatgcagaagaagataaatgacacaattgctaaaaacaaagagttatatgaaatcaatcctccagagatatctgaagagattataggatcacccatcccagaacctaggcaacgctcaagacttctaagatctcaatcagaaagctcggatgaagttacagaattagacctttcacatgggaaaaaagatgcttttgttttggagattgatgacacagatgccatggaagatgtccattctctacttactgatgttcctcctccttcaggcttttatagttgtaatacagaaattatgcccggtataaataattggacctctgaaatacagatgttcacttcagtaagagtaatcagattaagcagcctcaacctgactaatcaagctctcaataagaactttaatgatctctgtgaaaatttgctcaagagcctgtactttaaactacgatctatgatcccctgctgcctttgccatgtaaattttacagtatctctgcctgaagatgaattaattcaggttacagtcacggcagtcgcaatcacttttgacaaaaatcaggctttacaaaccacaaaaacccctgttgaaaagtcattgcaaagagcctcaacagataatgaagaacttttacaatttccactggaactgtgttcagattcacttccttctcatccttttccaccagctaaagaacacctggagagtgcaagttctaactcaggtataccagctgcacagagagcaacgtcagttgattacagttcctttgcagacagatgcagcagctggatagagctcattaaactgaaagctcagaccataaggcgtggatcaattaagacaaccatgacagttgaaaaagcaagtccagtgggtgatggaaatttccggaatcgttctgctccaccttgtgcaaattccacagttggggttgttaagatgacacctctttcttttattcctggagcaaaaataactaagtatcttgggataattaacatgttttttattcgagagactacttctcttcgggaggaaggaggagtcagtggttttctccatgcttttattgctgaagtgtttgcaatggtgagagctcatgttgctgcattaggagggaatgctgttgtctcctacataatgaagcagtgtgtcttcatggagaatccaaataaaaaccaggcacagtgtcttataaatgtaagtggtgatgcagtggtttttgttcgtgaatctgacttagaagtggtgtcatctcagcaacctactaccaactgccagtcatcatgtactgaaggcgaagttacaacctgaggaaaattaggaaaaaagagctcaactaaatgaaattcatcaatctctgttattttgtcattaattatcttcttagacttaaaattgaacttgagataaataaggaagaattgagtagatttgatttgcctggagtcttttggaggcatgagaattttctaatcttgacattttgtttgcctgttctagacaggccctgtggggtcttgaccctt

SEQ ID NO: 112697 - DNA, 3438 bp, Homo sapiens
  Payload ID: 2053
  Gene Symbol: C2CD5
  Gene Name: C2 calcium-dependent domain containing 5
  Uniprot ID: Q86YS7
  ENST ID: ENST00000542676
  CDS Start-End: 104-3259
agttaccccgcgcgcctccgcccctctcccgccggccccgcgctcggcgcagactcgtttgtttgtttctgcaggagcccaagaagaggccgaaaccgagaccatgccagggaagctgaaggtgaaaatcgtggccgggcgccatttgccagtgatggaccgtgctagtgacctgactgatgccttcgtggaggtaaaatttggtaataccacctttaaaacagatgtgtaccttaagtcactcaaccctcagtggaactcggagtggtttaaatttgaggtggatgatgaagacttacaagatgaacctttacagatcacagttcttgaccatgatacttacagtgcaaatgatgccattggtaaagtgtacattgatattgatcctttactgtatagtgaagctgcaacagtcatctcaggatggtttccaatttatgacaccatacatggtatccgtggggaaatcaatgtagttgtcaaagtagacctcttcaatgatttaaatcgatttaggcagtcatcatgtggagtcaaattcttttgcacaacgtctattccaaaatgctatagagctgtgataattcatggatttgtagaagaacttgtggtcaatgaagacccagaatatcagtggattgatcgaattcgcacaccaagggcatcaaatgaggccagacagagactcatttcgttaatgtcaggtgagctgcagaggaagattggcttgaaagtacttgaaatgagaggaaatgcagttgtggggtacttacagtgtttcgatctggagggcgagtctgggttagtggtgcgagccataggaacggcgtgtactctggataaattaagtagcccagcagcattccttcctgcatgtaattccccatccaaagaaatgaaggagattcccttcaatgaagatcccaatcccaatactcactcatcaggaccctcaacccctctgaaaaaccaaacttattccttttcaccttccaagtcctacagtcgacagtcctcttcttctgacacagatttgagtttgacacccaaaactggaatgggaagtggtagtgctggaaaagaaggggggccctttaaagctcttttaagacaacagactcaatcagcgttggaacagagggaatttccattttttaccttgacggcatttcctcctggattccttgtacacgttgggggtgtagttagtgcacgttctgtgaagcttttggatcgtatccacaatcctgatgaaccagaaactcgagatgcatggtgggcagaaatcagacaagaaataaaatcacatgctaaagcattaggctgtcatgctgtagtgggctacagtgaatcaactagcatctgtgaagaggtctgcattttatctgcatctggcacagcggctgtactgaatcctagatttctgcaggatggcaccgtggaaggctgtttggaacagaggcttgaagaaaatttgcctacacgttgtggattttgtcatataccatatgatgaactgaatatgccatttccagctcatctcacatattgctataactgcaggaaacaaaaagttcctgatgttctgtttacaactatagacctcccaacagatgcaacagttattggaaaaggttgtcttattcaagcaaggttatgtcgcttaaaaaagaaagcacaggcagaagcaaatgctacagctatcagtaatctcttgccatttatggaatatgaagtgcatactcagctaatgaataaactaaaactcaaaggaatgaatgctttgtttggactaagaattcagatcacagtgggtgaaaatatgttgatgggcttagcgtctgccacaggtgtgtatttagcagctttaccaactcctggtggtattcagattgctgggaagactcctaatgatggctcatatgaacaacacatctctcatatgcagaagaagataaatgacacaattgctaaaaacaaagagttatatgaaatcaatcctccagagatatctgaagagattataggatcacccatcccagaacctaggcaacgctcaagacttctaagatctcaatcagaaagctcggatgaagttacagaattagacctttcacatgggaaaaaagatgcttttgttttggagattgatgacacagatgccatggaagatgtccattctctacttactgatgttcctcctccttcaggcttttatagttgtaatacagaaattatgcccggtataaataattggacctctgaaatacagatgttcacttcagtaagagtaatcagattaagcagcctcaacctgactaatcaagctctcaataagaactttaatgatctctgtgaaaatttgctcaagagcctgtactttaaactacgatctatgatcccctgctgcctttgccatgtaaattttacagtatctctgcctgaagatgaattaattcaggttacagtcacggcagtcgcaatcacttttgacaaaaatcaggctttacaaaccacaaaaacccctgttgaaaagtcattgcaaagagcctcaacagataatgaagaacttttacaatttccactggaactgtgttcagattcacttccttctcatccttttccaccagctaaagaacacctggagagtgcaagttctaactcaggtataccagctgcacagagagcaacgtcagttgattacagttcctttgcagacagatgcagcagctggatagagctcattaaactgaaagctcagaccataaggcgtggatcaattaagacaaccatgacagttgaaaaagcaagtccagtgggtgatggaaatttccggaatcgttctgctccaccttgtgcaaattccacagttggggttgttaagatgacacctctttcttttattcctggagcaaaaataactaagtatcttgggataattaacatgttttttattcgagagactacttctcttcgggaggaaggaggagtcagtggttttctccatgcttttattgctgaagtgtttgcaatggtgagagctcatgttgctgcattaggagggaatgctgttgtctcctacataatgaagcagtgtgtcttcatggagaatccaaataaaaaccaggcacagtgtcttataaatgtaagtggtgatgcagtggtttttgttcgtgaatctgacttagaagtggtgtcatctcagcaacctactaccaactgccagtcatcatgtactgaaggcgaagttacaacctgaggaaaattaggaaaaaagagctcaactaaatgaaattcatcaatctctgttattttgtcattaattatcttcttagacttaaaattgaacttgagataaataaggaagaattgagtagatttgatttgcctggagtcttttggaggcatgagaattttctaatcttgacattttgtttg

SEQ ID NO: 112698 - DNA, 3471 bp, Homo sapiens
  Payload ID: 2053
  Gene Symbol: C2CD5
  Gene Name: C2 calcium-dependent domain containing 5
  Uniprot ID: Q86YS7
  ENST ID: ENST00000545552
  CDS Start-End: 203-3367
gaggagagacaagcaggggcggcagaggctcaacgggatgctgactgggttttgcttttcgtcccagccttgtggggccgggacggaagaacccatcaaagcccttcctcccgccgcctctccggaatgaggtctcagcacccgcgcgggacagcacccttcctcctgcgacagagcccaagaagaggccgaaaccgagaccatgccagggaagctgaaggtgaaaatcgtggccgggcgccatttgccagtgatggaccgtgctagtgacctgactgatgccttcgtggaggtaaaatttggtaataccacctttaaaacagatgtgtaccttaagtcactcaaccctcagtggaactcggagtggtttaaatttgaggtggatgatgaagacttacaagatgaacctttacagatcacagttcttgaccatgatacttacagtgcaaatgatgccattggtaaagtgtacattgatattgatcctttactgtatagtgaagctgcaacagtcatctcaggatggtttccaatttatgacaccatacatggtatccgtggggaaatcaatgtagttgtcaaagtagacctcttcaatgatttaaatcgatttaggcagtcatcatgtggagtcaaattcttttgcacaacgtctattccaaaatgctatagagctgtgataattcatggatttgtagaagaacttgtggtcaatgaagacccagaatatcagtggattgatcgaattcgcacaccaagggcatcaaatgaggccagacagagactcatttcgttaatgtcaggtgagctgcagaggaagattggcttgaaagtacttgaaatgagaggaaatgcagttgtggggtacttacagtgtttcgatctggagggcgagtctgggttagtggtgcgagccataggaacggcgtgtactctggataaattaagtagcccagcagcattccttcctgcatgtaattccccatccaaagaaatgaaggagtctccgctggttcatcctccaagccatggatgccgctcgactcacaacagcccaattcacactgctactggctcacgacttactcagaacttctctgtgtctgttcccactctcatctatactggaatgggaagtggtagtgctggaaaagaaggggggccctttaaagctcttttaagacaacagactcaatcagcgttggaacagagggaatttccattttttaccttgacggcatttcctcctggattccttgtacacgttgggggtgtagttagtgcacgttctgtgaagcttttggatcgtatccacaatcctgcctttgtcggaattatgggtaacacaagatcttacaaactgctagactggaatagtttcaattcagatgaaccagaaactcgagatgcatggtgggcagaaatcagacaagaaataaaatcacatgctaaagcattaggctgtcatgctgtagtgggctacagtgaatcaactagcatctgtgaagaggtctgcattttatctgcatctggcacagcggctgtactgaatcctagatttctgcaggatggcaccgtggaaggctgtttggaacagaggcttgaagaaaatttgcctacacgttgtggattttgtcatataccatatgatgaactgaatatgccatttccagctcatctcacatattgctataactgcaggaaacaaaaagttcctgatgttctgtttacaactatagacctcccaacagatgcaacagttattggaaaaggttgtcttattcaagcaaggttatgtcgcttaaaaaagaaagcacaggcagaagcaaatgctacagctatcagtaatctcttgccatttatggaatatgaagtgcatactcagctaatgaataaactaaaactcaaaggaatgaatgctttgtttggactaagaattcagatcacagtgggtgaaaatatgttgatgggcttagcgtctgccacaggtgtgtatttagcagctttaccaactcctggtggtattcagattgctgggaagactcctaatgatggctcatatgaacaacacatctctcatatgcagaagaagataaatgacacaattgctaaaaacaaagagttatatgaaatcaatcctccagagatatctgaagagattataggatcacccatcccagaacctaggcaacgctcaagacttctaagatctcaatcagaaagctcggatgaagttacagaattagacctttcacatgggaaaaaagatgcttttgttttggagattgatgacacagatgccatggaagatgtccattctctacttactgatgttcctcctccttcaggcttttatagttgtaatacagaaattatgcccggtataaataattggacctctgaaatacagatgttcacttcagtaagagtaatcagattaagcagcctcaacctgactaatcaagctctcaataagaactttaatgatctctgtgaaaatttgctcaagagcctgtactttaaactacgatctatgatcccctgctgcctttgccatgtaaattttacagtatctctgcctgaagatgaattaattcaggttacagtcacggcagtcgcaatcacttttgacaaaaatcaggctttacaaaccacaaaaacccctgttgaaaagtcattgcaaagagcctcaacagataatgaagaacttttacaatttccactggaactgtgttcagattcacttccttctcatccttttccaccagctaaagaacacctggagagtgcaagttctaactcaggtataccagctgcacagagagacagatgcagcagctggatagagctcattaaactgaaagctcagaccataaggcgtggatcaattaagacaaccatgacagttgaaaaagcaagtccagtgggtgatggaaatttccggaatcgttctgctccaccttgtgcaaattccacagttggggttgttaagatgacacctctttcttttattcctggagcaaaaataactaagtatcttgggataattaacatgttttttattcgagagactacttctcttcgggaggaaggaggagtcagtggttttctccatgcttttattgctgaagtgtttgcaatggtgagagctcatgttgctgcattaggagggaatgctgttgtctcctacataatgaagcagtgtgtcttcatggagaatccaaataaaaaccaggcacagtgtcttataaatgtaagtggtgatgcagtggtttttgttcgtgaatctgacttagaagtggtgtcatctcagcaacctactaccaactgccagtcatcatgtactgaaggcgaagttacaacctgaggaaaattaggaaaaaagagctcaactaaatgaaattcatcaatctctgttattttgtcattaattatcttcttagacttaaaattgaacttgagataaataag

SEQ ID NO: 112699 - DNA, 544 bp, Homo sapiens
  Payload ID: 2053
  Gene Symbol: C2CD5
  Gene Name: C2 calcium-dependent domain containing 5
  ENST ID: ENST00000535555
  CDS Start-End: 1-544
acaacagactcaatcagcgttggaacagaggggaggatcgcctcataggttctgtagaaggcgggaatttccattttttaccttgacggcatttcctcctggattccttgtacacgttgggggtgtagttagtgcacgttctgtgaagcttttggatcgtatccacaatcctgcctttgtcggaattatgggtaacacaagatcttacaaactgctagactggaatagtttcaattcagatgaaccagaaactcgagatgcatggtgggcagaaatcagacaagaaataaaatcacatgctaaagcattaggctgtcatgctgtagtgggctacagtgaatcaactagcatctgtgaagaggtctgcattttatctgcatctggcacagcggctgtactgaatcctagatttctgcaggatggcaccgtggaaggctgtttggaacagaggcttgaagaaaatttgcctacacgttgtggattttgtcatataccatatgatgaactgaatatgccatttccagctcatctcacatattgctat

SEQ ID NO: 112700 - DNA, 602 bp, Homo sapiens
  Payload ID: 2054
  Gene Symbol: C21orf62-AS1
  Gene Name: C21orf62 antisense RNA 1
  Uniprot ID: Q17RA5
  ENST ID: ENST00000575623
  CDS Start-End: 241-480
cacttacgcggagcggtaatgtgaggaagcctcccgccaaacagatgagggaggaggaggaggggagaggccagagagagaagcggctttcgggaaggaaagtgtgatctagtaggtggaatagtcctctccaaactttgacctgaggtgtgactattgaatgaccctctatttggatttggattacacaaagtttaacgttttttggaaaaatcctacctaggtaatgtgtagttctcaatgcatcatgtcaggcagcttatgatgccaatttgtcccatggccttaaattccacaacctcatcatctaccacctttggtgctttcagaatcatgactctcaatgttgaagaatgggctactgcatggaaggtgctgatccttttagaggcagccgtggaagaggaaaagagatcagaagagaaaaggatattggtttgcggaacatgtgggacaagaagttcccagaagaatttgtgagcaacttcccgacagtaaggccctggctagacctcaggatggtccctgcctcctggacattaggaagcccaaaggccagaacaaaaacacatgcctagtgggggaaggctcactaagagggc

SEQ ID NO: 112701 - DNA, 271 bp, Homo sapiens
  Payload ID: 2054
  Gene Symbol: C21orf62-AS1
  Gene Name: C21orf62 antisense RNA 1
  ENST ID: ENST00000572066
  CDS Start-End: 230-271
gcacttacgcggagcggtaatgtgaggaagcctcccgccaaacagatgagggaggaggaggaggggagaggccagagagagaagcggctttcgggaaggaaagtgtgatctagtaggtggaatagtcctctccaaactttgacctgagaatgaccctctatttggatttggattacacaaagtttaacgttttttggaaaaatcctacctaggtaatgtgtagttctcaatgcatcatgtcaggcagcttatgatgccaatttgtcccatg

SEQ ID NO: 112702 - DNA, 400 bp, Homo sapiens
  Payload ID: 2054
  Gene Symbol: C21orf62-AS1
  Gene Name: C21orf62 antisense RNA 1
  ENST ID: ENST00000571434
  CDS Start-End: 203-352
aagcctcccgccaaacagatgagggaggaggaggaggggagaggccagagagagaagcggctttcgggaaggaaagtgtgatctagtaggtggaatagtcctctccaaactttgacctgagaatgaccctctatttggatttggattacacaaagtttaacgttttttggaaaaatcctacctaggtaatgtgtagttctcaatgcatcatgtcaggcagcttatgatgccaatttgtcccatggtgctgatccttttagaggcagccgtggaagaggaaaagagatcagaagagaaaaggatattggtttgcggaacatgtgggacaagaagttcccagaagaatttgtgagcaacttcccgacagtaaggccctggctagacctcaggatggtccctg

SEQ ID NO: 112703 - DNA, 2453 bp, Homo sapiens
  Payload ID: 2054
  Gene Symbol: C21orf62-AS1
  Gene Name: C21orf62 antisense RNA 1
  Uniprot ID: Q17RA5
  ENST ID: ENST00000575401
  CDS Start-End: 291-530
gagatgagaagaaagagtaggctctgttgtccctcagacggcgctgctgcagtgcgtcttcgcacttacgcggagcggtaatgtgaggaagcctcccgccaaacagatgagggaggaggaggaggggagaggccagagagagaagcggctttcgggaaggaaagtgtgatctagtaggtggaatagtcctctccaaactttgacctgagaatgaccctctatttggatttggattacacaaagtttaacgttttttggaaaaatcctacctaggtaatgtgtagttctcaatgcatcatgtcaggcagcttatgatgccaatttgtcccatggccttaaattccacaacctcatcatctaccacctttggtgctttcagaatcatgactctcaatgttgaagaatgggctactgcatggaaggtgctgatccttttagaggcagccgtggaagaggaaaagagatcagaagagaaaaggatattggtttgcggaacatgtgggacaagaagttcccagaagaatttgtgagcaacttcccgacagtaaggccctggctagacctcaggatggtccctgcctcctggacattaggaagcccaaaggccagaacaaaaacacatgcctagtgggggaaggctcactaagagggcaccaagtggggcaaatacccctggtaacccatttatggaggctgccacagaaatgctagttggaaattttcctccttcagtctatcatgaatttcttttttctcttttgagatgaagtcgcccgggctgcagttcagtggtgcaatctcagctcactgcaagctctgcctcccaggttccaacgattgtcttgtctcagcctcctgagtagctgagattataagcacgcaccatcatacccgactaatttttgtatttatagtagaaatggggttttgccatgttggccaggctggtcttgaactcctgaccttagggtgatccacccatcttggcctccaaaagtgctgggattacaggcatgagccactgcactcggctgtaccgtgattattagttcaaggttctctttcactggggtaaagaccttaagagagcagtttttgggctttatattctcaatttcccgcacagtgcctagcacatagcaaggactcaacaaatttcattgaatgaatgaaaaaacatagtttaccaaatgtcagtgtactcaaactcttttaactgctagctatagaaatccaattaagactcacttgggtaaaaaaaaataaaaaaataaacaaaataaactgctcacttatttgaaaaattaaggaaggatttcaggcatggcttgatccagctactcaaaaaaggttgtcagaaatgtctgtccgttcttcatttattctttctcatttgtgggctttgttcccagataagatcactccttctggggacaagatggtcactagtagatccaggtttactttctatcagctgagcaacctctcaagaaaaaataaataaataaataaacctctctttaaatagcaccaggctgctgggtgtggtggctcatacctgtaaccccagcactttgggaggctgaggtaggaggattgtgggaagccaggagttcaagaccagcccagccaacattgtgagacataatctctacaaataaaataaattagttggacatgatggtgtgcacctatagtcccagctactcgggaggctgaagcagaaggatcacttgagtctgagaattcggtgttgtttaagccaccctgttgtggtatctgctatggctgcacaggcagaaatagggacacaagtgcaggttcagggcaaggtgtgtgagcacactcagtccctggcctcggagtctctctggatggcttcttgcctagggtgactgacagagggagggatgatatgcaaaggcacctgttctcctcatgacctaaccccaattcttactccacgggttcatgacagcctattctgctggagactgtgtcttaaaacttcctcccctagtttctctcaagtacccctcgtgagctgtgatttcactgggctttgaactcttaggccatttgaggctgcagtgagctatgattgtatcactgcactccagcctagatgacagaacgagaccccatctctaatgaataaataaatatggctgggcacaatggctcaggcctgtaatcccagcatttggaagaccaagacaggcagatcgcttcagctcaggagttcgagatcattctggccaacaaggcgaaaccctgtctctaccaaaaatacaaaaattagccaggcagggtggcatgtgcctttaatcccagctacagggaggctgaggcaggagaatcacttgaacctgggaggcagaggtttcagtgagctgaaattgtgccactgcactccagcctgagtgacagagtgagactttgcaaccaaaaaa

SEQ ID NO: 112704 - DNA, 4771 bp, Homo sapiens
  Payload ID: 2055
  Gene Symbol: C2CD2L
  Gene Name: C2CD2-like
  Uniprot ID: O14523
  ENST ID: ENST00000336702
  CDS Start-End: 360-2483
gagccggtgccggcccgcgagccccagcgtctctgcagaccagtcccctccagggtccggcggggcccgcgcggtgggaggagtcgggcactggccggcgactaacgggtccgactgctgaccaagctaggagagacccggaccacggagacagagaccccggcatcgcgacccccgaggacctcctctcctcgccctgtggcacccactagtcctgggcactcagccgcggagagcccccgaccccgcgcgcccagccccgggggagcccacctcctccccgcggcccgcccgggccatgctcccccggggcagcgggtgagccccagccgggaccgggatcggagcccgcgcggagcatggatccgggctgggggcagcgggacgtgggctgggcggccttgctgatcctcttcgccgcctcgctgctcacggtgttcgcctggctgctgcaatatgcccggggcttgtggctggcgcgggcccgcggggaccggggcccgggacccgccttagccggggaacccgcgggttccctgcgggagctgggcgtgtggcgctcgctgctgcggctgcgggcgactcgggctggcgccgccgaggagccaggagtccggggcctcctggcgtcactcttcgccttcaagtctttccgggagaactggcagcgggcttgggtgcgagcgctgaacgagcaggcctgcagaaacgggagctccatccaaatcgcctttgaggaggtgccccaactcccacccagagccagcatcagtcatgtgacctgcgtagaccaatctgagcataccatggtgctgcgttgccagctctctgctgaggaggtgcggttcccagtctctgtgacccagcagtcccccgctgccgtctccatggagacctaccacgtcactctgacactgccaccaacacagttggaagtcaacctggaggaaatccctggtgaggggctgctcatatcctgggccttcactgatcgcccagatctcagcctaacggtgcttcccaagcttcaggccagggagagaggtgaagaacaagtggagctctccacaattgaggaactgatcaaggatgccatagtcagcacccagccagccatgatggtcaacctcagggcttgctctgccccaggaggcctggtacccagtgagaagccacccatgatgccccaggctcagccagccatccccagacctaaccggttattcctacggcagcttcgggcatctcacttgggaaatgagctggaaggcaccgaggaactgtgctgtgtagctgaactcgacaaccccatgcagcagaagtggaccaagcccgcgagggctggatccgaggtggagtggacagaagacctggcactggatctgggcccccagagccgggagctgaccctcaaagtgctgaggagcagcagctgtggagacaccgaactcctaggccaggccacactgcctgtgggctccccctccagaccactgtctcgaagacagttgtgcccactcaccccagggccagggaaagccctgggaccagcagccaccatggcagtggagcttcactatgaggagggctctccccggaacctgggtactcccacctcctccactccacgccccagcatcacacctaccaagaagattgagcttgaccggaccatcatgcccgatggcaccattgtcaccacagtcaccactgtccagtcccggccccgtatagacggcaaattagactccccctcccgctccccgtccaaggtggaggtgaccgagaagacgacaactgtgctgagtgagagcagtggccccagcaatacctcccatagcagcagcccaggggacagccacctttccaacggcttggaccctgtagcagagacagcgattcgccagctgacagagcccagtgggcgggtggccaagaagacacccaccaagcgcagcactctcatcatctctggtgtttccaaggtgcccattgctcaggacgagttggcgctatccctgggctatgcggcatccctggaagcctcagtgcaggatgatgcagggaccagcggaggcccctcttcacctccctcagacccaccagccatgtctccaggaccgctagatgccctctctagtcccacaagtgtccaggaagcagacgagacaacccgttcggatatttctgagaggccatctgtggatgatattgagtcggaaacggggtccactggtgccctggagacccgcagcctcaaggatcacaaagtgagtttcctgcgcagcggcactaagctcatcttccgccggaggcctaggcagaaggaagctggcctgagccaatcacacgatgacctctccaacgcaacggccacgcccagtgtccgaaagaaggccggcagcttttctcgccgccttatcaagcgcttttccttcaaatccaaacccaaggccaatggtaaccccagcccccagctctgaggacccagctctgaaagggcacgagttctctcagcccattccccacctccccttccataccccttcctggatctccagtgcctgggccaggaaagccctctgggttccgggaagccccgtccaccctgggccatggggccggttggaaggatacttggaacgggaagcacatgagaggtgggcacccggtgccgaggacatggacgagggactggtggctgggagggagaggagggccctgtccggcatgtgtgggtattccccagaagcatttgcctcctgctgagcctggtccctgagcggagtcccagggtgctcagctcttcagctgacccttcttcccttatttattctcttttctatttatatgtgtggcttaggaccctccgtgaacagatgatagagggcatctctcccaggtgacccttcttttctgtcccaggagggtgggtaattccctttgggatggggctcccacacctccctcaggtccccactcagaccagcaccagtgtctgcctctgagaatgttggcagctcacagagagcagggccggcccgggatggggggcaggtactccccaccttcctgcctcccctcctgctcctcatccctccctccccctttattaccgttttttgtacttgatgccttctctgtgagcagtggctctgtgggaaggagggagccgggagcctggtgggaagccttccccagagagatggctttaggggctttatttaaagactgtgatgatggagccacgcaaggctgcacctctgtgtgttgggagacgatgatgatgtccattgctgtgtgatggcttggaatttaatttattaaagtcaaattggagtttataaactggacaactggttatcctttgaaaggcagtaggcagccaggctgtgacatggatggtgtgggaggatgagacaggggcccggataatgaggttgggtagatgacacacattgtggatctgctaagaagttcctgcagggaagaaggggtgtgcagagaaaggatggaagagacaggaggctctggagtatgaaattgtagcaaaaaactcaatcaactagtacaggttagtcttcattcccctttctggaacaggctgctccttctaggatgtaatggagatcaaagcttggaccctgtaactagactgcctgcctgggtttgagtcccagctcttctaattacttgtgtgaccttgggcaagttatgtaacctctaagtgcctcagttttctcatctgtaaaatgggaacttcaatcatcatggctatcatttggttgtggatgagaagtaaatgaagtgctgagtgttaactgttgcctcagaagaaactgggagggggaagtcttagaagtgtttcaacataataaaagctctctcattctgaaatgtgggcaaatttcagggattgatagatcctagcaaactgtgtccctggttcccgtgcttgagatcttatacaggacttgaaccaggtaagctgctacaggatattgggcagaatgcaggaccaggaagcaagaaaactgagtctgccacagacaaaccaagtgatcttgagcaggcaacttctcctttggggacctcagtttcctcatatctaaaataagggtgacctggataaacattcaggtcacttccagccttgacattctatgactacctatatctcagggtgtttagggcacatgcctttgggtagatagcatgtggaaattgttactattccccatgctcctgtccacactactcaccaaatatgagatatccgggaagaatggagggtatagattttttttttcaattagataatttagttttatatatttggggggacaagtgcaggtttcttacatgcatatattgcatgcatagaggtgaagtctgggctttttttagtgtgcgcatcgcccaaatagtgaacatcatacccaataggtagtttttcaaccctcaccctcctcccaccttctcacctttcatagtctccgatgtcttttattccactctatatgtccatgtatacccattatttagctcccacttataaatgagaatatgccatatttgactttgtttctgagttatttcaccgaggataatggcctccagttccacccatgttgctggaaaacacatgatttcattcttttttatggctgagtagtattccactgtgtgtgtgtgtgttgggcgatgataatgatgtccattgctgtgtgacagcttggaatttaatttattaaagtcaagttggagttta

SEQ ID NO: 112705 - DNA, 2320 bp, Homo sapiens
  Payload ID: 2055
  Gene Symbol: C2CD2L
  Gene Name: C2CD2-like
  ENST ID: ENST00000528586
  CDS Start-End: 71-1246
tgaagaacaagtggagctctccacaattgaggaactgatcaaggatgccatagtcagcacccagccagccatgatggtcaacctcagggcttgctctgccccaggaggcctggtacccagtgagaagccacccatgatgccccaggctcagccagccatccccagacctaaccggttattcctacggcagcttcgggcatctcacttgggaaatgagctggaaggcaccgaggaactgtgctgtgtagctgaactcgacaaccccatgcagcagaagtggaccaagcccgcgagggctggatccgaggtggagtggacagaagacctggcactggatctgggcccccagagccgggagctgaccctcaaagtgctgaggagcagcagctgtggagacaccgaactcctaggccaggccacactgcctgtgggctccccctccagaccactgtctcgaagacagttgtgcccactcaccccagggccagggaaagccctgggaccagcagccaccatggcagtggagcttcactatgaggagggctctccccggaacctgggtactcccacctcctccactccacgccccagcatcacacctaccaagaagattgagcttgaccggaccatcatgcccgatggcaccattgtcaccacagtcaccactgtccagtcccggccccgtatagacggcaaattagactccccctcccgctccccgtccaaggtggaggtgaccgagaagacgacaactgtgctgagtgagagcagtggccccagcaatacctcccatagcagcagccgggacagccacctttccaacggcttggaccctgtagcagagacagcgattcgccagctgacagagcccagtgggcgggtggccaagaagacacccaccaagcgcagcactctcatcatctctggtgtttccaaggtgcccattgctcaggacgagttggcgctatccctgggctatgcggcatccctggaagcctcagtgcaggatgatgcagggaccagcggaggcccctcttcacctccctcagacccaccagccatgtctccaggaccgctagatgccctctctagtcccacaagtgtccaggaagcagacgagacaacccgttcggatatttctgagaggccatctgtggatgatattgagtcggaaacggggtccactggtgccctggagacccgcagcctcaaggatcacaaagcttcccctcttcccctgcagtgagtttcctgcgcagcggcactaagctcatcttccgccggaggcctaggcagaaggaagctggcctgagccaatcacacgatgacctctccaacgcaacggccacgcccagtgtccgaaagaaggccggcagcttttctcgccgccttatcaagcgcttttccttcaaatccaaacccaaggccaatggtaaccccagcccccagctctgaggacccagctctgaaagggcacgagttctctcagcccattccccacctccccttccataccccttcctggatctccagtgcctgggccaggaaagccctctgggttccgggaagccccgtccaccctgggccatggggccggttggaaggatacttggaacgggaagcacatgagaggtgggcacccggtgccgaggacatggacgagggactggtggctgggagggagaggagggccctgtccggcatgtgtgggtattccccagaagcatttgcctcctgctgagcctggtccctgagcggagtcccagggtgctcagctcttcagctgacccttcttcccttatttattctcttttctatttatatgtgtggcttaggaccctccgtgaacagatgatagagggcatctctcccaggtgacccttcttttctgtcccaggagggtgggtaattccctttgggatggggctcccacacctccctcaggtccccactcagaccagcaccagtgtctgcctctgagaatgttggcagctcacagagagcagggccggcccgggatggggggcaggtactccccaccttcctgcctcccctcctgctcctcatccctccctccccctttattaccgttttttgtacttgatgccttctctgtgagcagtggctctgtgggaaggagggagccgggagcctggtgggaagccttccccagagagatggctttaggggctttatttaaagactgtgatgatggagccacgcaaggctgcacctctgtgtgttgggagacgatgatgatgtccattgctgtgtgatggcttggaatttaatttattaaagtcaaattggagtttataaa

SEQ ID NO: 112706 - DNA, 2123 bp, Homo sapiens
  Payload ID: 2056
  Gene Symbol: CPAMD8
  Gene Name: C3 and PZP-like, alpha-2-macroglobulin domain containing 8
  Uniprot ID: Q8IZJ3
  ENST ID: ENST00000291440
  CDS Start-End: 33-1685
gccccagcttggccgggcgcggagcggggcgcatggcgccgggcgcactgcgcgggggctgcgaacaaagggcccccggcggcggcgcgaggacggccgcgctcggaccctggccctggcccagccctggcccggccccctccccaggcgcggcgccccccaggagccgaaaaatgagcggcgccctgctctggccgttgctcccgctcctgctcctgctgctgtcggcgcgggacggcgtgcgcgccgcgcagcctcaggccccgggttacttgattgcagctccctctgtttttcgcgcgggcgtggaggaagtcatcagcgtgaccatctttaactctccaagggaagtcacggtccaggctcagctggtggcccagggtgagccggtggtgcagagccagggagccatcctggataaagggacaatcaaactcaaggtgcccacgggcctccggggccaagcgcttctgaaagtgtggggccgcggctggcaggcggaggaggggcccctctttcacaaccagacctcggtgaccgtggacggccggggcgcttctgtattcatccagacggacaagcctgtgtacagaccccagcaccgagtgctcataagcatcttcaccgtctctccaaatctgaggcctgtcaacgagaagctggaagcctacatcctggacccccgaggctctcggatgatagagtggagacacttaaagccgttctgctgcggcatcaccaacatgagcttccccttgtccgaccagcctgtgttgggagaatggttcatttttgttgaaatgcaaggccacgcgtacaacaagtcttttgaagttcagaagtatgtgttgcccaagtttgagcttctgattgacccgccccggtatatccaagacctggacgcctgtgagacaggcactgtgcgggccaggtatacctttgggaaacctgtggctggtgccttaatgatcaacatgactgttaatggtgtagggtactacagccacgaggtgggacgccctgtcctcagaacaaccaagatcctcggctcccgggacttcgacatctgcgtgagggacatgatcccagcggacgtccctgagcacttccggggcagggtcagcatctgggccatggtgaccagtgtggacgggagccagcaggtcgcgttcgatgactccacccccgtgcagaggcagctggtggacatccggtactccaaggacacgaggaagcagttcaagccgggcctggcctacgtggggaaggtggagctatcctaccccgatggcagcccagctgagggggtgacggtccagattaaggcagagctgacaccaaaggataacatctacaccagtgaagttgtgtcccagcgtggactagtggggtttgaaatcccctccatccccacgtcagcccagcacgtgtggctggaggttttccaggaactggaagattatgatgtttctgattcctttggcgtgtccagggaggatggtcctttttggtgggctgggctgacggcacaacgacgccggcgctcctctgtcttcccgtggccttggggcatcaccaaggactctgggtttgccttcaccgtaaggagaggaaacgggactggtggtgatgaccgaccgagtgagcctgaaccaccggcaggacggtggcctctacaccgatgaggctgtccccgctttccagccccacacagggagcctggtggcagtggctccttccaggcacccccccagaacagagaagagaaaaaggactttcttccccgaaacatggatttggcattgtctcaacatcaggtacattaagatttcttttctgcgctgactttgccggttgagtgaaagacactcatgcgggtccagagagcctccggtgagatgggcaggcctgataccaacatctgagcaagacactgtgcatctttttctaacacacaaaacttcaagccatgaagccagccttgagtcccgctgcacatttggacgtttgcctgtgaaatatgaaatgcaagggctttgtgcctcttataactccctcttggggttactctatctgctctgtttgtataacgagctcattaaaatgattacagttccctggaa

SEQ ID NO: 112707 - DNA, 5355 bp, Homo sapiens
  Payload ID: 2056
  Gene Symbol: CPAMD8
  Gene Name: C3 and PZP-like, alpha-2-macroglobulin domain containing 8
  ENST ID: ENST00000388925
  CDS Start-End: 174-1685
gccccagcttggccgggcgcggagcggggcgcatggcgccgggcgcactgcgcgggggctgcgaacaaagggcccccggcggcggcgcgaggacggccgcgctcggaccctggccctggcccagccctggcccggccccctccccaggcgcggcgccccccaggagccgaaaaatgagcggcgccctgctctggccgttgctcccgctcctgctcctgctgctgtcggcgcgggacggcgtgcgcgccgcgcagcctcaggccccgggttacttgattgcagctccctctgtttttcgcgcgggcgtggaggaagtcatcagcgtgaccatctttaactctccaagggaagtcacggtccaggctcagctggtggcccagggtgagccggtggtgcagagccagggagccatcctggataaagggacaatcaaactcaaggtgcccacgggcctccggggccaagcgcttctgaaagtgtggggccgcggctggcaggcggaggaggggcccctctttcacaaccagacctcggtgaccgtggacggccggggcgcttctgtattcatccagacggacaagcctgtgtacagaccccagcaccgagtgctcataagcatcttcaccgtctctccaaatctgaggcctgtcaacgagaagctggaagcctacatcctggacccccgaggctctcggatgatagagtggagacacttaaagccgttctgctgcggcatcaccaacatgagcttccccttgtccgaccagcctgtgttgggagaatggttcatttttgttgaaatgcaaggccacgcgtacaacaagtcttttgaagttcagaagtatgtgttgcccaagtttgagcttctgattgacccgccccggtatatccaagacctggacgcctgtgagacaggcactgtgcgggccaggtatacctttgggaaacctgtggctggtgccttaatgatcaacatgactgttaatggtgtagggtactacagccacgaggtgggacgccctgtcctcagaacaaccaagatcctcggctcccgggacttcgacatctgcgtgagggacatgatcccagcggacgtccctgagcacttccggggcagggtcagcatctgggccatggtgaccagtgtggacgggagccagcaggtcgcgttcgatgactccacccccgtgcagaggcagctggtggacatccggtactccaaggacacgaggaagcagttcaagccgggcctggcctacgtggggaaggtggagctatcctaccccgatggcagcccagctgagggggtgacggtccagattaaggcagagctgacaccaaaggataacatctacaccagtgaagttgtgtcccagcgtggactagtggggtttgaaatcccctccatccccacgtcagcccagcacgtgtggctggaggttttccaggaactggaagattatgatgtttctgattcctttggcgtgtccagggaggatggtcctttttggtgggctgggctgacggcacaacgacgccggcgctcctctgtcttcccgtggccttggggcatcaccaaggactctgggtttgccttcaccgtaaggagaggaaacgggactggtggtgatgaccgaccgagtgagcctgaaccaccggcaggacggtggcctctacaccgatgaggctgtccccgctttccagccccacacagggagcctggtggcagtggctccttccaggcacccccccagaacagagaagagaaaaaggactttcttccccgaaacatggatttggcattgtctcaacatcagtgacccatctggtgaggggacactcagtgtgaaggtcccggactccatcaccagctgggtgggtgaggccgtggccctgtccacctctcagggcttaggcatcgccgagccctccctgctgaagaccttcaagcccttcttcgtggacttcatgctccccgctctcatcatccgtggggagcaggtcaagatcccgctcagtgtctacaactacatgggcacctgcgctgaggtgtacatgaagctctcggttcccaagggcatccagtttgttgggcatcctggcaaacgccatgtgaccaagaagatgtgtgtggcccccggggaggctgagcccatctgggtcgttctgtccttcagcgacctgggactcaacaacatcacggccaaagcccttgcttacggagacacaaattgctgccgggatgggaggtccagcaaacaccctgaggagaatcacgccgacaggagggtccccatcggggtggatcacgtcaggcgcagtgtgatggttgaggcggaaggagtcccccgggcgtacacctacagcgcattcttctgtcccagtgagagagtccacatctccacccccaacaagtatgagttccagtatgtgcagcggccactgcgcctcacccgctttgatgtggctgtgcgagctcacaatgatgcccgtgtggccttgtcttctgggccccaggacacagcaggcatgatcgagatcgtcctgggggggcatcagaacaccaggtcatggatctccaccagcaagatgggagagcccgtggccagtgcacacacggccaagatcctctcctgggatgaattcagaacattctggatcagctggcgtggtggccttatccaggttggccatggtccagagccatccaatgagtctgtcattgtggcctggaccctcccgaggccaccagaggtccagttcattggcttttccaccggctggggctccatgggtgaattccgaatctggaggaagatggaggtggacgagagctacagcgaggccttcaccctgggggtcccacacggcgccatccctgggtctgagcgagccaccgcctccatcatcggggacgtcatggggccaaccctgaaccacctcaacaacctcctgcggctgccgtttggctgtggagagcagaacatgatccactttgcacccaacgtctttgtcttgaagtatcttcagaaaacccagcagctcagccctgaggtggagagagagaccaccgactacctagtacaaggctaccagcgccagctgacctacaagcgccaggatggctcctacagcgcgtttggggagcgggacgcatcggggagcatgtggctcacagcctttgtcctgaagtccttcgcacaggctcgcagctttatcttcgtggacccccgggagctggctgccgccaagagctggatcatccagcagcagcaggccgatggctccttcctggccgtgggcagggtcctgaacaaggacatccagggtgggatccacggcactgtcccgctgacagcctacgtggtggttgctctcctggaaacaggcacagcctcagaggaggagagaggctccactgacaaagcgaggcacttcctggagtctgctgcgcccctggccatggacccttatagctgtgccctgactacctacgcgctgaccctgctccgcagcccggcagcccctgaggcactgcgcaagctccgtagcctggccatcatgcgagatggggtcacccactggagcctgtcaaattcctgggacgtggacaagggcacattcttgagcttcagtgacagggtctctcagtcagtggtctcggccgaggtggaaatgacagcctacgcccttctgacctacactctgctgggtgacgtggctgccgccctgcctgtggtgaagtggctgtcccagcagcgaaatgcacttgggggcttctcctccactcaggacacctgcgtggctctgcaggccttggctgaatatgccatcttgtcctatgctggaggcatcaacctcactgtctccctggcctccaccaacctggactaccaggaaaccttcgagctgcacaggaccaaccagaaggttctgcagacagcagcgatccccagcctccccacggggctgtttgtgagtgccaagggggacggctgctgcctgatgcagattgatgtcacctacaatgtgcctgacccggtggccaagccagctttccagctgctcgtaagcctccaggagcctgaggcccagggacgcccgccccccatgcctgcctccgcagctgagggttcccgaggagactggcccccagctgacgatgatgacccagcggccgatcagcatcaccaggaatacaaggtgatgctggaggtgtgcaccaggtggctgcatgcagggtcttccaatatggctgtcctggaggtgcccctgctgtcaggcttccgggcagacatcgagagcctggagcagctgctccttgacaagcacatggggatgaagaggtatgaagtggctggacgccgagtgctcttctactttgatgagatccccagccggtgcctgacgtgcgtgcggttccgtgctctccgggagtgcgtggtgggcaggacgtcggcgctgccagtctccgtgtacgactactacgaacccgccttcgaggccactcgcttctacaacgtcagcacccacagcccactcgcccgggaactgtgcgccggacccgcgtgcaacgaagtggagcgcgcccctgcccggggcccgggctggttccccggcgagtcgggccctgccgtggcccctgaggagggggcggcgatcgcgcgatgcggctgcgaccacgactgcggcgcccaggggaacccggtgtgcggctccgacggggtggtctacgccagcgcctgccgcctgcgggaggccgcctgccgccaggccgcgcccctggagcccgcgcctcccagctgctgcgccctcgagcagcggctgccggcctcgtcgtcctccacctacggggatgacctggcttctgtggccccggggcctttacagcaggacgtgaagctgaatggagccggccttgaggtggaggactcagaccctgagcctgaaggggaggcggaggacagggtcacagccgggcctcggcctcctgtgagcagcgggaacctggaaagcagcacccagagcgccagcccgttccacagatggggccagactccggcccctcagagacatagtggccgggtggtgggggcccacaggccagggcttctgagccctgtcttcgtctacagcccagcctttcagagtggtggggaggagggtttatggatgtcaaacacctgcaccttgagataatcctacaaccacatgcagttgtgggaccgcagtttggtcctggggaccattcatacccacacacccagcttgtgcctgtggttaacatctcagaaaactctggtaaatgatcactccaggatattgacaagaatacacgttactgatcttactcac

SEQ ID NO: 112708 - DNA, 5992 bp, Homo sapiens
  Payload ID: 2056
  Gene Symbol: CPAMD8
  Gene Name: C3 and PZP-like, alpha-2-macroglobulin domain containing 8
  Uniprot ID: Q8IZJ3
  ENST ID: ENST00000443236
  CDS Start-End: 33-5831
gccccagcttggccgggcgcggagcggggcgcatggcgccgggcgcactgcgcgggggctgcgaacaaagggcccccggcggcggcgcgaggacggccgcgctcggaccctggccctggcccagccctggcccggccccctccccaggcgcggcgccccccaggagccgaaaaatgagcggcgccctgctctggccgttgctcccgctcctgctcctgctgctgtcggcgcgggacggcgtgcgcgccgcgcagcctcaggccccgggttacttgattgcagctccctctgtttttcgcgcgggcgtggaggaagtcatcagcgtgaccatctttaactctccaagggaagtcacggtccaggctcagctggtggcccagggtgagccggtggtgcagagccagggagccatcctggataaagggacaatcaaactcaaggtgcccacgggcctccggggccaagcgcttctgaaagtgtggggccgcggctggcaggcggaggaggggcccctctttcacaaccagacctcggtgaccgtggacggccggggcgcttctgtattcatccagacggacaagcctgtgtacagaccccagcaccgagtgctcataagcatcttcaccgtctctccaaatctgaggcctgtcaacgagaagctggaagcctacatcctggacccccgaggctctcggatgatagagtggagacacttaaagccgttctgctgcggcatcaccaacatgagcttccccttgtccgaccagcctgtgttgggagaatggttcatttttgttgaaatgcaaggccacgcgtacaacaagtcttttgaagttcagaagtatgtgttgcccaagtttgagcttctgattgacccgccccggtatatccaagacctggacgcctgtgagacaggcactgtgcgggccaggtatacctttgggaaacctgtggctggtgccttaatgatcaacatgactgttaatggtgtagggtactacagccacgaggtgggacgccctgtcctcagaacaaccaagatcctcggctcccgggacttcgacatctgcgtgagggacatgatcccagcggacgtccctgagcacttccggggcagggtcagcatctgggccatggtgaccagtgtggacgggagccagcaggtcgcgttcgatgactccacccccgtgcagaggcagctggtggacatccggtactccaaggacacgaggaagcagttcaagccgggcctggcctacgtggggaaggtggagctatcctaccccgatggcagcccagctgagggggtgacggtccagattaaggcagagctgacaccaaaggataacatctacaccagtgaagttgtgtcccagcgtggactagtggggtttgaaatcccctccatccccacgtcagcccagcacgtgtggctggagaccaaggtgatggcactgaacgggaagcctgtgggggctcagtacctgcccagctacctctccctcggcagctggtactcccccagccagtgctacctgcagctgcagccaccctcccacccactgcaggttggggaagaagcctatttttctgtgaagtccacatgtccctgcaactttaccctgtactacgaggtggctgcacggggcaatattgtgctatcgggccagcagcctgcccacaccacccagcagcgaagcaagcgggcggcccctgccctggagaaaccgattcgtttaacacacctttctgagacagagcccccaccagccccagaagctgaggtcgacgtgtgtgtgacctctcttcatctggccgtgacccccagcatggtcccccttggtcgcctgctggtcttctacgtcagggagaatggagaaggggtcgccgacagccttcagtttgcagtcgagaccttcttcgaaaaccaggtttcagtgacgtattcagcaaatgagacccaacctggggaggttgtcgacctgcggatcagggctgcaaggggcagctgtgtgtgcgtcgccgcagttgataagagtgtctacctgctcaggtctgggttccggctgactcctgcccaggttttccaggaactggaagattatgatgtttctgattcctttggcgtgtccagggaggatggtcctttttggtgggctgggctgacggcacaacgacgccggcgctcctctgtcttcccgtggccttggggcatcaccaaggactctgggtttgccttcaccgaaacgggactggtggtgatgaccgaccgagtgagcctgaaccaccggcaggacggtggcctctacaccgatgaggctgtccccgctttccagccccacacagggagcctggtggcagtggctccttccaggcacccccccagaacagagaagagaaaaaggactttcttccccgaaacatggatttggcattgtctcaacatcagtgacccatctggtgaggggacactcagtgtgaaggtcccggactccatcaccagctgggtgggtgaggccgtggccctgtccacctctcagggcttaggcatcgccgagccctccctgctgaagaccttcaagcccttcttcgtggacttcatgctccccgctctcatcatccgtggggagcaggtcaagatcccgctcagtgtctacaactacatgggcacctgcgctgaggtgtacatgaagctctcggttcccaagggcatccagtttgttgggcatcctggcaaacgccatgtgaccaagaagatgtgtgtggcccccggggaggctgagcccatctgggtcgttctgtccttcagcgacctgggactcaacaacatcacggccaaagcccttgcttacggagacacaaattgctgccgggatgggaggtccagcaaacaccctgaggagaatcacgccgacaggagggtccccatcggggtggatcacgtcaggcgcagtgtgatggttgaggcggaaggagtcccccgggcgtacacctacagcgcattcttctgtcccagtgagagagtccacatctccacccccaacaagtatgagttccagtatgtgcagcggccactgcgcctcacccgctttgatgtggctgtgcgagctcacaatgatgcccgtgtggccttgtcttctgggccccaggacacagcaggcatgatcgagatcgtcctgggggggcatcagaacaccaggtcatggatctccaccagcaagatgggagagcccgtggccagtgcacacacggccaagatcctctcctgggatgaattcagaacattctggatcagctggcgtggtggccttatccaggttggccatggtccagagccatccaatgagtctgtcattgtggcctggaccctcccgaggccaccagaggtccagttcattggcttttccaccggctggggctccatgggtgaattccgaatctggaggaagatggaggtggacgagagctacagcgaggccttcaccctgggggtcccacacggcgccatccctgggtctgagcgagccaccgcctccatcatcggggacgtcatggggccaaccctgaaccacctcaacaacctcctgcggctgccgtttggctgtggagagcagaacatgatccactttgcacccaacgtctttgtcttgaagtatcttcagaaaacccagcagctcagccctgaggtggagagagagaccaccgactacctagtacaaggctaccagcgccagctgacctacaagcgccaggatggctcctacagcgcgtttggggagcgggacgcatcggggagcatgtggctcacagcctttgtcctgaagtccttcgcacaggctcgcagctttatcttcgtggacccccgggagctggctgccgccaagagctggatcatccagcagcagcaggccgatggctccttcctggccgtgggcagggtcctgaacaaggacatccagggtgggatccacggcactgtcccgctgacagcctacgtggtggttgctctcctggaaacaggcacagcctcagaggaggagagaggctccactgacaaagcgaggcacttcctggagtctgctgcgcccctggccatggacccttatagctgtgccctgactacctacgcgctgaccctgctccgcagcccggcagcccctgaggcactgcgcaagctccgtagcctggccatcatgcgagatggggtcacccactggagcctgtcaaattcctgggacgtggacaagggcacattcttgagcttcagtgacagggtctctcagtcagtggtctcggccgaggtggaaatgacagcctacgcccttctgacctacactctgctgggtgacgtggctgccgccctgcctgtggtgaagtggctgtcccagcagcgaaatgcacttgggggcttctcctccactcaggacacctgcgtggctctgcaggccttggctgaatatgccatcttgtcctatgctggaggcatcaacctcactgtctccctggcctccaccaacctggactaccaggaaaccttcgagctgcacaggaccaaccagaaggttctgcagacagcagcgatccccagcctccccacggggctgtttgtgagtgccaagggggacggctgctgcctgatgcagattgatgtcacctacaatgtgcctgacccggtggccaagccagctttccagctgctcgtaagcctccaggagcctgaggcccagggacgcccgccccccatgcctgcctccgcagctgagggttcccgaggagactggcccccagctgacgatgatgacccagcggccgatcagcatcaccaggaatacaaggtgatgctggaggtgtgcaccaggtggctgcatgcagggtcttccaatatggctgtcctggaggtgcccctgctgtcaggcttccgggcagacatcgagagcctggagcagctgctccttgacaagcacatggggatgaagaggtatgaagtggctggacgccgagtgctcttctactttgatgagatccccagccggtgcctgacgtgcgtgcggttccgtgctctccgggagtgcgtggtgggcaggacgtcggcgctgccagtctccgtgtacgactactacgaacccgccttcgaggccactcgcttctacaacgtcagcacccacagcccactcgcccgggaactgtgcgccggacccgcgtgcaacgaagtggagcgcgcccctgcccggggcccgggctggttccccggcgagtcgggccctgccgtggcccctgaggagggggcggcgatcgcgcgatgcggctgcgaccacgactgcggcgcccaggggaacccggtgtgcggctccgacggggtggtctacgccagcgcctgccgcctgcgggaggccgcctgccgccaggccgcgcccctggagcccgcgcctcccagctgctgcgccctcgagcagcggctgccggcctcgtcgtcctccacctacggggatgacctggcttctgtggccccggggcctttacagcaggacgtgaagctgaatggagccggccttgaggtggaggactcagaccctgagcctgaaggggaggcggaggacagggtcacagccgggcctcggcctcctgtgagcagcgggaacctggaaagcagcacccagagcgccagcccgttccacagatggggccagactccggcccctcagagacatagtggccgggtggtgggggcccacaggccagggcttctgagccctgtcttcgtctacagcccagcctttcagagtggtggggaggagggtttatggatgtcaaacacctgcaccttgagataatcctacaaccacatgcagttgtgggaccgcagtttggtcctggggaccattcatacccacacacccagcttgtgcctgtggttaacatctcagaaaactctggtaaatgatcactccaggatattgacaagaatacacgttactgatcttactcacatgtt

SEQ ID NO: 112709 - DNA, 526 bp, Homo sapiens
  Payload ID: 2056
  Gene Symbol: CPAMD8
  Gene Name: C3 and PZP-like, alpha-2-macroglobulin domain containing 8
  ENST ID: ENST00000599287
  CDS Start-End: 1-526
ctgctccttgacaagcacatggggatgaagaggtatgaagtggctggacgccgagtgctcttctactttgatgagatccccagccggtgcctgacgtgcgtgcggttccgtgctctccgggagtgcgtggtgggcaggacgtcggcgctgccagtctccgtgtacgactactacgaacccgccttcgaggccactcgcttctacaacgtcagcacccacagcccactcgcccgggaactgtgcgccggacccgcgtgcaacgaagtggagcgcgcccctgcccggggcccgggctggttccccggcgagtcgggccctgccgtggcccctgaggagggggcggcgatcgcgcgatgcggctgcgaccacgactgcggcgcccaggggaacccggtgtgcggctccgacggggtggtctacgccagcgcctgccgcctgcgggaggccgcctgccgccaggccgcgcccctggagcccgcgcctcccagctgctgcgccctcgcaggacgtgaagctgaatggagcc

SEQ ID NO: 112710 - DNA, 2481 bp, Homo sapiens
  Payload ID: 2056
  Gene Symbol: CPAMD8
  Gene Name: C3 and PZP-like, alpha-2-macroglobulin domain containing 8
  ENST ID: ENST00000594249
  CDS Start-End: 1-1016
ttgtgagtgccaagggggacggctgctgcctgatgcagattgatgtcacctacaatgtgcctgacccggtggccaagccagctttccagctgctcgtaagcctccaggagcctgaggcccagggacgcccgccccccatgcctgcctccgcagctgagggttcccgaggagactggcccccagctgacgatgatgacccagcggccgatcagcatcaccaggaatacaaggtgatgctggaggtgtgcaccaggtggctgcatgcagggtcttccaatatggctgtcctggaggtgcccctgctgtcaggcttccgggcagacatcgagagcctggagcagctgctccttgacaagcacatggggatgaagaggtatgaagtggctggacgccgagtgctcttctactttgatgagatccccagccggtgcctgacgtgcgtgcggttccgtgctctccgggagtgcgtggtgggcaggacgtcggcgctgccagtctccgtgtacgactactacgaacccgccttcgaggccactcgcttctacaacgtcagcacccacagcccactcgcccgggaactgtgcgccggacccgcgtgcaacgaagtggagcgcgcccctgcccggggcccgggctggttccccggcgagtcgggccctgccgtggcccctgaggagggggcggcgatcgcgcgatgcggctgcgaccacgactgcggcgcccaggggaacccggtgtgcggctccgacggggtggtctacgccagcgcctgccgcctgcgggaggccgcctgccgccaggccgcgcccctggagcccgcgcctcccagctgctgcgccctcgagcagcggctgccggcctcgtcgtcctccacctacggggatgacctggcttctgtggccccggggcctttacagcaggacgtgaagctgaatggagccggccttgaggtggaggactcagaccctgagcctgaaggggaggcggaggacagtcagagcggcttctcttcctaacggctgccctgctgagagcaggacgacaccatctggctgcatcctgtccctatcagcctgtgactctgtatggtgggtgggcagacctcagcccaggtgacacctgcctctaaatgaacccaaggaacagaatgacagagatctgcccgtccctaggatgagactcttgggacccaggtgtgggctcagcagtcaccggtgtggtgcaggggggacagctggaggtcccttgggagatcccccaccttcctagctacagctggagctccaagcaccccaaccccccagccttggagctgggcatcattttcctggggccacggcagctcccacagcctgacattctgttcccgggagaagaaacattcccagaaagcactcgtgtggccaaaagcctctttctgagcaaacacgatgtggactaaattagcaaaacatccagccggtgggcaacttcaaaacggaacaggctgcgtttctctgaaacacaaagccccggcctccctttggggcacccaggaccccaaattgccctaagactgtcccagctctcgcaccctctgccttcgccccccggggacctcgggctcacatcacaaggccctgcggggaagcagatggctctcagcaaatgcactttcagcttccggctgccggggctgggtgaccccggtgcttcctcaccgtgagttcctgatgtcctcgtgcccagaggaccagcccactcccagggcccccaggcccagaacctgcctgccttggggggccctaccagctgcctgccaccagtaccagcagactttgattcccctttgtgacccctggcacctgcttatgtctgcatttgcccatcttctccggggtggtatttatttcagccaacaccgctcagccctgatctctgccagcacggaggcccctcgctgcctgtgagatcaaggtctgaggctgccctggccggtgggttccccacccctggcaccctacaagcgacaggccctgtggctccttcctcagcccgaggccccgtgcccacttgctgtagaggatgttgtaagataaaacctcatctccagggtcacagccgggcctcggcctcctgtgagcagcgggaacctggaaagcagcacccagagcgccagcccgttccacagatggggccagactccggcccctcagagacatagtggccgggtggtgggggcccacaggccagggcttctgagccctgtcttcgtctacagcccagcctttcagagtggtggggaggagggtttatggatgtcaaacacctgcaccttgagataatcctacaaccacatgcagttgtgggaccgcagtttggtcctggggaccattcatacccacacacccagcttgtgcctgtggttaacatctcagaaaactctggtaaatgatcactccaggatattgacaagaatacacgttactgatcttactcaca

SEQ ID NO: 112711 - DNA, 466 bp, Homo sapiens
  Payload ID: 2056
  Gene Symbol: CPAMD8
  Gene Name: C3 and PZP-like, alpha-2-macroglobulin domain containing 8
  ENST ID: ENST00000598792
  CDS Start-End: 1-171
aggactcagaccctgagcctgaaggggaggcggaggacagagcggcttctcttcctaacggctgccctgctgagagcaggacgacaccatctggctgcatcctgtccctatcagcctgtgactctgtatggtgggtgggcagacctcagcccaggtgacacctgcctctaaatgaacccaaggaacagaatgacagagatctgcccgtccctaggatgagactcttgggacccaggtgtgggctcagcagtcaccggtgtggtgcaggggggacagctggaggtcccttgggagatcccccaccttcctagctacagctggagctccaagcaccccaaccccccagccttggagctgggcatcattttcctggggccacggcagctcccacagcctgacattctgttcccgggagaagaaacattcccagaaagcactcgtgtggccaaaagcctctttctgagca

SEQ ID NO: 112712 - DNA, 1661 bp, Homo sapiens
  Payload ID: 2057
  Gene Symbol: C7orf55-LUC7L2
  Gene Name: C7orf55-LUC7L2 readthrough
  ENST ID: ENST00000541515
  CDS Start-End: 26-1402
accacgctcggagaaggacaggacaatggcggccttagggtccccgtcgcacacttttcgaggacttctgcgggagttgcgctacctgagcgcggccaccggccgaccctatcgcgacaccgcggcctatcggtaccttgtgaaggctttccgtgcacatcgggtcaccagtgaaaagttgtgcagagcccaacatgagcttcatttccaagctgccacctatctctgcctcctgcgtagcatccggaaacatgtggccctacatcaggaatttcatggcaagggagatacaactcgtcaacgaatcaaattcagtgatgacagagtatgcaagagtcaccttctcaactgttgtcctcatgatgtcctttctggaactagaatggatcttggagaatgtctgaaagtccatgacctggctttaagagcggattatgaaattgcatccaaagaacaagattttttctttgaacttgatgccatggatcatctgcagtcattcattgcagattgtgatcgtagaacagaagtggccaagaaaagattagcagaaactcaagaagagattagtgctgaagtagcagcaaaggcagaacgtgttcatgagttaaatgaagaaattggtaaattgttagccaaggtggaacaactaggagctgaagggaatgtggaggaatcccagaaagtaatggatgaagtagagaaagcacgggcaaagaaaagagaagcagaggaagtttatcggaattctatgccagcttccagttttcagcagcagaaacttcgagtctgtgaagtctgctctgcctatttaggacttcatgataatgacagacgactggctgatcattttgggggtaaactgcacctgggatttattgaaataagagagaagcttgaagaattaaagagagtcgtagctgagaagcaggagaaaagaaaccaggaacggctgaaacgaagagaagagagagagagagaagaaagggagaagctgaggaggtcccgatcacacagcaagaatccaaaaagatccaggtccagagagcatcgcagacatcgatctcgctccatgtcacgtgaacgcaagaggagaactcgatccaaatctcgggagaaacgccatcgccacaggtcccgctccagcagccgtagccgcagccgtagccaccagagaagtcggcacagttctagagataggagcagagaacgatccaagaggagatcctcaaaagaaagattcagagaccaagacttagcatcatgtgacagagacaggagttcaagagacagatcacctcgtgacagagatcggaaagataagaagcggtcctatgagagtgctaatggcagatcagaagacaggaggagctctgaagagcgcgaagcaggggagatctaactagctgtgtacatttcttcagtccttaagcttcctacggagttacgtactattgtttagttcacagctgttcagggtgacagtgagcagatccagacaccagatccagctaggctagatgtacagtatctaacttgatctgaactgaacctgttttccttgatgatgcctaaaactacatccatagtttctggtgaacctgtaatacagttctgaaagtacagttttatataataagatgctgatctctttattcttt

SEQ ID NO: 112713 - DNA, 2949 bp, Homo sapiens
  Payload ID: 2058
  Gene Symbol: C8orf44-SGK3
  Gene Name: C8orf44-SGK3 readthrough
  ENST ID: ENST00000519289
  CDS Start-End: 568-2058
agttatggcagtgggagtcgaagcgagggtctgaagttcacgactactagaaggggaggggagtggaaaggctctcagtgaaaaaggtattagaattatttctgaattatcagtctctcatttgtgctttggagaagcagaaaaggcaaaaggggtctttggccatcttctgctggagcttccagggaggatgtgtctccaagagaccagatgtaccgagtttgaaatcccagaagcccaagaggaaaagaatcacagggaggaaaagactgtccaaaggcttctggagtcttctgttctctaaccttggaaggttttgaacaatatttctcagaggatagcctttcacttattcatctgtccagcatgactcatccccgggagtgttgaatgtctcctgtcttcctccagcattcacaaaccaggaacggctagctttttgacctgttgcatgatggaatttgaacattacttcaagaggttttgtattttggattagttaattgggtttgtcctctgctgactgtttcttcggatgcattttttggtgtgctcttgagggattaaatgcaaagagatcacaccatggactacaaggaaagctgcccaagtgtaagcattcccagctccgatgaacacagagagaaaaagaagaggtttactgtttataaagttctggtttcagtgggaagaagtgaatggtttgtcttcaggagatatgcagagtttgataaactttataacactttaaaaaaacagtttcctgctatggccctgaagattcctgccaagagaatatttggtgataattttgatccagattttattaaacaaagacgagcaggactaaacgaattcattcagaacctagttaggtatccagaactttataaccatccagatgtcagagcattccttcaaatggacagtccaaaacaccagtcagatccatctgaagatgaggatgaaagaagttctcagaagctacactctacctcacagaacatcaacctgggaccgtctggaaatcctcatgccaaaccaactgactttgatttcttaaaagttattggaaaaggcagctttggcaaggttcttcttgcaaaacggaaactggatggaaaattttatgctgtcaaagtgttacagaaaaaaatagttctcaacagaaaagagcaaaaacatattatggctgaacgtaatgtgctcttgaaaaatgtgaaacatccgtttttggttggattgcattattccttccaaacaactgaaaagctttattttgttctggattttgttaatggaggggagctttttttccacttacaaagagaacggtcctttcctgagcacagagctaggttttacgctgctgaaattgctagtgcattgggttacttacattccatcaaaatagtatacagagacttgaaaccagaaaatattcttttggattcagtaggacatgttgtcttaacagattttgggctttgtaaagaaggaattgctatttctgacaccactaccacattttgtgggacaccagagtatcttgcacctgaagtaattagaaaacagccctatgacaatactgtagattggtggtgccttggggctgttctgtatgaaatgctgtatggattgcctcctttttattgccgagatgttgctgaaatgtatgacaatatccttcacaaacccctaagtttgaggccaggagtgagtcttacagcctggtccattctggaagaactcctagaaaaagacaggcaaaatcgacttggtgccaaggaagactttcttgaaattcagaatcatcctttttttgaatcactcagctgggctgaccttgtacaaaagaagattccaccaccatttaatcctaatgtggctggaccagatgatatcagaaactttgacacagcatttacagaagaaacagttccatattctgtgtgtgtatcttctgactattctatagtgaatgccagtgtattggaggcagatgatgcattcgttggtttctcttatgcacctccttcagaagacttatttttgtgagcagtttgccattcagaaaccattgagcaaaataagtctatagatgggactgaaacttctatttgtgtgaatatattcaaatatgtataactagtgcctcatttttatatgtaatgatgaaaactatgaaaaaatgtattttcttctatgtgcaagaaaaatagggcatttcaaagagctgttttgattaaaatttatattcttgtttaataagcttatttttaaacaatttaaaagctattattcttagcattaacctatttttaaagaaaccttttttgctattgactgttttttccctctaagtttacactaacatctacccaagatagactgttttttaacagtcaatttcagttcagctaacatatattaatacctttgtaactctttgctatggcttttgttatcacaccaaaactatgcaattggtacatggttgtttaagaagaaaccgtatttttccatgataaatcactgtttgaaatatttggttcatggtatgatcgaaatgtaaaagcataattaacacattggctgctagttaacaattggaataactttattctgcagatcatttaagaagtaacaggccgggcgcggtggctcacgcctgtaatcccagcactttgggaggctgaggcgggcagatcacctgaggtcaggagttggagaccagcctgaccaacatggacaaaccccgtctctactaaaaatacaaaattggcagggtgtggtggcacatgcctataatcccagctacttgggaggctaaggcaggagaatcgcttgaacccgggaggcggaggttgcagtgagccgagatcgcaccattgcactcctgcctgggcaacaagagtgaaactccatctccaaaaaaaaaaagaaaaa

SEQ ID NO: 112714 - DNA, 4591 bp, Homo sapiens
  Payload ID: 2059
  Gene Symbol: CADPS
  Gene Name: Ca++-dependent secretion activator
  Uniprot ID: Q9ULU8
  ENST ID: ENST00000283269
  CDS Start-End: 213-4157
ctcctcccttcgcgcttctgggtctgagcccagctcgcgaccgccgggcagaggatcagtcgcggcggccgaggctgagcagcagcgctctcgctccctgacctggggagaagcgcccacccgggagagctgatccccggctgcctccagcgccccccaccttttgcactccaagccgggggctccagagaccccgctccccaggcgccactatgctggacccttcgtccagcgaagaagaatcggatgagatcgtggaggaggagagcggcaaggaggtgctcggctcggccccgtccggcgcgcgcctgtctcccagccgtaccagcgagggctcggccggcagcgccgggctggggggcggcggcgccggcgccggagccggggtgggtgcaggcggcggcgggggcagcggcgcgagcagcggcggcggggccggggggctgcaacccagcagccgcgctggcggcggccggccctccagccccagcccgtcggtggtgagcgagaaggagaaggaagagttggagcggctgcagaaagaggaggaggagaggaagaagaggctgcagctgtatgtgttcgtgatgcgctgcatcgcctacccctttaatgccaagcagcccaccgacatggctcgccggcagcagaagatcagcaaacagcagctgcagacagtcaaggaccggtttcaggctttcctcaatggggaaacccagatcatggctgacgaagccttcatgaacgctgtgcagagttactatgaggtgttcctgaagagcgaccgtgtggcccgcatggttcagagtggaggctgttccgccaacgactcccgggaggtcttcaagaagcacattgagaagagagtgcgcagcctgcctgagattgacggcctcagcaaggagactgtgctgagctcctggatggccaaatttgatgccatctaccgtggagaagaggacccgcggaagcagcaggcccggatgacagccagcgcagcctccgagctgattctgagcaaggagcaactctatgagatgttccagaacattcttgggatcaagaagttcgaacatcagctcctttacaatgcctgccagctggacaatccagatgagcaagcagcccagatcagacgagagctggatggacgtctacaaatggcagaccaaatagccagggaacgcaaatttcccaagtttgtatccaaagaaatggaaaacatgtacattgaggagctgaagtcatctgtcaacctgctcatggccaacttggagagcatgccggtatccaaaggcggggagttcaagctccagaaactcaaacgcagccacaatgcttccatcatcgacatgggcgaggagagtgagaaccagctctccaagtcagatgtcgtgctgtctttctcattggaggtggtaattatggaagtccaaggcctcaaatctttggctccaaatcgcatcgtatattgcacaatggaggtggaaggaggagagaaactacagactgatcaggccgaggcttctaaaccaacctggggcacccagggtgacttctccacaacccatgcactgccagctgtgaaggtgaagctgttcacagagagcacaggcgtcctggcgttggaggacaaggagcttgggcgggttattctccatcccaccccgaacagccccaaacagtcagagtggcacaaaatgacagtctccaaaaactgccccgaccaagatctcaaaatcaaacttgctgtccgaatggataagcctcaaaacatgaagcattctgggtatttatgggccatcggtaagaatgtctggaagagatggaagaaaaggttttttgtattggtgcaggtcagtcagtacacgtttgccatgtgcagttatcgggagaagaaagcggagcctcaggaacttctacaattggatggctacactgtggattacaccgacccccagccaggtttggagggtggccgagccttcttcaatgctgtcaaggagggagacaccgtgatatttgccagtgacgatgaacaagaccgcatcctgtgggtccaggccatgtatcgggccacggggcagtcacacaagcctgtgcccccgacccaagtccagaaactcaacgccaagggaggaaatgtacctcagctggatgcccctatctctcaattttacgcagatagagctcaaaaacatggcatggatgaatttatctcttccaacccctgtaactttgaccacgcttccctctttgagatggtacaacgccttactttggatcacagacttaatgattcctattcttgcctgggctggttcagtcctggccaggtgtttgtactagacgagtattgcgcccgaaatggagtccgggggtgtcaccgacatctctgctacctcagagacttgcttgaacgggcagaaaatggcgccatgatcgaccccacccttcttcactacagctttgccttctgtgcatcccatgtccatgggaacaggcctgatggaattggaactgtgactgttgaagaaaaggaacgttttgaagaaatcaaagagaggctccgagttctgctagaaaatcagattacacattttaggtattgctttccatttggtcgacctgaaggtgctttgaaagctactctctcactcttggaaagggttttgatgaaagatattgttaccccagtgccacaagaggaggtaaaaacagttatccgtaaatgtctggaacaggctgcgttagtcaactattctcggctctcagagtatgccaaaatcgaagggaaaaagagagaaatgtatgagcatcctgtcttctgcttggcctcccaagtgatggatttaaccattcaaaatgtaggccggttaatcactcctgccaaaaagcttgaagatacaatacgtcttgctgaactagtcattgaagttcttcagcaaaatgaggagcaccacgcagaggcctttgcgtggtggtcagatttaatggtggagcatgcggagacgttcctgtcactctttgcagtagacatggatgcagccttagaggtgcaacctccagacacatgggacagttttccactatttcagctgctgaatgattttctccgtactgactataatttgtgcaatggaaaatttcacaaacacctgcaagacctgtttgccccacttgttgttagatatgtggatctgatggagtcctcaattgcacaatccattcacaggggctttgagcgggagtcatgggaaccagtcaataatgggtcaggcacctcagaagatctgttttggaaacttgacgcccttcagaccttcattcgggacctgcactggcctgaagaagagtttggaaagcacctggaacaacggctgaagttgatggcaagtgacatgatcgaatcttgtgtcaaaagaaccaggattgcatttgaagttaagctgcaaaaaaccagtcgatcaacagattttcgagtcccacagtcaatatgcaccatgtttaatgttatggttgatgccaaagctcaatcaacaaaactttgcagcatggaaatgggccaagagcatcaataccattcaaaaatagacgaactaattgaagaaactgttaaagaaatgataacactcttggttgcaaagttcgttactatcttggaaggagtgctggcaaaattatccagatatgacgaagggactttgttttcttcttttctgtcatttaccgtgaaggcagcttccaaatatgtggatgtacctaaacccgggatggacgtggccgacgcctacgtgactttcgtccgccattctcaggatgtcctgcgtgataaggtcaatgaggagatgtacatagaaaggttatttgatcaatggtacaacagctccatgaacgtgatctgcacctggttgacggaccggatggacttacagcttcatatttatcagttgaaaacactaattaggatggtaaagaaaacctacagagatttccgattgcaaggggtcctggactccaccttaaacagcaagacctatgaaacgatccggaaccgtctcactgtggaggaagccacagcatcagtgagtgaaggtgggggactgcagggcatcagcatgaaggacagcgatgaggaagacgaagaagacgattagaccatttggtcctagagtctgctgggacagagtcctgtaatcagtgcatgtccttagtctgttagttaaacccattaggaattttctgtcaactaccatgcccatgagatgtttatcaatacaactgccattttagctatgtggtaccaagattagcaaatgaccttcatatccactgatttcctgatgtccatgtctatatgtttacaagcaatatggagcaccattctttaaatactgttcatggagaatacatagtctaaccactaggcgtgtccctgttatcagcaaagatcaatgatgcttcattcatgtactatgtatgcattggtggtaaatggatgtgagggcaagtacatcaagtacattcactctgtttcacgtatgtggatgccagttaattaaatgagtacgtaaataaattaattaaaaca

SEQ ID NO: 112715 - DNA, 5190 bp, Homo sapiens
  Payload ID: 2059
  Gene Symbol: CADPS
  Gene Name: Ca++-dependent secretion activator
  Uniprot ID: Q9ULU8
  ENST ID: ENST00000357948
  CDS Start-End: 310-4134
tcagcagccgcagatggcatccggctgcgggctcggggctcgcaattgattctcccccttgcccacctcgagtccacggacgcacctctcccttcccctcctcccttcgcgcttctgggtctgagcccagctcgcgaccgccgggcagaggatcagtcgcggcggccgaggctgagcagcagcgctctcgctccctgacctggggagaagcgcccacccgggagagctgatccccggctgcctccagcgccccccaccttttgcactccaagccgggggctccagagaccccgctccccaggcgccactatgctggacccttcgtccagcgaagaagaatcggatgagatcgtggaggaggagagcggcaaggaggtgctcggctcggccccgtccggcgcgcgcctgtctcccagccgtaccagcgagggctcggccggcagcgccgggctggggggcggcggcgccggcgccggagccggggtgggtgcaggcggcggcgggggcagcggcgcgagcagcggcggcggggccggggggctgcaacccagcagccgcgctggcggcggccggccctccagccccagcccgtcggtggtgagcgagaaggagaaggaagagttggagcggctgcagaaagaggaggaggagaggaagaagaggctgcagctgtatgtgttcgtgatgcgctgcatcgcctacccctttaatgccaagcagcccaccgacatggctcgccggcagcagaagatcagcaaacagcagctgcagacagtcaaggaccggtttcaggctttcctcaatggggaaacccagatcatggctgacgaagccttcatgaacgctgtgcagagttactatgaggtgttcctgaagagcgaccgtgtggcccgcatggttcagagtggaggctgttccgccaacgactcccgggaggtcttcaagaagcacattgagaagagagtgcgcagcctgcctgagattgacggcctcagcaaggagactgtgctgagctcctggatggccaaatttgatgccatctaccgtggagaagaggacccgcggaagcagcaggcccggatgacagccagcgcagcctccgagctgattctgagcaaggagcaactctatgagatgttccagaacattcttgggatcaagaagttcgaacatcagctcctttacaatgcctgccagctggacaatccagatgagcaagcagcccagatcagacgagagctggatggacgtctacaaatggcagaccaaatagccagggaacgcaaatttcccaagtttgtatccaaagaaatggaaaacatgtacattgaggagctgaagtcatctgtcaacctgctcatggccaacttggagagcatgccggtatccaaaggcggggagttcaagctccagaaactcaaacgcagccacaatgcttccatcatcgacatgggcgaggagagtgagaaccagctctccaagtcagatgtcgtgctgtctttctcattggaggtggtaattatggaagtccaaggcctcaaatctttggctccaaatcgcatcgtatattgcacaatggaggtggaaggaggagagaaactacagactgatcaggccgaggcttctaaaccaacctggggcacccagggtgacttctccacaacccatgcactgccagctgtgaaggtgaagctgttcacagagagcacaggcgtcctggcgttggaggacaaggagcttgggcgggttattctccatcccaccccgaacagccccaaacagtcagagtggcacaaaatgacagtctccaaaaactgccccgaccaagatctcaaaatcaaacttgctgtccgaatggataagcctcaaaacatgaagcattctgggtatttatgggccatcggtaagaatgtctggaagagatggaagaaaaggttttttgtattggtgcaggtcagtcagtacacgtttgccatgtgcagttatcgggagaagaaagcggagcctcaggaacttctacaattggatggctacactgtggattacaccgacccccagccaggtttggagggtggccgagccttcttcaatgctgtcaaggagggagacaccgtgatatttgccagtgacgatgaacaagaccgcatcctgtgggtccaggccatgtatcgggccacggggcagtcacacaagcctgtgcccccgacccaagtccagaaactcaacgccaagggaggaaatgtacctcagctggatgcccctatctctcaattttacgcagatagagctcaaaaacatggcatggatgaatttatctcttccaacccctgtaactttgaccacgcttccctctttgagatgggctggttcagtcctggccaggtgtttgtactagacgagtattgcgcccgaaatggagtccgggggtgtcaccgacatctctgctacctcagagacttgcttgaacgggcagaaaatggcgccatgatcgaccccacccttcttcactacagctttgccttctgtgcatcccatgtccatgggaacaggcctgatggaattggaactgtgactgttgaagaaaaggaacgttttgaagaaatcaaagagaggctccgagttctgctagaaaatcagattacacattttaggtattgctttccatttggtcgacctgaaggtgctttgaaagctactctctcactcttggaaagggttttgatgaaagatattgttaccccagtgccacaagaggaggtaaaaacagttatccgtaaatgtctggaacaggctgcgttagtcaactattctcggctctcagagtatgccaaaatcgaagaaaatgtaggccggttaatcactcctgccaaaaagcttgaagatacaatacgtcttgctgaactagtcattgaagttcttcagcaaaatgaggagcaccacgcagaggcctttgcgtggtggtcagatttaatggtggagcatgcggagacgttcctgtcactctttgcagtagacatggatgcagccttagaggtgcaacctccagacacatgggacagttttccactatttcagctgctgaatgattttctccgtactgactataatttgtgcaatggaaaatttcacaaacacctgcaagacctgtttgccccacttgttgttagatatgtggatctgatggagtcctcaattgcacaatccattcacaggggctttgagcgggagtcatgggaaccagtcaataatgggtcaggcacctcagaagatctgttttggaaacttgacgcccttcagaccttcattcgggacctgcactggcctgaagaagagtttggaaagcacctggaacaacggctgaagttgatggcaagtgacatgatcgaatcttgtgtcaaaagaaccaggattgcatttgaagttaagctgcaaaaaaccagtcgatcaacagattttcgagtcccacagtcaatatgcaccatgtttaatgttatggttgatgccaaagctcaatcaacaaaactttgcagcatggaaatgggccaagagcatcaataccattcaaaaatagacgaactaattgaagaaactgttaaagaaatgataacactcttggttgcaaagttcgttactatcttggaaggagtgctggcaaaattatccagatatgacgaagggactttgttttcttcttttctgtcatttaccgtgaaggcagcttccaaatatgtggatgtacctaaacccgggatggacgtggccgacgcctacgtgactttcgtccgccattctcaggatgtcctgcgtgataaggtcaatgaggagatgtacatagaaaggttatttgatcaatggtacaacagctccatgaacgtgatctgcacctggttgacggaccggatggacttacagcttcatatttatcagttgaaaacactaattaggatggtaaagaaaacctacagagatttccgattgcaaggggtcctggactccaccttaaacagcaagacctatgaaacgatccggaaccgtctcactgtggaggaagccacagcatcagtgagtgaaggtgggggactgcagggcatcagcatgaaggacagcgatgaggaagacgaagaagacgattagaccatttggtcctagagtctgctgggacagagtcctgtaatcagtgcatgtccttagtctgttagttaaacccattaggaattttctgtcaactaccatgcccatgagatgtttatcaatacaactgccattttagctatgtggtaccaagattagcaaatgaccttcatatccactgatttcctgatgtccatgtctatatgtttacaagcaatatggagcaccattctttaaatactgttcatggagaatacatagtctaaccactaggcgtgtccctgttatcagcaaagatcaatgatgcttcattcatgtactatgtatgcattggtggtaaatggatgtgagggcaagtacatcaagtacattcactctgtttcacgtatgtggatgccagttaattaaatgagtacgtaaataaattaattaaaacacatagatctgctttgtgtttttatttttattttttgaaaaacaaaaggcaagtctccaacaattaacttttgatgctttctgttcccctaaaaccaaaaaatgaaccccttgtgtcgttgttaacccatcctttcatttactcatataattagccaaaaaaaaaaggatggctacataccaatggattgattctcttaattgccacggcaagggggcgatcctatcatgacttaacatcaagcgcgcagttcaaaactactgtcttctgtcaaagttttctcctcttaaatgttattttgcttttacgtctcaactgtgtatgtaaaaaaaatgaatatttaaattacaaccctagactaaaaatgtgtttataataagatgtggatatttccttcagtagattgtaaccataatttaaattattttgttccacactgttttttatatctgtcatgtacattgcattttgatctgtaactgcacaaccctggggtttgctgcagagctatttctttccatgtaaagtagtggatccatcttgcttttgccttatataaagcctacagttatggaagtgtggaaaactgtggcttctcaataaatattcagatgtcctaagaa

SEQ ID NO: 112716 - DNA, 5471 bp, Homo sapiens
  Payload ID: 2059
  Gene Symbol: CADPS
  Gene Name: Ca++-dependent secretion activator
  Uniprot ID: Q9ULU8
  ENST ID: ENST00000383710
  CDS Start-End: 351-4412
acagcttgcaacactcggcatcttttctggaggcgcctccttcagcagccgcagatggcatccggctgcgggctcggggctcgcaattgattctcccccttgcccacctcgagtccacggacgcacctctcccttcccctcctcccttcgcgcttctgggtctgagcccagctcgcgaccgccgggcagaggatcagtcgcggcggccgaggctgagcagcagcgctctcgctccctgacctggggagaagcgcccacccgggagagctgatccccggctgcctccagcgccccccaccttttgcactccaagccgggggctccagagaccccgctccccaggcgccactatgctggacccttcgtccagcgaagaagaatcggatgagatcgtggaggaggagagcggcaaggaggtgctcggctcggccccgtccggcgcgcgcctgtctcccagccgtaccagcgagggctcggccggcagcgccgggctggggggcggcggcgccggcgccggagccggggtgggtgcaggcggcggcgggggcagcggcgcgagcagcggcggcggggccggggggctgcaacccagcagccgcgctggcggcggccggccctccagccccagcccgtcggtggtgagcgagaaggagaaggaagagttggagcggctgcagaaagaggaggaggagaggaagaagaggctgcagctgtatgtgttcgtgatgcgctgcatcgcctacccctttaatgccaagcagcccaccgacatggctcgccggcagcagaagatcagcaaacagcagctgcagacagtcaaggaccggtttcaggctttcctcaatggggaaacccagatcatggctgacgaagccttcatgaacgctgtgcagagttactatgaggtgttcctgaagagcgaccgtgtggcccgcatggttcagagtggaggctgttccgccaacgactcccgggaggtcttcaagaagcacattgagaagagagtgcgcagcctgcctgagattgacggcctcagcaaggagactgtgctgagctcctggatggccaaatttgatgccatctaccgtggagaagaggacccgcggaagcagcaggcccggatgacagccagcgcagcctccgagctgattctgagcaaggagcaactctatgagatgttccagaacattcttgggatcaagaagttcgaacatcagctcctttacaatgcctgccagctggacaatccagatgagcaagcagcccagatcagacgagagctggatggacgtctacaaatggcagaccaaatagccagggaacgcaaatttcccaagtttgtatccaaagaaatggaaaacatgtacattgaggagctgaagtcatctgtcaacctgctcatggccaacttggagagcatgccggtatccaaaggcggggagttcaagctccagaaactcaaacgcagccacaatgcttccatcatcgacatgggcgaggagagtgagaaccagctctccaagtcagatgtcgtgctgtctttctcattggaggtggtaattatggaagtccaaggcctcaaatctttggctccaaatcgcatcgtatattgcacaatggaggtggaaggaggagagaaactacagactgatcaggccgaggcttctaaaccaacctggggcacccagggtgacttctccacaacccatgcactgccagctgtgaaggtgaagctgttcacagagagcacaggcgtcctggcgttggaggacaaggagcttgggcgggttattctccatcccaccccgaacagccccaaacagtcagagtggcacaaaatgacagtctccaaaaactgccccgaccaagatctcaaaatcaaacttgctgtccgaatggataagcctcaaaacatgaagcattctgggtatttatgggccatcggtaagaatgtctggaagagatggaagaaaaggttttttgtattggtgcaggtcagtcagtacacgtttgccatgtgcagttatcgggagaagaaagcggagcctcaggaacttctacaattggatggctacactgtggattacaccgacccccagccaggtttggagggtggccgagccttcttcaatgctgtcaaggagggagacaccgtgatatttgccagtgacgatgaacaagaccgcatcctgtgggtccaggccatgtatcgggccacggggcagtcacacaagcctgtgcccccgacccaagtccagaaactcaacgccaagggaggaaatgtacctcagctggatgcccctatctctcaattttacgcagatagagctcaaaaacatggcatggatgaatttatctcttccaacccctgtaactttgaccacgcttccctctttgagatggtacaacgccttactttggatcacagacttaatgattcctattcttgcctgggctggttcagtcctggccaggtgtttgtactagacgagtattgcgcccgaaatggagtccgggggtgtcaccgacatctctgctacctcagagacttgcttgaacgggcagaaaatggcgccatgatcgaccccacccttcttcactacagctttgccttctgtgcatcccatgtccatgggaacaggcctgatggaattggaactgtgactgttgaagaaaaggaacgttttgaagaaatcaaagagaggctccgagttctgctagaaaatcagattacacattttaggtattgctttccatttggtcgacctgaaggtgctttgaaagctactctctcactcttggaaagggttttgatgaaagatattgttaccccagtgccacaagaggaggtaaaaacagttatccgtaaatgtctggaacaggctgcgttagtcaactattctcggctctcagagtatgccaaaatcgaagagaatcaaaaggatgcagaaaatgtaggccggttaatcactcctgccaaaaagcttgaagatacaatacgtcttgctgaactagtcattgaagttcttcagcaaaatgaggagcaccacgcagagccacatgttgataaaggagaagcctttgcgtggtggtcagatttaatggtggagcatgcggagacgttcctgtcactctttgcagtagacatggatgcagccttagaggtgcaacctccagacacatgggacagttttccactatttcagctgctgaatgattttctccgtactgactataatttgtgcaatggaaaatttcacaaacacctgcaagacctgtttgccccacttgttgttagatatgtggatctgatggagtcctcaattgcacaatccattcacaggggctttgagcgggagtcatgggaaccagtcaagagtttaaccagtaacctacccaatgtgaacctacccaatgtgaaccttcccaaagtaccaaatctaccagttaacatccctctaggcatcccacaaatgcctactttttcggcaccgtcatggatggctgctatatatgatgcggataatgggtcaggcacctcagaagatctgttttggaaacttgacgcccttcagaccttcattcgggacctgcactggcctgaagaagagtttggaaagcacctggaacaacggctgaagttgatggcaagtgacatgatcgaatcttgtgtcaaaagaaccaggattgcatttgaagttaagctgcaaaaaaccagtcgatcaacagattttcgagtcccacagtcaatatgcaccatgtttaatgttatggttgatgccaaagctcaatcaacaaaactttgcagcatggaaatgggccaagagcatcaataccattcaaaaatagacgaactaattgaagaaactgttaaagaaatgataacactcttggttgcaaagttcgttactatcttggaaggagtgctggcaaaattatccagatatgacgaagggactttgttttcttcttttctgtcatttaccgtgaaggcagcttccaaatatgtggatgtacctaaacccgggatggacgtggccgacgcctacgtgactttcgtccgccattctcaggatgtcctgcgtgataaggtcaatgaggagatgtacatagaaaggttatttgatcaatggtacaacagctccatgaacgtgatctgcacctggttgacggaccggatggacttacagcttcatatttatcagttgaaaacactaattaggatggtaaagaaaacctacagagatttccgattgcaaggggtcctggactccaccttaaacagcaagacctatgaaacgatccggaaccgtctcactgtggaggaagccacagcatcagtgagtgaaggtgggggactgcagggcatcagcatgaaggacagcgatgaggaagacgaagaagacgattagaccatttggtcctagagtctgctgggacagagtcctgtaatcagtgcatgtccttagtctgttagttaaacccattaggaattttctgtcaactaccatgcccatgagatgtttatcaatacaactgccattttagctatgtggtaccaagattagcaaatgaccttcatatccactgatttcctgatgtccatgtctatatgtttacaagcaatatggagcaccattctttaaatactgttcatggagaatacatagtctaaccactaggcgtgtccctgttatcagcaaagatcaatgatgcttcattcatgtactatgtatgcattggtggtaaatggatgtgagggcaagtacatcaagtacattcactctgtttcacgtatgtggatgccagttaattaaatgagtacgtaaataaattaattaaaacacatagatctgctttgtgtttttatttttattttttgaaaaacaaaaggcaagtctccaacaattaacttttgatgctttctgttcccctaaaaccaaaaaatgaaccccttgtgtcgttgttaacccatcctttcatttactcatataattagccaaaaaaaaaaggatggctacataccaatggattgattctcttaattgccacggcaagggggcgatcctatcatgacttaacatcaagcgcgcagttcaaaactactgtcttctgtcaaagttttctcctcttaaatgttattttgcttttacgtctcaactgtgtatgtaaaaaaaatgaatatttaaattacaaccctagactaaaaatgtgtttataataagatgtggatatttccttcagtagattgtaaccataatttaaattattttgttccacactgttttttatatctgtcatgtacattgcattttgatctgtaactgcacaaccctggggtttgctgcagagctatttctttccatgtaaagtagtggatccatcttgcttttgccttatataaagcctacagttatggaagtgtggaaaactgtggcttctcaataaatattcagatgtcctaagaatat

SEQ ID NO: 112717 - DNA, 570 bp, Homo sapiens
  Payload ID: 2059
  Gene Symbol: CADPS
  Gene Name: Ca++-dependent secretion activator
  ENST ID: ENST00000466621
  CDS Start-End: 1-570
aaagcacctggaacaacggctgaagttgatggcaagtgacatgatcgaatcttgtgtcaaaagaaccaggattgcatttgaagttaagctgcaaaaaaccagtcgatcaacagattttcgagtcccacagtcaatatgcaccatgtttaatgttatggttgatgccaaagctcaatcaacaaaactttgcagcatggaaatgggccaagagcatcaataccattcaaaaatagacgaactaattgaagaaactgttaaagaaatgataacactcttggttgcaaagttcgttactatcttggaaggagtgctggcaaaattatccagatatgacgaagggactttgttttcttcttttctgtcatttaccaaacccgggatggacgtggccgacgcctacgtgactttcgtccgccattctcaggatgtcctgcgtgataaggtcaatgaggagatgtacatagaaaggttatttgatcaatggtacaacagctccatgaacgtgatctgcacctggttgacggaccggatggacttacagcttcatatttatcagttgaaaacactaat

SEQ ID NO: 112718 - DNA, 719 bp, Homo sapiens
  Payload ID: 2059
  Gene Symbol: CADPS
  Gene Name: Ca++-dependent secretion activator
  ENST ID: ENST00000468271
  CDS Start-End: 1-719
acgcagatagagctcaaaaacatggcatggatgaatttatctcttccaacccctgtaactttgaccacgcttccctctttgagatggtacaacgccttactttggatcacagacttaatgattcctattcttgcctgggctggttcagtcctggccaggtgtttgtactagacgagtattgcgcccgaaatggagtccgggggtgtcaccgacatctctgctacctcagagacttgcttgaacgggcagaaaatggcgccatgatcgaccccacccttcttcactacagctttgccttctgtgcatcccatgtccatgggaacagtcaacaaatgcatgtgtaccttagtgggctgccaccaaatacagaccctgaagggagcaaaactccctccccacctgaaccagaagctaaaaaagataccaaaaaggaatccaaaaaaagaaaagattccaaaacccaggcaaatcaagagctgaaaaggcctgatggaattggaactgtgactgttgaagaaaaggaacgttttgaagaaatcaaagagaggctccgagttctgctagaaaatcagattacacattttaggtattgctttccatttggtcgacctgaaggtgctttgaaagctactctctcactcttggaaagggttttgatgaaagatattgttaccccagtgccacaagaggaggtaaaaacagttatccgtaaatgtctg

SEQ ID NO: 112719 - DNA, 933 bp, Homo sapiens
  Payload ID: 2059
  Gene Symbol: CADPS
  Gene Name: Ca++-dependent secretion activator
  ENST ID: ENST00000491424
  CDS Start-End: 1-933
taatgattcctattcttgcctgggctggttcagtcctggccaggtgtttgtactagacgagtattgcgcccgaaatggagtccgggggtgtcaccgacatctctgctacctcagagacttgcttgaacgggcagaaaatggcgccatgatcgaccccacccttcttcactacagctttgccttctgtgcatcccatgtccatgggaacaggcctgatggaattggaactgtgactgttgaagaaaaggaacgttttgaagaaatcaaagagaggctccgagttctgctagaaaatcagattacacattttaggtattgctttccatttggtcgacctgaaggtgctttgaaagctactctctcactcttggaaagggttttgatgaaagatattgttaccccagtgccacaagaggaggtaaaaacagttatccgtaaatgtctggaacaggctgcgttagtcaactattctcggctctcagagtatgccaaaatcgaagagaatcaaaaggatgcagaaaatgtaggccggttaatcactcctgccaaaaagcttgaagatacaatacgtcttgctgaactagtcattgaagttcttcagcaaaatgaggagcaccacgcagaggggaaagaggcctttgcgtggtggtcagatttaatggtggagcatgcggagacgttcctgtcactctttgcagtagacatggatgcagccttagaggtgcaacctccagacacatgggacagttttccactatttcagctgctgaatgattttctccgtactgactataatttgtgcaatggaaaatttcacaaacacctgcaagacctgtttgccccacttgttgttagatatgtggatctgatggagtcctcaattgcacaatccattcacaggggctttgagcgggagtcatgggaaccagtcaa

SEQ ID NO: 112720 - DNA, 2669 bp, Homo sapiens
  Payload ID: 2059
  Gene Symbol: CADPS
  Gene Name: Ca++-dependent secretion activator
  Uniprot ID: Q9ULU8
  ENST ID: ENST00000490353
  CDS Start-End: 1-1374
atgctggacccttcgtccagcgaagaagaatcggatgagatcgtggaggaggagagcggcaaggaggtgctcggctcggccccgtccggcgcgcgcctgtctcccagccgtaccagcgagggctcggccggcagcgccgggctggggggcggcggcgccggcgccggagccggggtgggtgcaggcggcggcgggggcagcggcgcgagcagcggcggcggggccggggggctgcaacccagcagccgcgctggcggcggccggccctccagccccagcccgtcggtggtgagcgagaaggagaaggaagagttggagcggctgcagaaagaggaggaggagaggaagaagaggctgcagctgtatgtgttcgtgatgcgctgcatcgcctacccctttaatgccaagcagcccaccgacatggctcgccggcagcagaagatcagcaaacagcagctgcagacagtcaaggaccggtttcaggctttcctcaatggggaaacccagatcatggctgacgaagccttcatgaacgctgtgcagagttactatgaggtgttcctgaagagcgaccgtgtggcccgcatggttcagagtggaggctgttccgccaacgactcccgggaggtcttcaagaagcacattgagaagagagtgcgcagcctgcctgagattgacggcctcagcaaggagactgtgctgagctcctggatggccaaatttgatgccatctaccgtggagaagaggacccgcggaagcagcaggcccggatgacagccagcgcagcctccgagctgattctgagcaaggagcaactctatgagatgttccagaacattcttgggatcaagaagttcgaacatcagctcctttacaatgcctgccagctggacaatccagatgagcaagcagcccagatcagacgagagctggatggacgtctacaaatggcagaccaaatagccagggaacgcaaatttcccaagtttgtatccaaagaaatggaaaacatgtacattgaggagctgaagtcatctgtcaacctgctcatggccaacttggagagcatgccggtatccaaaggcggggagttcaagctccagaaactcaaacgcagccacaatgcttccatcatcgacatgggcgaggagagtgagaaccagctctccaagtcagatgtcgtgctgtctttctcattggaggtggtaattatggaagtccaaggcctcaaatctttggctccaaatcgcatcgtatattgcacaatggaggtggaaggaggagagaaactacagactgatcaggccgaggcttctaaaccaacggtaatcaggagaaacagaagagaacaactgcctcacagtgccatttgatgtcccgtctttgtgccatgtcaaatcatctccaggggtacaagatttgtgcttgaagagtcacagtacccaatctctgtttactgaataatttcactatagtctgtgtatttccctggtttacactcatccttttgggtgtttttcctagagcattccatggtttcttttctgtttagtaaatccgtgccagcttgcaaagtgacgtgaatgagaaagatggaattagtaatgttgttgaatgtgaacactcaagacaaaagaaagaaaacattttcccccttagctggctttgtcttctcaatgaccggaatgaaatgtcaagtgaacgtgttaattcttaatggggataccaatgaaagcttcaggggaagagaacatttaacagaggctctcacttttctctgaattttatttggatagacattagcattttattacagccttggaaaagatgagatgacaattattgacaaggttcccaggacacaaataaataaaatgaataaattgtttatttgataaatttcaattatctacaaggtgtaaaacactatagatgcgaatgattaaaaaataaagagcaaagaccctgttttcaggatgcagcatacttacagggaaataaatcatgtacatttagtagtgaatataaaaaagtaaagattccattctggggaaaactgcagattgcttctgttgagaaaaccaaagaatggtcctggagaagatggctcttgaaaatggcccttgaatttggctagaaagcatttgcaagtacagaaagggtggcaagggcattccagcaaaacgaagtggtatccgccaacacctatagtctcagaagtgctgtactgtgtagggaacgtaggttctaaaaaggaggtataaaaggaggaagagaaaagaaagaaatctataaatataggctgagtcaaggtataaaagagctttgcggacgaaactaagaggaagagagcttaaagaaacaagtacatttagcagggataggataaacactggggacagagagctcctgaaccagtgtgacccggctccagtggtgtcctgtttctgtgcctctccattcatgtgaacatgtgtgtgcatgtgtgtgcgtgtgtgtgtgtgtgtgtgtgtgtgaaaaacttttatgacaaaattgaaatgacattgttagtcatacattttgacattgaattttacaatgtttatgcatctaagcttgcagccgttatacttggataatctatgtctttgtttctgctataaaaccatgttttctcttggtgtgg

SEQ ID NO: 112721 - DNA, 2095 bp, Homo sapiens
  Payload ID: 2059
  Gene Symbol: CADPS
  Gene Name: Ca++-dependent secretion activator
  ENST ID: ENST00000473635
  CDS Start-End: 1-1037
acctacccaatgtgaacctacccaatgtgaaccttcccaaagtaccaaatctaccagttaacatccctctaggcatcccacaaatgcctactttttcggcaccgtcatggatggctgctatatatgatgcggataatgggtcaggcacctcagaagatctgttttggaaacttgacgcccttcagaccttcattcgggacctgcactggcctgaagaagagtttggaaagcacctggaacaacggctgaagttgatggcaagtgacatgatcgaatcttgtgtcaaaagaaccaggattgcatttgaagttaagctgcaaaaaaccagtcgatcaacagattttcgagtcccacagtcaatatgcaccatgtttaatgttatggttgatgccaaagctcaatcaacaaaactttgcagcatggaaatgggccaagagtttgctaaaatgtggcatcaataccattcaaaaatagacgaactaattgaagaaactgttaaagaaatgataacactcttggttgcaaagttcgttactatcttggaaggagtgctggcaaaattatccagatatgacgaagggactttgttttcttcttttctgtcatttaccgtgaaggcagcttccaaatatgtggatgtacctaaacccgggatggacgtggccgacgcctacgtgactttcgtccgccattctcaggatgtcctgcgtgataaggtcaatgaggagatgtacatagaaaggttatttgatcaatggtacaacagctccatgaacgtgatctgcacctggttgacggaccggatggacttacagcttcatatttatcagttgaaaacactaattaggatggtaaagaaaacctacagagatttccgattgcaaggggtcctggactccaccttaaacagcaagacctatgaaacgatccggaaccgtctcactgtggaggaagccacagcatcagtgagtgaaggtgggggactgcagggcatcagcatgaaggacagcgatgaggaagacgaagaagacgattagaccatttggtcctagagtctgctgggacagagtcctgtaatcagtgcatgtccttagtctgttagttaaacccattaggaattttctgtcaactaccatgcccatgagatgtttatcaatacaactgccattttagctatgtggtaccaagattagcaaatgaccttcatatccactgatttcctgatgtccatgtctatatgtttacaagcaatatggagcaccattctttaaatactgttcatggagaatacatagtctaaccactaggcgtgtccctgttatcagcaaagatcaatgatgcttcattcatgtactatgtatgcattggtggtaaatggatgtgagggcaagtacatcaagtacattcactctgtttcacgtatgtggatgccagttaattaaatgagtacgtaaataaattaattaaaacacatagatctgctttgtgtttttatttttattttttgaaaaacaaaaggcaagtctccaacaattaacttttgatgctttctgttcccctaaaaccaaaaaatgaaccccttgtgtcgttgttaacccatcctttcatttactcatataattagccaaaaaaaaaaggatggctacataccaatggattgattctcttaattgccacggcaagggggcgatcctatcatgacttaacatcaagcgcgcagttcaaaactactgtcttctgtcaaagttttctcctcttaaatgttattttgcttttacgtctcaactgtgtatgtaaaaaaaatgaatatttaaattacaaccctagactaaaaatgtgtttataataagatgtggatatttccttcagtagattgtaaccataatttaaattattttgttccacactgttttttatatctgtcatgtacattgcattttgatctgtaactgcacaaccctggggtttgctgcagagctatttctttccatgtaaagtagtggatccatcttgcttttgccttatataaagcctacagttatggaagtgtggaaaactgtggcttctcaataaatattcagatgtcctaagaata

SEQ ID NO: 112722 - DNA, 637 bp, Homo sapiens
  Payload ID: 2059
  Gene Symbol: CADPS
  Gene Name: Ca++-dependent secretion activator
  ENST ID: ENST00000542833
  CDS Start-End: 1-637
caagatctcaaaatcaaacttgctgtccgaatggataagcctcaaaacatgaagcattctgggtatttatgggccatcggtaagaatgtctggaagagatggaagaaaaggttttttgtattggtgcaggtcagtcagtacacgtttgccatgtgcagttatcgggagaagaaagcggagcctcaggaacttctacaattggatggctacactgtggattacaccgacccccagccaggtttggagggtggccgagccttcttcaatgctgtcaaggagggagacaccgtgatatttgccagtgacgatgaacaagaccgcatcctgtgggtccaggccatgtatcgggccacggggcagtcacacaagcctgtgcccccgacccaagtccagaaactcaacgccaagggaggaaatgtacctcagctggatgcccctatctctcaattttctggactgaaggacgcagatagagctcaaaaacatggcatggatgaatttatctcttccaacccctgtaactttgaccacgcttccctctttgagatggtacaacgccttactttggatcacagacttaatgattcctattcttgcctgggctggttcagtcctggccaggtgtttgtactagacg

SEQ ID NO: 112723 - DNA, 1804 bp, Homo sapiens
  Payload ID: 2059
  Gene Symbol: CADPS
  Gene Name: Ca++-dependent secretion activator
  ENST ID: ENST00000613879
  CDS Start-End: 85-753
aatagaaccaggattgcatttgaagttaagctgcaaaaaaccagtcgatcaacagattttcgagtcccacagtcaatatgcaccatgtttaatgttatggttgatgccaaagctcaatcaacaaaactttgcagcatggaaatgggccaagagtttgctaaaatgtggcatcaataccattcaaaaatagacgaactaattgaagaaactgttaaagaaatgataacactcttggttgcaaagttcgttactatcttggaaggagtgctggcaaaattatccagatatgacgaagggactttgttttcttcttttctgtcatttaccgtgaaggcagcttccaaatatgtggatgtacctaaacccgggatggacgtggccgacgcctacgtgactttcgtccgccattctcaggatgtcctgcgtgataaggtcaatgaggagatgtacatagaaaggttatttgatcaatggtacaacagctccatgaacgtgatctgcacctggttgacggaccggatggacttacagcttcatatttatcagttgaaaacactaattaggatggtaaagaaaacctacagagatttccgattgcaaggggtcctggactccaccttaaacagcaagacctatgaaacgatccggaaccgtctcactgtggaggaagccacagcatcagtgagtgaaggtgggggactgcagggcatcagcatgaaggacagcgatgaggaagacgaagaagacgattagaccatttggtcctagagtctgctgggacagagtcctgtaatcagtgcatgtccttagtctgttagttaaacccattaggaattttctgtcaactaccatgcccatgagatgtttatcaatacaactgccattttagctatgtggtaccaagattagcaaatgaccttcatatccactgatttcctgatgtccatgtctatatgtttacaagcaatatggagcaccattctttaaatactgttcatggagaatacatagtctaaccactaggcgtgtccctgttatcagcaaagatcaatgatgcttcattcatgtactatgtatgcattggtggtaaatggatgtgagggcaagtacatcaagtacattcactctgtttcacgtatgtggatgccagttaattaaatgagtacgtaaataaattaattaaaacacatagatctgctttgtgtttttatttttattttttgaaaaacaaaaggcaagtctccaacaattaacttttgatgctttctgttcccctaaaaccaaaaaatgaaccccttgtgtcgttgttaacccatcctttcatttactcatataattagccaaaaaaaaaaggatggctacataccaatggattgattctcttaattgccacggcaagggggcgatcctatcatgacttaacatcaagcgcgcagttcaaaactactgtcttctgtcaaagttttctcctcttaaatgttattttgcttttacgtctcaactgtgtatgtaaaaaaaatgaatatttaaattacaaccctagactaaaaatgtgtttataataagatgtggatatttccttcagtagattgtaaccataatttaaattattttgttccacactgttttttatatctgtcatgtacattgcattttgatctgtaactgcacaaccctggggtttgctgcagagctatttctttccatgtaaagtagtggatccatcttgcttttgccttatataaagcctacagttatggaagtgtggaaaactgtggcttctcaataaatattcagatgtcct

SEQ ID NO: 112724 - DNA, 5455 bp, Homo sapiens
  Payload ID: 2059
  Gene Symbol: CADPS
  Gene Name: Ca++-dependent secretion activator
  ENST ID: ENST00000612439
  CDS Start-End: 361-4395
ggctgcatcgacagcttgcaacactcggcatcttttctggaggcgcctccttcagcagccgcagatggcatccggctgcgggctcggggctcgcaattgattctcccccttgcccacctcgagtccacggacgcacctctcccttcccctcctcccttcgcgcttctgggtctgagcccagctcgcgaccgccgggcagaggatcagtcgcggcggccgaggctgagcagcagcgctctcgctccctgacctggggagaagcgcccacccgggagagctgatccccggctgcctccagcgccccccaccttttgcactccaagccgggggctccagagaccccgctccccaggcgccactatgctggacccttcgtccagcgaagaagaatcggatgagatcgtggaggaggagagcggcaaggaggtgctcggctcggccccgtccggcgcgcgcctgtctcccagccgtaccagcgagggctcggccggcagcgccgggctggggggcggcggcgccggcgccggagccggggtgggtgcaggcggcggcgggggcagcggcgcgagcagcggcggcggggccggggggctgcaacccagcagccgcgctggcggcggccggccctccagccccagcccgtcggtggtgagcgagaaggagaaggaagagttggagcggctgcagaaagaggaggaggagaggaagaagaggctgcagctgtatgtgttcgtgatgcgctgcatcgcctacccctttaatgccaagcagcccaccgacatggctcgccggcagcagaagatcagcaaacagcagctgcagacagtcaaggaccggtttcaggctttcctcaatggggaaacccagatcatggctgacgaagccttcatgaacgctgtgcagagttactatgaggtgttcctgaagagcgaccgtgtggcccgcatggttcagagtggaggctgttccgccaacgactcccgggaggtcttcaagaagcacattgagaagagagtgcgcagcctgcctgagattgacggcctcagcaaggagactgtgctgagctcctggatggccaaatttgatgccatctaccgtggagaagaggacccgcggaagcagcaggcccggatgacagccagcgcagcctccgagctgattctgagcaaggagcaactctatgagatgttccagaacattcttgggatcaagaagttcgaacatcagctcctttacaatgcctgccagctggacaatccagatgagcaagcagcccagatcagacgagagctggatggacgtctacaaatggcagaccaaatagccagggaacgcaaatttcccaagtttgtatccaaagaaatggaaaacatgtacattgaggagctgaagtcatctgtcaacctgctcatggccaacttggagagcatgccggtatccaaaggcggggagttcaagctccagaaactcaaacgcagccacaatgcttccatcatcgacatgggcgaggagagtgagaaccagctctccaagtcagatgtcgtgctgtctttctcattggaggtggtaattatggaagtccaaggcctcaaatctttggctccaaatcgcatcgtatattgcacaatggaggtggaaggaggagagaaactacagactgatcaggccgaggcttctaaaccaacctggggcacccagggtgacttctccacaacccatgcactgccagctgtgaaggtgaagctgttcacagagagcacaggcgtcctggcgttggaggacaaggagcttgggcgggttattctccatcccaccccgaacagccccaaacagtcagagtggcacaaaatgacagtctccaaaaactgccccgaccaagatctcaaaatcaaacttgctgtccgaatggataagcctcaaaacatgaagcattctgggtatttatgggccatcggtaagaatgtctggaagagatggaagaaaaggttttttgtattggtgcaggtcagtcagtacacgtttgccatgtgcagttatcgggagaagaaagcggagcctcaggaacttctacaattggatggctacactgtggattacaccgacccccagccaggtttggagggtggccgagccttcttcaatgctgtcaaggagggagacaccgtgatatttgccagtgacgatgaacaagaccgcatcctgtgggtccaggccatgtatcgggccacggggcagtcacacaagcctgtgcccccgacccaagtccagaaactcaacgccaagggaggaaatgtacctcagctggatgcccctatctctcaattttacgcagatagagctcaaaaacatggcatggatgaatttatctcttccaacccctgtaactttgaccacgcttccctctttgagatggtacaacgccttactttggatcacagacttaatgattcctattcttgcctgggctggttcagtcctggccaggtgtttgtactagacgagtattgcgcccgaaatggagtccgggggtgtcaccgacatctctgctacctcagagacttgcttgaacgggcagaaaatggcgccatgatcgaccccacccttcttcactacagctttgccttctgtgcatcccatgtccatgggaacagtcaacaaatgcatgtgtaccttagtgggctgccaccaaatacagaccctgaagggagcaaaactccctccccacctgaaccagaagctaaaaaagataccaaaaaggaatccaaaaaaagaaaagattccaaaacccaggcaaatcaagagctgaaaaggcctgatggaattggaactgtgactgttgaagaaaaggaacgttttgaagaaatcaaagagaggctccgagttctgctagaaaatcagattacacattttaggtattgctttccatttggtcgacctgaaggtgctttgaaagctactctctcactcttggaaagggttttgatgaaagatattgttaccccagtgccacaagaggaggtaaaaacagttatccgtaaatgtctggaacaggctgcgttagtcaactattctcggctctcagagtatgccaaaatcgaagaaaatgtaggccggttaatcactcctgccaaaaagcttgaagatacaatacgtcttgctgaactagtcattgaagttcttcagcaaaatgaggagcaccacgcagaggcctttgcgtggtggtcagatttaatggtggagcatgcggagacgttcctgtcactctttgcagtagacatggatgcagccttagaggtgcaacctccagacacatgggacagttttccactatttcagctgctgaatgattttctccgtactgactataatttgtgcaatggaaaatttcacaaacacctgcaagacctgtttgccccacttgttgttagatatgtggatctgatggagtcctcaattgcacaatccattcacaggggctttgagcgggagtcatgggaaccagtcaataatgggtcaggcacctcagaagatctgttttggaaacttgacgcccttcagaccttcattcgggacctgcactggcctgaagaagagtttggaaagcacctggaacaacggctgaagttgatggcaagtgacatgatcgaatcttgtgtcaaaagaaccaggattgcatttgaagttaagctgcaaaaaaccagtcgatcaacagattttcgagtcccacagtcaatatgcaccatgtttaatgttatggttgatgccaaagctcaatcaacaaaactttgcagcatggaaatgggccaagagcatcaataccattcaaaaatagacgaactaattgaagaaactgttaaagaaatgataacactcttggttgcaaagttcgttactatcttggaaggagtgctggcaaaattatccagatatgacgaagggactttgttttcttcttttctgtcatttaccgtgaaggcagcttccaaatatgtggatgtacctaaacccgggatggacgtggccgacgcctacgtgactttcgtccgccattctcaggatgtcctgcgtgataaggtcaatgaggagatgtacatagaaaggttatttgatcaatggtacaacagctccatgaacgtgatctgcacctggttgacggaccggatggacttacagcttcatatttatcagttgaaaacactaattaggatggtaaagaaaacctacagagatttccgattgcaaggggtcctggactccaccttaaacagcaagacctatgaaacgatccggaaccgtctcactgtggaggaagccacagcatcagtgagtgaaggtgggggactgcagggcatcagcatgaaggacagcgatgaggaagacgaagaagacgattagaccatttggtcctagagtctgctgggacagagtcctgtaatcagtgcatgtccttagtctgttagttaaacccattaggaattttctgtcaactaccatgcccatgagatgtttatcaatacaactgccattttagctatgtggtaccaagattagcaaatgaccttcatatccactgatttcctgatgtccatgtctatatgtttacaagcaatatggagcaccattctttaaatactgttcatggagaatacatagtctaaccactaggcgtgtccctgttatcagcaaagatcaatgatgcttcattcatgtactatgtatgcattggtggtaaatggatgtgagggcaagtacatcaagtacattcactctgtttcacgtatgtggatgccagttaattaaatgagtacgtaaataaattaattaaaacacatagatctgctttgtgtttttatttttattttttgaaaaacaaaaggcaagtctccaacaattaacttttgatgctttctgttcccctaaaaccaaaaaatgaaccccttgtgtcgttgttaacccatcctttcatttactcatataattagccaaaaaaaaaaggatggctacataccaatggattgattctcttaattgccacggcaagggggcgatcctatcatgacttaacatcaagcgcgcagttcaaaactactgtcttctgtcaaagttttctcctcttaaatgttattttgcttttacgtctcaactgtgtatgtaaaaaaaatgaatatttaaattacaaccctagactaaaaatgtgtttataataagatgtggatatttccttcagtagattgtaaccataatttaaattattttgttccacactgttttttatatctgtcatgtacattgcattttgatctgtaactgcacaaccctggggtttgctgcagagctatttctttccatgtaaagtagtggatccatcttgcttttgccttatataaagcctacagttatggaagtgtggaaaactgtggcttctcaataaatattcagatgtcctaagaatata

SEQ ID NO: 112725 - DNA, 6065 bp, Homo sapiens
  Payload ID: 2060
  Gene Symbol: CADPS2
  Gene Name: Ca++-dependent secretion activator 2
  ENST ID: ENST00000313070
  CDS Start-End: 741-4325
attcaattccacgtgttgcttgttgtaggcgccacaggttccccacctgcgtccgggcgctcgggcggctccgcctctgccggcgggctctggggaaccgctgggtcggcgcgcccggggctggcggagcaattcctgaggcgcccaagctcacccccaacgctaactccgcctattcagtcccggcggctccccctctcccccctcccaatcctcctcccggctcctgcccgcccctttcgccctggtggtaggaaacactcctgaatctaactcgacgtgtccggaaagccctggccagttttcctttcgttctgcggccgctgcagccagccccgcggctccctcagacccgcgggcgcagccgccgggggtgaggcgcttggggaccgcgggccgagcggcggggatccccgagcaccatgctggacccgtcttccagcgaagaggagtcggacgaggggctggaagaggaaagccgcgatgtgctggtggcagccggcagctcgcagcgagctcctccagccccgactcgggaagggcggcgggacgcgccggggcgcgcgggcggcggcggcgcggccagatctgtgagcccgagcccctctgtgctcagcgaggggcgagacgagccccagcggcagctggacgatgagcaggagcggaggatccgcctgcagctctacgtcttcgtcgtgaggtgcatcgcgtaccccttcaacgccaagcagcccaccgacatggcccggaggcagcagaagcttaacaaacaacagttgcagttactgaaagaacggttccaggccttcctcaatggggaaacccaaattgtagctgacgaagcattttgcaacgcagttcggagttattatgaggtttttctaaagagtgaccgagtggccagaatggtacagagtggagggtgttctgctaatgacttcagagaagtatttaagaaaaacatagaaaaacgtgtgcggagtttgccagaaatagatggcttgagcaaagagacagtgttgagctcatggatagccaaatatgatgccatttacagaggtgaagaggacttgtgcaaacagccaaatagaatggccctaagtgcagtgtctgaacttattctgagcaaggaacaactctatgaaatgtttcagcagattctgggtattaaaaaactggaacaccagctcctttataatgcatgtcagctggataacgcagatgaacaagcagcccagatcagaagggaacttgatggccggctgcaattggcagataaaatggcaaaggaaagaaaattccccaaatttatagcaaaagatatggagaatatgtatatagaagagttgcggtcttcagtgaatttgctaatggccaatttggaaagtcttccagtttcgaaaggtggtccggaatttaaattacaaaaattaaaacgttcacagaactctgcatttttggacataggagatgagaatgagattcagctgtcaaagtccgacgtggtactgtcattcaccttagagattgtcataatggaagtgcaaggcctgaagtcagttgctcccaatcgaattgtttactgtacaatggaagtggaaggagaaaaacttcagacagaccaggccgaagcctcaaggccacaatgggggactcaaggagatttcaccaccacccatcctcggcctgtggtcaaagtgaaactcttcacagaaagcactggagttctggccctggaagataaagaactgggaagggtgatattatacccaacttctaatagctccaaatcagctgaattacaccgaatggtagttccaaaaaatagccaggattctgacttaaaaatcaaactggcagtgcgaatggataaaccagcacatatgaagcatagtggatatctgtatgcccttggacagaaggtttggaaaagatggaaaaaacgttactttgttctagttcaggttagccaatatacctttgctatgtgcagttatagagaaaagaagtctgaaccacaagaattaatgcagcttgaaggctatactgtggattataccgatccccacccaggccttcagggtggttgtatgttctttaatgctgttaaagaaggagatactgtaatctttgccagtgatgatgaacaggacagaatattatgggttcaagccatgtatagggccacaggtcaatcatataaaccagttcctgcaattcaaacccagaaactgaatcctaaaggaggaactctccatgcagatgctcagctttctggtaaagatgcagatcgttttcagaaacatggtatggatgagtttatttctgcaaacccctgcaagcttgatcatgccttcctttttagaatactccagaggcagactttggatcacagactgaatgattcctattcttgcttgggatggtttagccctggccaagtctttgtgttagatgagtactgtgcccgttatggtgtgagaggctgtcacagacatctctgctaccttgcagaactgatggaacattcagaaaatggtgctgtcattgaccctaccctgctccattacagctttgcattctgtgcctctcatgtgcacggcaacaggcctgatggaattgggactgtttcagtggaagaaaaagaaagatttgaggagataaaagagagactctcttcccttttagaaaatcagataagccatttcagatactgttttccctttggacgacctgaaggtgctctaaaagctacactttcattacttgaaagggttttaatgaaagatattgccactcccataccagcagaagaggtgaagaaagtggtcagaaaatgtctcgagaaagctgccttgatcaattacactagactcacagaatatgccaaaatagaaggcccagcagaaaaggaaacagagaccatgaaccaggcatctcctgctagaaagctggaagagattcttcatctggcagagctctgcatagaagtcttacagcagaatgaagagcatcatgcagaggcatttgcctggtggcctgatttattggctgaacatgcagagaaattttgggctttatttacagtggatatggacactgcactagaggctcaaccgcaagactcctgggatagttttcctcttttccaactgcttaataatttcctccgaaatgacacacttttgtgtaatggaaaatttcacaaacacttgcaagaaatctttgtacccttggttgtccgctatgtggatctcatggagtcttccatcgcccagtcaattcacagaggttttgagcaggagacatggcagcctgtcaagaatatcgccaacagtcttcccaatgtagctcttccaaaagttccaagtctgcctcttaatcttccacagattcctaacatttctactgcttcgtggatgccttctttatatgagtccaccaatggctcagcaacatcagaagaccttttttggaagcttgatgcactgcaaatgtttgtctttgatctgcactggccagaacaggaatttgcccaccacttagagcaaagacttaaactaatggccagtgatatgctagaggcctgtgtcaaaagaacaagaactgcatttgaactcaagctacaaaaggcaagcaaaacaactgacttgcgcattccagcttccgtttgcactatgtttaatgtattagtcgatgccaaaaagcaaagcaccaaactctgtgccctggatggaggacaagagcaacagtaccattcaaaaatagatgatctgatcgacaacagtgtaaaagaaatcatttcactgttagtttcaaagtttgtttcagtgttggaaggcgtgttgtctaagctgtcaaggtatgatgaaggcactttcttttcatccattctgtcattcactgtgaaagcagctgcaaaatatgttgatgttccaaaaccaggaatggatctggcagacacctatattatgtttgttcggcaaaaccaagatattcttcgagaaaaggtcaatgaggaaatgtatatagaaaagttatttgatcaatggtacagcagttccatgaaagtcatttgcgtgtggttgactgatagattagacctccaactccatatttaccagctgaagacgctcatcaagattgtgaagaaaacctacagggactttcgattgcagggtgtgttggaaggaacactgaacagtaagacttatgatactgtgcacagacgtttaacagtagaggaggccacagcctctgtttcagaaggaggaggacttcagggcattactatgaaagacagtgacgaagaagaagaaggctgatatcacacagctttgcagaaggaaggaagaccttgatcgacattgttttttatttttttaaccttgtccttgtaattacattcattgtttgttttggccaaataaaaatgcttgtatttctttaaaaagtaagcctgaatgtagagtaaaaggggaaatgccaagattttggggtttttttgtttcctttttttgtttgtttgtttgtttgtttttttggagaagagcatcctcttttgtgtagtttgacctaaaaatgaaccttggctctgcttgtgatcagaacatgaacttttttttttaaagaagatttgagcatttttctgtaatcacatcaaaatgatgttttctgtgtaaagcgagatacatatttctcataatgcagcattgtgagaagtcagttcggaccactgcaccaacactgtcgtatccttgttaaaatggtgtgtaccttacaaattataatttatgtgccaggttcgttttgtacttaatttgctattattgtgatgtgtataaaatctttaatcttggttcttagtactttgaattggtctacaggtatattcctgggatgaaaggattgccaaacccaaatatagactagattatccaatgggtttgtgtctttgttccattctcaacatttcttctttcaactataagtaatccccaggtgtggggtagcaagtgtgcttccgtcaagataccatattctcctgctccagtataacagcttgcaggcaataaaaatctatttgctcataactacttctgtatttattagacttatatagagcaaatgcagtaaaagaggtttgcagtgtttcaaacatcccaactatctgactctgtgtttttgtttcttgagttttttgtttgttttgtttgtaatattttgtttttaatcaaatgagtaaaagatagtaacactgactgttctttgtacctaataggcacatacattgttaaaagaattactatgacagcatatttccatagcagaggaaatatatatttcatatattattagttaatattagtaatcaatgttaactaataattagtaatgttagtaatattaactagtaattcacattattagtggttctctcaaaatattttcttgctagggtttgagagataattgtattatgttgcgtaagttctctatgaattatttttgtgatatttcccaaaacatattggcagattgtgctactgcatttattaataagtaatttttaaatgaaggcagttaatgcagaataagtggaggtatccctgcatttatgaaaacgtttattctgaaactttagaaatgaaacaacttggacctccagattcgttctcccatggtgtaataagtggtcgttaggtacctagactagccttaaaaatctatttaatctacagttactatttagcattgttttggctcattttctgggccctagggctaagataacaaacaaggaaatttcttccttcttccgggattaaagactaactctaccaactcactatctttgaaaggcagtttgggaatgttctccctccttttcttctctattcacacaccaaatactattttctccaaaccctcaaatgtccagtcatgctatcccaaactctccaatggcaccatccccaagcttgctgttccacgacacattgctctgtacttagtaattacccacccttcttttcctttcaataaaatgtccatttccttgatac

SEQ ID NO: 112726 - DNA, 6045 bp, Homo sapiens
  Payload ID: 2060
  Gene Symbol: CADPS2
  Gene Name: Ca++-dependent secretion activator 2
  ENST ID: ENST00000334010
  CDS Start-End: 423-4307
attcaattccacgtgttgcttgttgtaggcgccacaggttccccacctgcgtccgggcgctcgggcggctccgcctctgccggcgggctctggggaaccgctgggtcggcgcgcccggggctggcggagcaattcctgaggcgcccaagctcacccccaacgctaactccgcctattcagtcccggcggctccccctctcccccctcccaatcctcctcccggctcctgcccgcccctttcgccctggtggtaggaaacactcctgaatctaactcgacgtgtccggaaagccctggccagttttcctttcgttctgcggccgctgcagccagccccgcggctccctcagacccgcgggcgcagccgccgggggtgaggcgcttggggaccgcgggccgagcggcggggatccccgagcaccatgctggacccgtcttccagcgaagaggagtcggacgaggggctggaagaggaaagccgcgatgtgctggtggcagccggcagctcgcagcgagctcctccagccccgactcgggaagggcggcgggacgcgccggggcgcgcgggcggcggcggcgcggccagatctgtgagcccgagcccctctgtgctcagcgaggggcgagacgagccccagcggcagctggacgatgagcaggagcggaggatccgcctgcagctctacgtcttcgtcgtgaggtgcatcgcgtaccccttcaacgccaagcagcccaccgacatggcccggaggcagcagaagcttaacaaacaacagttgcagttactgaaagaacggttccaggccttcctcaatggggaaacccaaattgtagctgacgaagcattttgcaacgcagttcggagttattatgaggtttttctaaagagtgaccgagtggccagaatggtacagagtggagggtgttctgctaatgacttcagagaagtatttaagaaaaacatagaaaaacgtgtgcggagtttgccagaaatagatggcttgagcaaagagacagtgttgagctcatggatagccaaatatgatgccatttacagaggtgaagaggacttgtgcaaacagccaaatagaatggccctaagtgcagtgtctgaacttattctgagcaaggaacaactctatgaaatgtttcagcagattctgggtattaaaaaactggaacaccagctcctttataatgcatgtcagctggataacgcagatgaacaagcagcccagatcagaagggaacttgatggccggctgcaattggcagataaaatggcaaaggaaagaaaattccccaaatttatagcaaaagatatggagaatatgtatatagaagagttgcggtcttcagtgaatttgctaatggccaatttggaaagtcttccagtttcgaaaggtggtccggaatttaaattacaaaaattaaaacgttcacagaactctgcatttttggacataggagatgagaatgagattcagctgtcaaagtccgacgtggtactgtcattcaccttagagattgtcataatggaagtgcaaggcctgaagtcagttgctcccaatcgaattgtttactgtacaatggaagtggaaggagaaaaacttcagacagaccaggccgaagcctcaaggccacaatgggggactcaaggagatttcaccaccacccatcctcggcctgtggtcaaagtgaaactcttcacagaaagcactggagttctggccctggaagataaagaactgggaagggtgatattatacccaacttctaatagctccaaatcagctgaattacaccgaatggtagttccaaaaaatagccaggattctgacttaaaaatcaaactggcagtgcgaatggataaaccagcacatatgaagcatagtggatatctgtatgcccttggacagaaggtttggaaaagatggaaaaaacgttactttgttctagttcaggttagccaatatacctttgctatgtgcagttatagagaaaagaagtctgaaccacaagaattaatgcagcttgaaggctatactgtggattataccgatccccacccaggccttcagggtggttgtatgttctttaatgctgttaaagaaggagatactgtaatctttgccagtgatgatgaacaggacagaatattatgggttcaagccatgtatagggccacaggtcaatcatataaaccagttcctgcaattcaaacccagaaactgaatcctaaaggaggaactctccatgcagatgctcagctttctgaatttacagatgcagatcgttttcagaaacatggtatggatgagtttatttctgcaaacccctgcaagcttgatcatgccttcctttttagaatactccagaggcagactttggatcacagactgaatgattcctattcttgcttgggatggtttagccctggccaagtctttgtgttagatgagtactgtgcccgttatggtgtgagaggctgtcacagacatctctgctaccttgcagaactgatggaacattcagaaaatggtgctgtcattgaccctaccctgctccattacagctttgcattctgtgcctctcatgtgcacggcaacaggcctgatggaattgggactgtttcagtggaagaaaaagaaagatttgaggagataaaagagagactctcttcccttttagaaaatcagataagccatttcagatactgttttccctttggacgacctgaaggtgctctaaaagctacactttcattacttgaaagggttttaatgaaagatattgccactcccataccagcagaagaggtgaagaaagtggtcagaaaatgtctcgagaaagctgccttgatcaattacactagactcacagaatatgccaaaatagaagagaccatgaaccaggcatctcctgctagaaagctggaagagattcttcatctggcagagctctgcatagaagtcttacagcagaatgaagagcatcatgcagaggcatttgcctggtggcctgatttattggctgaacatgcagagaaattttgggctttatttacagtggatatggacactgcactagaggctcaaccgcaagactcctgggatagttttcctcttttccaactgcttaataatttcctccgaaatgacacacttttgtgtaatggaaaatttcacaaacacttgcaagaaatctttgtacccttggttgtccgctatgtggatctcatggagtcttccatcgcccagtcaattcacagaggttttgagcaggagacatggcagcctgtcaagaatatcgccaacagtcttcccaatgtagctcttccaaaagttccaagtctgcctcttaatcttccacagattcctaacatttctactgcttcgtggatgccttctttatatgagtccaccaatggctcagcaacatcagaagaccttttttggaagcttgatgcactgcaaatgtttgtctttgatctgcactggccagaacaggaatttgcccaccacttagagcaaagacttaaactaatggccagtgatatgctagaggcctgtgtcaaaagaacaagaactgcatttgaactcaagctacaaaaggcaagcaaaacaactgacttgcgcattccagcttccgtttgcactatgtttaatgtattagtcgatgccaaaaagcaaagcaccaaactctgtgccctggatggaggacaagagcaacagtaccattcaaaaatagatgatctgatcgacaacagtgtaaaagaaatcatttcactgttagtttcaaagtttgtttcagtgttggaaggcgtgttgtctaagctgtcaaggtatgatgaaggcactttcttttcatccattctgtcattcactgtgaaagcagctgcaaaatatgttgatgttccaaaaccaggaatggatctggcagacacctatattatgtttgttcggcaaaaccaagatattcttcgagaaaaggtcaatgaggaaatgtatatagaaaagttatttgatcaatggtacagcagttccatgaaagtcatttgcgtgtggttgactgatagattagacctccaactccatatttaccagctgaagacgctcatcaagattgtgaagaaaacctacagggactttcgattgcagggtgtgttggaaggaacactgaacagtaagacttatgatactgtgcacagacgtttaacagtagaggaggccacagcctctgtttcagaaggaggaggacttcagggcattactatgaaagacagtgacgaagaagaagaaggctgatatcacacagctttgcagaaggaaggaagaccttgatcgacattgttttttatttttttaaccttgtccttgtaattacattcattgtttgttttggccaaataaaaatgcttgtatttctttaaaaagtaagcctgaatgtagagtaaaaggggaaatgccaagattttggggtttttttgtttcctttttttgtttgtttgtttgtttgtttttttggagaagagcatcctcttttgtgtagtttgacctaaaaatgaaccttggctctgcttgtgatcagaacatgaacttttttttttaaagaagatttgagcatttttctgtaatcacatcaaaatgatgttttctgtgtaaagcgagatacatatttctcataatgcagcattgtgagaagtcagttcggaccactgcaccaacactgtcgtatccttgttaaaatggtgtgtaccttacaaattataatttatgtgccaggttcgttttgtacttaatttgctattattgtgatgtgtataaaatctttaatcttggttcttagtactttgaattggtctacaggtatattcctgggatgaaaggattgccaaacccaaatatagactagattatccaatgggtttgtgtctttgttccattctcaacatttcttctttcaactataagtaatccccaggtgtggggtagcaagtgtgcttccgtcaagataccatattctcctgctccagtataacagcttgcaggcaataaaaatctatttgctcataactacttctgtatttattagacttatatagagcaaatgcagtaaaagaggtttgcagtgtttcaaacatcccaactatctgactctgtgtttttgtttcttgagttttttgtttgttttgtttgtaatattttgtttttaatcaaatgagtaaaagatagtaacactgactgttctttgtacctaataggcacatacattgttaaaagaattactatgacagcatatttccatagcagaggaaatatatatttcatatattattagttaatattagtaatcaatgttaactaataattagtaatgttagtaatattaactagtaattcacattattagtggttctctcaaaatattttcttgctagggtttgagagataattgtattatgttgcgtaagttctctatgaattatttttgtgatatttcccaaaacatattggcagattgtgctactgcatttattaataagtaatttttaaatgaaggcagttaatgcagaataagtggaggtatccctgcatttatgaaaacgtttattctgaaactttagaaatgaaacaacttggacctccagattcgttctcccatggtgtaataagtggtcgttaggtacctagactagccttaaaaatctatttaatctacagttactatttagcattgttttggctcattttctgggccctagggctaagataacaaacaaggaaatttcttccttcttccgggattaaagactaactctaccaactcactatctttgaaaggcagtttgggaatgttctccctccttttcttctctattcacacaccaaatactattttctccaaaccctcaaatgtccagtcatgctatcccaaactctccaatggcaccatccccaagcttgctgttccacgacacattgctctgtacttagtaattacccacccttcttttcctttcaataaaatgtccatttccttgat

SEQ ID NO: 112727 - DNA, 2826 bp, Homo sapiens
  Payload ID: 2060
  Gene Symbol: CADPS2
  Gene Name: Ca++-dependent secretion activator 2
  ENST ID: ENST00000397721
  CDS Start-End: 1-2698
tgagattcagctgtcaaagtccgacgtggtactgtcattcaccttagagattgtcataatggaagtgcaaggcctgaagtcagttgctcccaatcgaattgtttactgtacaatggaagtggaaggagaaaaacttcagacagaccaggccgaagcctcaaggccacaatgggggactcaaggagatttcaccaccacccatcctcggcctgtggtcaaagtgaaactcttcacagaaagcactggagttctggccctggaagataaagaactgggaagggtgatattatacccaacttctaatagctccaaatcagctgaattacaccgaatggtagttccaaaaaatagccaggattctgacttaaaaatcaaactggcagtgcgaatggataaaccagcacatatgaagcatagtggatatctgtatgcccttggacagaaggtttggaaaagatggaaaaaacgttactttgttctagttcaggttagccaatatacctttgctatgtgcagttatagagaaaagaagtctgaaccacaagaattaatgcagcttgaaggctatactgtggattataccgatccccacccaggccttcagggtggttgtatgttctttaatgctgttaaagaaggagatactgtaatctttgccagtgatgatgaacaggacagaatattatgggttcaagccatgtatagggccacaggtcaatcatataaaccagttcctgcaattcaaacccagaaactgaatcctaaaggaggaactctccatgcagatgctcagctttatgcagatcgttttcagaaacatggtatggatgagtttatttctgcaaacccctgcaagcttgatcatgccttcctttttagaatactccagaggcagactttggatcacagactgaatgattcctattcttgcttgggatggtttagccctggccaagtctttgtgttagatgagtactgtgcccgttatggtgtgagaggctgtcacagacatctctgctaccttgcagaactgatggaacattcagaaaatggtgctgtcattgaccctaccctgctccattacagctttgcattctgtgcctctcatgtgcacggcaacaggcctgatggaattgggactgtttcagtggaagaaaaagaaagatttgaggagataaaagagagactctcttcccttttagaaaatcagataagccatttcagatactgttttccctttggacgacctgaaggtgctctaaaagctacactttcattacttgaaagggttttaatgaaagatattgccactcccataccagcagaagaggtgaagaaagtggtcagaaaatgtctcgagaaagctgccttgatcaattacactagactcacagaatatgccaaaatagaagagaccatgaaccaggcatctcctgctagaaagctggaagagattcttcatctggcagagctctgcatagaagtcttacagcagaatgaagagcatcatgcagaggcatttgcctggtggcctgatttattggctgaacatgcagagaaattttgggctttatttacagtggatatggacactgcactagaggctcaaccgcaagactcctgggatagttttcctcttttccaactgcttaataatttcctccgaaatgacacacttttgtgtaatggaaaatttcacaaacacttgcaagaaatctttgtacccttggttgtccgctatgtggatctcatggagtcttccatcgcccagtcaattcacagaggttttgagcaggagacatggcagcctgtcaacaatggctcagcaacatcagaagaccttttttggaagcttgatgcactgcaaatgtttgtctttgatctgcactggccagaacaggaatttgcccaccacttagagcaaagacttaaactaatggccagtgatatgctagaggcctgtgtcaaaagaacaagaactgcatttgaactcaagctacaaaaggcaagcaaaacaactgacttgcgcattccagcttccgtttgcactatgtttaatgtattagtcgatgccaaaaagcaaagcaccaaactctgtgccctggatggaggacaagagcaacagtaccattcaaaaatagatgatctgatcgacaacagtgtaaaagaaatcatttcactgttagtttcaaagtttgtttcagtgttggaaggcgtgttgtctaagctgtcaaggtatgatgaaggcactttcttttcatccattctgtcattcactgtgaaagcagctgcaaaatatgttgatgttccaaaaccaggaatggatctggcagacacctatattatgtttgttcggcaaaaccaagatattcttcgagaaaaggtcaatgaggaaatgtatatagaaaagttatttgatcaatggtacagcagttccatgaaagtcatttgcgtgtggttgactgatagattagacctccaactccatatttaccagctgaagacgctcatcaagattgtgaagaaaacctacagggactttcgattgcagggtgtgttggaaggaacactgaacagtaagacttatgatactgtgcacagacgtttaacagtagaggaggccacagcctctgtttcagaaggaggaggacttcagggcattactatgaaagacagtgacgaagaagaagaaggctgatatcacacagctttgcagaaggaaggaagaccttgatcgacattgttttttatttttttaaccttgtccttgtaattacattcattgtttgttttggccaaataaaaatgcttgtatttctttaaaaa

SEQ ID NO: 112728 - DNA, 4073 bp, Homo sapiens
  Payload ID: 2060
  Gene Symbol: CADPS2
  Gene Name: Ca++-dependent secretion activator 2
  Uniprot ID: Q86UW7
  ENST ID: ENST00000449022
  CDS Start-End: 21-3911
ggcggggatccccgagcaccatgctggacccgtcttccagcgaagaggagtcggacgaggggctggaagaggaaagccgcgatgtgctggtggcagccggcagctcgcagcgagctcctccagccccgactcgggaagggcggcgggacgcgccggggcgcgcgggcggcggcggcgcggccagatctgtgagcccgagcccctctgtgctcagcgaggggcgagacgagccccagcggcagctggacgatgagcaggagcggaggatccgcctgcagctctacgtcttcgtcgtgaggtgcatcgcgtaccccttcaacgccaagcagcccaccgacatggcccggaggcagcagaagcttaacaaacaacagttgcagttactgaaagaacggttccaggccttcctcaatggggaaacccaaattgtagctgacgaagcattttgcaacgcagttcggagttattatgaggtttttctaaagagtgaccgagtggccagaatggtacagagtggagggtgttctgctaatgacttcagagaagtatttaagaaaaacatagaaaaacgtgtgcggagtttgccagaaatagatggcttgagcaaagagacagtgttgagctcatggatagccaaatatgatgccatttacagaggtgaagaggacttgtgcaaacagccaaatagaatggccctaagtgcagtgtctgaacttattctgagcaaggaacaactctatgaaatgtttcagcagattctgggtattaaaaaactggaacaccagctcctttataatgcatgtcagctggataacgcagatgaacaagcagcccagatcagaagggaacttgatggccggctgcaattggcagataaaatggcaaaggaaagaaaattccccaaatttatagcaaaagatatggagaatatgtatatagaagagttgcggtcttcagtgaatttgctaatggccaatttggaaagtcttccagtttcgaaaggtggtccggaatttaaattacaaaaattaaaacgttcacagaactctgcatttttggacataggagatgagaatgagattcagctgtcaaagtccgacgtggtactgtcattcaccttagagattgtcataatggaagtgcaaggcctgaagtcagttgctcccaatcgaattgtttactgtacaatggaagtggaaggagaaaaacttcagacagaccaggccgaagcctcaaggccacaatgggggactcaaggagatttcaccaccacccatcctcggcctgtggtcaaagtgaaactcttcacagaaagcactggagttctggccctggaagataaagaactgggaagggtgatattatacccaacttctaatagctccaaatcagctgaattacaccgaatggtagttccaaaaaatagccaggattctgacttaaaaatcaaactggcagtgcgaatggataaaccagcacatatgaagcatagtggatatctgtatgcccttggacagaaggtttggaaaagatggaaaaaacgttactttgttctagttcaggttagccaatatacctttgctatgtgcagttatagagaaaagaagtctgaaccacaagaattaatgcagcttgaaggctatactgtggattataccgatccccacccaggccttcagggtggttgtatgttctttaatgctgttaaagaaggagatactgtaatctttgccagtgatgatgaacaggacagaatattatgggttcaagccatgtatagggccacaggtcaatcatataaaccagttcctgcaattcaaacccagaaactgaatcctaaaggaggaactctccatgcagatgctcagctttctggtaaagatgcagatcgttttcagaaacatggtatggatgagtttatttctgcaaacccctgcaagcttgatcatgccttcctttttagaatactccagaggcagactttggatcacagactgaatgattcctattcttgcttgggatggtttagccctggccaagtctttgtgttagatgagtactgtgcccgttatggtgtgagaggctgtcacagacatctctgctaccttgcagaactgatggaacattcagaaaatggtgctgtcattgaccctaccctgctccattacagctttgcattctgtgcctctcatgtgcacggcaacaggcctgatggaattgggactgtttcagtggaagaaaaagaaagatttgaggagataaaagagagactctcttcccttttagaaaatcagataagccatttcagatactgttttccctttggacgacctgaaggtgctctaaaagctacactttcattacttgaaagggttttaatgaaagatattgccactcccataccagcagaagaggtgaagaaagtggtcagaaaatgtctcgagaaagctgccttgatcaattacactagactcacagaatatgccaaaatagaagagaccatgaaccaggcatctcctgctagaaagctggaagagattcttcatctggcagagctctgcatagaagtcttacagcagaatgaagagcatcatgcagagggaagagaggcatttgcctggtggcctgatttattggctgaacatgcagagaaattttgggctttatttacagtggatatggacactgcactagaggctcaaccgcaagactcctgggatagttttcctcttttccaactgcttaataatttcctccgaaatgacacacttttgtgtaatggaaaatttcacaaacacttgcaagaaatctttgtacccttggttgtccgctatgtggatctcatggagtcttccatcgcccagtcaattcacagaggttttgagcaggagacatggcagcctgtcaagaatatcgccaacagtcttcccaatgtagctcttccaaaagttccaagtctgcctcttaatcttccacagattcctaacatttctactgcttcgtggatgccttctttatatgagtccaccaatggctcagcaacatcagaagaccttttttggaagcttgatgcactgcaaatgtttgtctttgatctgcactggccagaacaggaatttgcccaccacttagagcaaagacttaaactaatggccagtgatatgctagaggcctgtgtcaaaagaacaagaactgcatttgaactcaagctacaaaaggcaagcaaaacaactgacttgcgcattccagcttccgtttgcactatgtttaatgtattagtcgatgccaaaaagcaaagcaccaaactctgtgccctggatggaggacaagagcaacagtaccattcaaaaatagatgatctgatcgacaacagtgtaaaagaaatcatttcactgttagtttcaaagtttgtttcagtgttggaaggcgtgttgtctaagctgtcaaggtatgatgaaggcactttcttttcatccattctgtcattcactgtgaaagcagctgcaaaatatgttgatgttccaaaaccaggaatggatctggcagacacctatattatgtttgttcggcaaaaccaagatattcttcgagaaaaggtcaatgaggaaatgtatatagaaaagttatttgatcaatggtacagcagttccatgaaagtcatttgcgtgtggttgactgatagattagacctccaactccatatttaccagctgaagacgctcatcaagattgtgaagaaaacctacagggactttcgattgcagggtgtgttggaaggaacactgaacagtaagacttatgatactgtgcacagacgtttaacagtagaggaggccacagcctctgtttcagaaggaggaggacttcagggcattactatgaaagacagtgacgaagaagaagaaggctgatatcacacagctttgcagaaggaaggaagaccttgatcgacattgttttttatttttttaaccttgtccttgtaattacattcattgtttgttttggccaaataaaaatgcttgtatttctttaaaaagtaagcctgaatgtagagtaaaaggggaaatgcc

SEQ ID NO: 112729 - DNA, 4308 bp, Homo sapiens
  Payload ID: 2060
  Gene Symbol: CADPS2
  Gene Name: Ca++-dependent secretion activator 2
  Uniprot ID: Q86UW7
  ENST ID: ENST00000412584
  CDS Start-End: 122-3889
ttttcctttcgttctgcggccgctgcagccagccccgcggctccctcagacccgcgggcgcagccgccgggggtgaggcgcttggggaccgcgggccgagcggcggggatccccgagcaccatgctggacccgtcttccagcgaagaggagtcggacgaggggctggaagaggaaagccgcgatgtgctggtggcagccggcagctcgcagcgagctcctccagccccgactcgggaagggcggcgggacgcgccggggcgcgcgggcggcggcggcgcggccagatctgtgagcccgagcccctctgtgctcagcgaggggcgagacgagccccagcggcagctggacgatgagcaggagcggaggatccgcctgcagctctacgtcttcgtcgtgaggtgcatcgcgtaccccttcaacgccaagcagcccaccgacatggcccggaggcagcagaagcttaacaaacaacagttgcagttactgaaagaacggttccaggccttcctcaatggggaaacccaaattgtagctgacgaagcattttgcaacgcagttcggagttattatgaggtttttctaaagagtgaccgagtggccagaatggtacagagtggagggtgttctgctaatgacttcagagaagtatttaagaaaaacatagaaaaacgtgtgcggagtttgccagaaatagatggcttgagcaaagagacagtgttgagctcatggatagccaaatatgatgccatttacagaggtgaagaggacttgtgcaaacagccaaatagaatggccctaagtgcagtgtctgaacttattctgagcaaggaacaactctatgaaatgtttcagcagattctgggtattaaaaaactggaacaccagctcctttataatgcatgtcagctggataacgcagatgaacaagcagcccagatcagaagggaacttgatggccggctgcaattggcagataaaatggcaaaggaaagaaaattccccaaatttatagcaaaagatatggagaatatgtatatagaagagttgcggtcttcagtgaatttgctaatggccaatttggaaagtcttccagtttcgaaaggtggtccggaatttaaattacaaaaattaaaacgttcacagaactctgcatttttggacataggagatgagaatgagattcagctgtcaaagtccgacgtggtactgtcattcaccttagagattgtcataatggaagtgcaaggcctgaagtcagttgctcccaatcgaattgtttactgtacaatggaagtggaaggagaaaaacttcagacagaccaggccgaagcctcaaggccacaatgggggactcaaggagatttcaccaccacccatcctcggcctgtggtcaaagtgaaactcttcacagaaagcactggagttctggccctggaagataaagaactgggaagggtgatattatacccaacttctaatagctccaaatcagctgaattacaccgaatggtagttccaaaaaatagccaggattctgacttaaaaatcaaactggcagtgcgaatggataaaccagcacatatgaagcatagtggatatctgtatgcccttggacagaaggtttggaaaagatggaaaaaacgttactttgttctagttcaggttagccaatatacctttgctatgtgcagttatagagaaaagaagtctgaaccacaagaattaatgcagcttgaaggctatactgtggattataccgatccccacccaggccttcagggtggttgtatgttctttaatgctgttaaagaaggagatactgtaatctttgccagtgatgatgaacaggacagaatattatgggttcaagccatgtatagggccacaggtcaatcatataaaccagttcctgcaattcaaacccagaaactgaatcctaaaggaggaactctccatgcagatgctcagctttatgcagatcgttttcagaaacatggtatggatgagtttatttctgcaaacccctgcaagcttgatcatgccttcctttttagaatactccagaggcagactttggatcacagactgaatgattcctattcttgcttgggatggtttagccctggccaagtctttgtgttagatgagtactgtgcccgttatggtgtgagaggctgtcacagacatctctgctaccttgcagaactgatggaacattcagaaaatggtgctgtcattgaccctaccctgctccattacagctttgcattctgtgcctctcatgtgcacggcaacaggcctgatggaattgggactgtttcagtggaagaaaaagaaagatttgaggagataaaagagagactctcttcccttttagaaaatcagataagccatttcagatactgttttccctttggacgacctgaaggtgctctaaaagctacactttcattacttgaaagggttttaatgaaagatattgccactcccataccagcagaagaggtgaagaaagtggtcagaaaatgtctcgagaaagctgccttgatcaattacactagactcacagaatatgccaaaatagaagagaccatgaaccaggcatctcctgctagaaagctggaagagattcttcatctggcagagctctgcatagaagtcttacagcagaatgaagagcatcatgcagaggcatttgcctggtggcctgatttattggctgaacatgcagagaaattttgggctttatttacagtggatatggacactgcactagaggctcaaccgcaagactcctgggatagttttcctcttttccaactgcttaataatttcctccgaaatgacacacttttgtgtaatggaaaatttcacaaacacttgcaagaaatctttgtacccttggttgtccgctatgtggatctcatggagtcttccatcgcccagtcaattcacagaggttttgagcaggagacatggcagcctgtcaacaatggctcagcaacatcagaagaccttttttggaagcttgatgcactgcaaatgtttgtctttgatctgcactggccagaacaggaatttgcccaccacttagagcaaagacttaaactaatggccagtgatatgctagaggcctgtgtcaaaagaacaagaactgcatttgaactcaagctacaaaaggcaagcaaaacaactgacttgcgcattccagcttccgtttgcactatgtttaatgtattagtcgatgccaaaaagcaaagcaccaaactctgtgccctggatggaggacaagagtttggtagtcaatggcaacagtaccattcaaaaatagatgatctgatcgacaacagtgtaaaagaaatcatttcactgttagtttcaaagtttgtttcagtgttggaaggcgtgttgtctaagctgtcaaggtatgatgaaggcactttcttttcatccattctgtcattcactgtgaaagcagctgcaaaatatgttgatgttccaaaaccaggaatggatctggcagacacctatattatgtttgttcggcaaaaccaagatattcttcgagaaaaggtcaatgaggaaatgtatatagaaaagttatttgatcaatggtacagcagttccatgaaagtcatttgcgtgtggttgactgatagattagacctccaactccatatttaccagctgaagacgctcatcaagattgtgaagaaaacctacagggactttcgattgcagggtgtgttggaaggaacactgaacagtaagacttatgatactgtgcacagacgtttaacagtagaggaggccacagcctctgtttcagaaggaggaggacttcagggcattactatgaaagacagtgacgaagaagaagaaggctgatatcacacagctttgcagaaggaaggaagaccttgatcgacattgttttttatttttttaaccttgtccttgtaattacattcattgtttgttttggccaaataaaaatgcttgtatttctttaaaaagtaagcctgaatgtagagtaaaaggggaaatgccaagattttggggtttttttgtttcctttttttgtttgtttgtttgtttgtttttttggagaagagcatcctcttttgtgtagtttgacctaaaaatgaaccttggctctgcttgtgatcagaacatgaacttttttttttaaagaagatttgagcatttttctgtaatcacatcaaaatgatgttttctgtgtaaagcgagatacatatttctcataatgcagcattgtgagaagtcagttcggaccactgcaccaa

SEQ ID NO: 112730 - DNA, 2238 bp, Homo sapiens
  Payload ID: 2060
  Gene Symbol: CADPS2
  Gene Name: Ca++-dependent secretion activator 2
  ENST ID: ENST00000462699
  CDS Start-End: 1-1472
attacactagactcacagaatatgccaaaatagaaggcccagcagaaaaggaaacagagaccatgaaccaggcatctcctgctagaaagctggaagagattcttcatctggcagagctctgcatagaagtcttacagcagaatgaagagcatcatgcagagggaagagaggcatttgcctggtggcctgatttattggctgaacatgcagagaaattttgggctttatttacagtggatatggacactgcactagaggctcaaccgcaagactcctgggatagttttcctcttttccaactgcttaataatttcctccgaaatgacacacttttgtgtaatggaaaatttcacaaacacttgcaagaaatctttgtacccttggttgtccgctatgtggatctcatggagtcttccatcgcccagtcaattcacagaggttttgagcaggagacatggcagcctgtcaagaatatcgccaacagtcttcccaatgtagctcttccaaaagttccaagtctgcctcttaatcttccacagattcctaacatttctactgcttcgtggatgccttctttatatgagtccaccaatggctcagcaacatcagaagaccttttttggaagcttgatgcactgcaaatgtttgtctttgatctgcactggccagaacaggaatttgcccaccacttagagcaaagacttaaactaatggccagtgatatgctagaggcctgtgtcaaaagaacaagaactgcatttgaactcaagctacaaaaggcaagcaaaacaactgacttgcgcattccagcttccgtttgcactatgtttaatgtattagtcgatgccaaaaagcaaagcaccaaactctgtgccctggatggaggacaagagcaacagtaccattcaaaaatagatgatctgatcgacaacagtgtaaaagaaatcatttcactgttagtttcaaagtttgtttcagtgttggaaggcgtgttgtctaagctgtcaaggtatgatgaaggcactttcttttcatccattctgtcattcactgtgaaagcagctgcaaaatatgttgatgttccaaaaccaggaatggatctggcagacacctatattatgtttgttcggcaaaaccaagatattcttcgagaaaaggtcaatgaggaaatgtatatagaaaagttatttgatcaatggtacagcagttccatgaaagtcatttgcgtgtggttgactgatagattagacctccaactccatatttaccagctgaagacgctcatcaagattgtgaagaaaacctacagggactttcgattgcagggtgtgttggaaggaacactgaacagtaagacttatgatactgtgcacagacgtttaacagtagaggaggccacagcctctgtttcagaaggaggaggacttcagggcattactatgaaagacagtgacgaagaagaagaaggctgatatcacacagctttgcagaaggaaggaagaccttgatcgacattgttttttatttttttaaccttgtccttgtaattacattcattgtttgttttggccaaataaaaatgcttgtatttctttaaaaagtaagcctgaatgtagagtaaaaggggaaatgccaagattttggggtttttttgtttcctttttttgtttgtttgtttgtttgtttttttggagaagagcatcctcttttgtgtagtttgacctaaaaatgaaccttggctctgcttgtgatcagaacatgaacttttttttttaaagaagatttgagcatttttctgtaatcacatcaaaatgatgttttctgtgtaaagcgagatacatatttctcataatgcagcattgtgagaagtcagttcggaccactgcaccaacactgtcgtatccttgttaaaatggtgtgtaccttacaaattataatttatgtgccaggttcgttttgtacttaatttgctattattgtgatgtgtataaaatctttaatcttggttcttagtactttgaattggtctacaggtatattcctgggatgaaaggattgccaaacccaaatatagactagattatccaatgggtttgtgtctttgttccattctcaacatttcttctttcaactataagtaatccccaggtgtggggtagcaagtgtgcttccgtcaagataccatattctcctgctccagtataacagcttgcaggcaataaaaatctatttgctcat

SEQ ID NO: 112731 - DNA, 6066 bp, Homo sapiens
  Payload ID: 2060
  Gene Symbol: CADPS2
  Gene Name: Ca++-dependent secretion activator 2
  ENST ID: ENST00000615869
  CDS Start-End: 423-4328
attcaattccacgtgttgcttgttgtaggcgccacaggttccccacctgcgtccgggcgctcgggcggctccgcctctgccggcgggctctggggaaccgctgggtcggcgcgcccggggctggcggagcaattcctgaggcgcccaagctcacccccaacgctaactccgcctattcagtcccggcggctccccctctcccccctcccaatcctcctcccggctcctgcccgcccctttcgccctggtggtaggaaacactcctgaatctaactcgacgtgtccggaaagccctggccagttttcctttcgttctgcggccgctgcagccagccccgcggctccctcagacccgcgggcgcagccgccgggggtgaggcgcttggggaccgcgggccgagcggcggggatccccgagcaccatgctggacccgtcttccagcgaagaggagtcggacgaggggctggaagaggaaagccgcgatgtgctggtggcagccggcagctcgcagcgagctcctccagccccgactcgggaagggcggcgggacgcgccggggcgcgcgggcggcggcggcgcggccagatctgtgagcccgagcccctctgtgctcagcgaggggcgagacgagccccagcggcagctggacgatgagcaggagcggaggatccgcctgcagctctacgtcttcgtcgtgaggtgcatcgcgtaccccttcaacgccaagcagcccaccgacatggcccggaggcagcagaagcttaacaaacaacagttgcagttactgaaagaacggttccaggccttcctcaatggggaaacccaaattgtagctgacgaagcattttgcaacgcagttcggagttattatgaggtttttctaaagagtgaccgagtggccagaatggtacagagtggagggtgttctgctaatgacttcagagaagtatttaagaaaaacatagaaaaacgtgtgcggagtttgccagaaatagatggcttgagcaaagagacagtgttgagctcatggatagccaaatatgatgccatttacagaggtgaagaggacttgtgcaaacagccaaatagaatggccctaagtgcagtgtctgaacttattctgagcaaggaacaactctatgaaatgtttcagcagattctgggtattaaaaaactggaacaccagctcctttataatgcatgtcagctggataacgcagatgaacaagcagcccagatcagaagggaacttgatggccggctgcaattggcagataaaatggcaaaggaaagaaaattccccaaatttatagcaaaagatatggagaatatgtatatagaagagttgcggtcttcagtgaatttgctaatggccaatttggaaagtcttccagtttcgaaaggtggtccggaatttaaattacaaaaattaaaacgttcacagaactctgcatttttggacataggagatgagaatgagattcagctgtcaaagtccgacgtggtactgtcattcaccttagagattgtcataatggaagtgcaaggcctgaagtcagttgctcccaatcgaattgtttactgtacaatggaagtggaaggagaaaaacttcagacagaccaggccgaagcctcaaggccacaatgggggactcaaggagatttcaccaccacccatcctcggcctgtggtcaaagtgaaactcttcacagaaagcactggagttctggccctggaagataaagaactgggaagggtgatattatacccaacttctaatagctccaaatcagctgaattacaccgaatggtagttccaaaaaatagccaggattctgacttaaaaatcaaactggcagtgcgaatggataaaccagcacatatgaagcatagtggatatctgtatgcccttggacagaaggtttggaaaagatggaaaaaacgttactttgttctagttcaggttagccaatatacctttgctatgtgcagttatagagaaaagaagtctgaaccacaagaattaatgcagcttgaaggctatactgtggattataccgatccccacccaggccttcagggtggttgtatgttctttaatgctgttaaagaaggagatactgtaatctttgccagtgatgatgaacaggacagaatattatgggttcaagccatgtatagggccacaggtcaatcatataaaccagttcctgcaattcaaacccagaaactgaatcctaaaggaggaactctccatgcagatgctcagctttctgaatttacagatgcagatcgttttcagaaacatggtatggatgagtttatttctgcaaacccctgcaagcttgatcatgccttcctttttagaatactccagaggcagactttggatcacagactgaatgattcctattcttgcttgggatggtttagccctggccaagtctttgtgttagatgagtactgtgcccgttatggtgtgagaggctgtcacagacatctctgctaccttgcagaactgatggaacattcagaaaatggtgctgtcattgaccctaccctgctccattacagctttgcattctgtgcctctcatgtgcacggcaacaggcctgatggaattgggactgtttcagtggaagaaaaagaaagatttgaggagataaaagagagactctcttcccttttagaaaatcagataagccatttcagatactgttttccctttggacgacctgaaggtgctctaaaagctacactttcattacttgaaagggttttaatgaaagatattgccactcccataccagcagaagaggtgaagaaagtggtcagaaaatgtctcgagaaagctgccttgatcaattacactagactcacagaatatgccaaaatagaaggcccagcagaaaaggaaacagagaccatgaaccaggcatctcctgctagaaagctggaagagattcttcatctggcagagctctgcatagaagtcttacagcagaatgaagagcatcatgcagaggcatttgcctggtggcctgatttattggctgaacatgcagagaaattttgggctttatttacagtggatatggacactgcactagaggctcaaccgcaagactcctgggatagttttcctcttttccaactgcttaataatttcctccgaaatgacacacttttgtgtaatggaaaatttcacaaacacttgcaagaaatctttgtacccttggttgtccgctatgtggatctcatggagtcttccatcgcccagtcaattcacagaggttttgagcaggagacatggcagcctgtcaagaatatcgccaacagtcttcccaatgtagctcttccaaaagttccaagtctgcctcttaatcttccacagattcctaacatttctactgcttcgtggatgccttctttatatgagtccaccaatggctcagcaacatcagaagaccttttttggaagcttgatgcactgcaaatgtttgtctttgatctgcactggccagaacaggaatttgcccaccacttagagcaaagacttaaactaatggccagtgatatgctagaggcctgtgtcaaaagaacaagaactgcatttgaactcaagctacaaaaggcaagcaaaacaactgacttgcgcattccagcttccgtttgcactatgtttaatgtattagtcgatgccaaaaagcaaagcaccaaactctgtgccctggatggaggacaagagcaacagtaccattcaaaaatagatgatctgatcgacaacagtgtaaaagaaatcatttcactgttagtttcaaagtttgtttcagtgttggaaggcgtgttgtctaagctgtcaaggtatgatgaaggcactttcttttcatccattctgtcattcactgtgaaagcagctgcaaaatatgttgatgttccaaaaccaggaatggatctggcagacacctatattatgtttgttcggcaaaaccaagatattcttcgagaaaaggtcaatgaggaaatgtatatagaaaagttatttgatcaatggtacagcagttccatgaaagtcatttgcgtgtggttgactgatagattagacctccaactccatatttaccagctgaagacgctcatcaagattgtgaagaaaacctacagggactttcgattgcagggtgtgttggaaggaacactgaacagtaagacttatgatactgtgcacagacgtttaacagtagaggaggccacagcctctgtttcagaaggaggaggacttcagggcattactatgaaagacagtgacgaagaagaagaaggctgatatcacacagctttgcagaaggaaggaagaccttgatcgacattgttttttatttttttaaccttgtccttgtaattacattcattgtttgttttggccaaataaaaatgcttgtatttctttaaaaagtaagcctgaatgtagagtaaaaggggaaatgccaagattttggggtttttttgtttcctttttttgtttgtttgtttgtttgtttttttggagaagagcatcctcttttgtgtagtttgacctaaaaatgaaccttggctctgcttgtgatcagaacatgaacttttttttttaaagaagatttgagcatttttctgtaatcacatcaaaatgatgttttctgtgtaaagcgagatacatatttctcataatgcagcattgtgagaagtcagttcggaccactgcaccaacactgtcgtatccttgttaaaatggtgtgtaccttacaaattataatttatgtgccaggttcgttttgtacttaatttgctattattgtgatgtgtataaaatctttaatcttggttcttagtactttgaattggtctacaggtatattcctgggatgaaaggattgccaaacccaaatatagactagattatccaatgggtttgtgtctttgttccattctcaacatttcttctttcaactataagtaatccccaggtgtggggtagcaagtgtgcttccgtcaagataccatattctcctgctccagtataacagcttgcaggcaataaaaatctatttgctcataactacttctgtatttattagacttatatagagcaaatgcagtaaaagaggtttgcagtgtttcaaacatcccaactatctgactctgtgtttttgtttcttgagttttttgtttgttttgtttgtaatattttgtttttaatcaaatgagtaaaagatagtaacactgactgttctttgtacctaataggcacatacattgttaaaagaattactatgacagcatatttccatagcagaggaaatatatatttcatatattattagttaatattagtaatcaatgttaactaataattagtaatgttagtaatattaactagtaattcacattattagtggttctctcaaaatattttcttgctagggtttgagagataattgtattatgttgcgtaagttctctatgaattatttttgtgatatttcccaaaacatattggcagattgtgctactgcatttattaataagtaatttttaaatgaaggcagttaatgcagaataagtggaggtatccctgcatttatgaaaacgtttattctgaaactttagaaatgaaacaacttggacctccagattcgttctcccatggtgtaataagtggtcgttaggtacctagactagccttaaaaatctatttaatctacagttactatttagcattgttttggctcattttctgggccctagggctaagataacaaacaaggaaatttcttccttcttccgggattaaagactaactctaccaactcactatctttgaaaggcagtttgggaatgttctccctccttttcttctctattcacacaccaaatactattttctccaaaccctcaaatgtccagtcatgctatcccaaactctccaatggcaccatccccaagcttgctgttccacgacacattgctctgtacttagtaattacccacccttcttttcctttcaataaaatgtccatttccttgat

SEQ ID NO: 112732 - DNA, 5275 bp, Homo sapiens
  Payload ID: 2061
  Gene Symbol: CACHD1
  Gene Name: cache domain containing 1
  ENST ID: ENST00000290039
  CDS Start-End: 107-3778
gcggccgcccctctggctgctctgcctggtcgcgtgctggctcctgggcgccggggccgaagccgacttctccatcctggacgaggcgcaagtgctggcgagccagatgcggaggctggcggccgaggagctgggggtcgtcaccatgcagcggatattcaactcctttgtttacactgagaaaatctcaaatggagaaagtgaagtacagcagctagccaaaaaaatccgagagaagttcaaccgttacttggatgtggtcaatcggaacaagcaagttgtagaagcatcctatacggctcacctaacctctcccctaactgcaattcaagactgctgtactatcccaccttccatgatggaattcgatgggaactttaataccaatgtgtctagaacaattagttgtgatcgactttctactactgttaatagccgggccttcaatccaggacgagacttaaattcagttcttgcagacaacctgaaatccaaccctggaattaagtggcaatatttcagttcagaagaaggaattttcactgttttcccagcacacaagttccggtgtaagggcagctacgaacaccgcagtagacccatctacgtctctacagtccggccgcagtcaaagcacatagtagtgattctggaccacggggcttcagtcacagacactcagcttcagattgccaaggacgctgctcaggtcatcctcagcgccatcgatgaacatgacaagatttctgtgttaactgtggcagataccgtccggacttgctcactagaccagtgctataagaccttcttgtctccagccaccagtgagacaaaaaggaaaatgtccacctttgttagcagcgtgaagtcttcagacagtcctacccagcacgcagtgggattccaaaaggcatttcagctgattcgaagtacaaacaataacacaaagttccaagcaaatacagacatggtcatcatttacctgtcagctggcattacatcaaaggactcttcggaagaagataaaaaagcgactctccaagtcatcaatgaagaaaatagctttctaaacaactctgtaatgattctcacctatgccctcatgaacgatggggtgactggtttgaaagagctggcttttctgagggatctagctgaacagaattcagggaagtacggtgtgccagaccggatggccttgcctgtgattaagggcagcatgatggtgctgaatcagttgagcaacctggagaccacagtgggcaggttctacacaaaccttcccaaccggatgattgatgaagccgtcttcagcctgcccttctctgatgagatgggagatggtttgataatgactgtgagtaaaccctgttattttggaaacctacttctgggaattgtaggtgtggacgtgaatctggcttacattcttgaagacgtgacgtattaccaagactctttggcttcctatacttttctcatagacgacaaaggatatacacttatgcacccatctcttaccaggccatatttattgtcagagcccccacttcatactgacatcatacattatgaaaatattccaaaatttgaattagttcggcaaaatatcctaagcctccctctgggcagccagattatcgcagtccctgtgaactcatccctgtcttggcacataaacaagctgagagaaactggaaaggaagcctacaatgttagctatgcctggaagatggtacaagacacttcctttattctgtgtattgtggtgatacaaccagaaatacctgtgaaacaactgaagaacctcaacactgttcccagcagcaagctgctgtaccaccggctggatctccttggccagcccagtgcttgcctccacttcaaacagctggcaaccctagaaagtcccaccatcatgctgtctgctggcagcttttcctccccctatgagcacctcagccagccagagacaaagcgcatggtagagcactacaccgcctatctcagcgacaacacccgcctcattgctaacccgggcctcaaattctctgtcagaaatgaagtaatggctaccagccacgtcacagatgaatggatgacacaaatggaaatgagtagcctgaacacttacattgtccgccgttacatagcaacacccaatggcgtcctcagaatttatcctggttccctcatggacaaagcatttgatcccactaggagacaatggtatctccatgcagtagctaatccagggttgatttctttgactggtccttacttagatgttggaggagctggttatgttgtgacaatcagtcacacaattcattcatccagtacacagctgtcttctgggcacactgtggctgtgatgggcattgacttcacactcagatacttctacaaagttctgatggacctattacctgtctgtaaccaagatggtggcaacaaaataaggtgcttcataatggaggacaggggttatctggtggcgcacccgactctcatcgaccccaaaggacatgcacctgtggagcagcagcacatcacccacaaggagcccctggtagcaaatgatatcctcaaccaccccaactttgtaaagaaaaacctgtgcaacagcttcagtgacagaacggtccagaggttttataaattcaacaccagccttgcgggggatttgacgaaccttgtgcatggcagccactgttccaaatacagattagcaaggatcccaggaaccaacgcgtttgttggcattgtcaacgaaacctgcgactctcttgccttctgtgcctgcagcatggtggaccgactctgtctcaactgtcaccgaatggaacaaaatgaatgtgaatgtccttgtgagtgccctctagaggtcaatgagtgcactggcaacctcaccaatgcagagaaccgaaaccccagctgcgaggtccaccaggagccggtgacatacacagctattgaccctggcctgcaagatgctcttcaccagtgtgtcaacagcaggtgcagtcagaggctggaaagtggggactgttttggggtgctggattgtgaatggtgcatggtggacagtgatggaaagactcacctggacaaaccctactgtgccccccagaaagaatgcttcggggggattgtgggagccaaaagtccctacgttgatgacatgggagcaataggtgatgaggtgatcacattaaacatgattaaaagcgcccctgtgggtcctgtggctggagggatcatgggatgcatcatggtcttggtcctggcggtgtatgcctaccgccaccagattcatcgccggagccatcagcatatgtctcctcttgctgcccaagaaatgtcagtgcgtatgtccaacctggagaatgacagagatgaaagggacgacgacagccacgaagacagaggcatcatcagcaacactcggtttatagctgcggtcatcgaacgacatgcacacagtccagaaagaaggcgccgctactggggtcgatcaggaacagaaagtgatcatggttacagcaccatgagcccacaggaggacagtgaaaatcctccatgcaacaatgaccccttgtcagccggggtcgatgtgggaaaccatgatgaggacttagacctggataccccccctcagactgctgccctactaagtcacaagttccaccactaccggtcacaccaccctacacttcatcatagccaccacttacaggcggccgtcacggtacacactgtcgatgcagaatgctaacaatctcctcacctccacgccaagatgagatctgggagctacagaatgttctggaaagaaaaagaaccggcttaaaacccacagcaagagacctcccttgtgtttgtgctttgtgcagagttgtttgagtcatttcctgcctgtcgacatggttaaaaacgagagaaacaacaacacagtcacatttgtgaagatgtgaggctggttctgaaatggaggggaaataagcctgatgaacagacctgccataacactaatggaaggtaacagaaggcgaacctccaaacacagagacggaacctgcaagtgaagctgagccagaggaatgttccaaagagccagaagcattcagctctccttaactggaagagagaaaaatctgctcacccagagactggaatgtggcacatgcagatacaaatgtgtgcattgaagatttcgctttgtttcttagcggtacctggataccacagttgctgtatggaactcatgttatgctctaaacgatgcatctcagaatttctaagtaaaggattatttttctactatttattgaactttcaaacattctcaaactttggggaaaaggaaaggaaacacaggagaagttttcagcagttgccccgagctgttttgtgtgtaatgaagtggttctttgattaaggagctctatttcttatttaactgatatcccactgccccactccacaaaataggaaaatgaagaaatctttctctctgacttgtttacatcatttcacggaaacacatctttgtttgtaatgcagtattctttctctgtgtttgacagagatggggaggggcagaggaatttaagaggttttaaaagaaatgttatgtttcttatgacttgtttccactcctcgtacaatgctattcttaggtttctacgaaacctaatgttagaaccgcatcctttcagctaagggagggttggatttattttccttgttttagagactacaaatttttaaatatcccattttgactgagaatattgacatataagggaagaagttttctaaattgtgaaagtctggttcttaattaaagaattttttttttaatatcacggttaaaagctgctgccagttagccaagacattatccaccaaattgctttgtgatttatacagggattaatcaaatctggctactataacatggggcattgtaactttaaagtagtgttttaattacagtgatgtattttagactcacattttgtgattcaaatatgttataaaggcattcttgcaccatggtaaagaatgtgtgtggtaaatctccgtttatatgtagttggaaaaaattcactgaataatgttttaatgatagggtattatgatacaatgtaaaaaacaattggttcttcagcagtacagaaagtaaactatatatgtgctatcaggaaaccccttcatactgtgtataaaattgcaatctagtgaaataaaccgtatgcaatggaccatt

SEQ ID NO: 112733 - DNA, 2797 bp, Homo sapiens
  Payload ID: 2062
  Gene Symbol: CACTIN
  Gene Name: cactin, spliceosome C complex subunit
  Uniprot ID: Q8WUQ7
  ENST ID: ENST00000221899
  CDS Start-End: 54-2330
cccagcgcaggcttcggctattggtgttggtgccgcggccactggcccagccgatgggtcgggacacacgctcgcgctcgcggtccgcgggtcgccggggccgaaggcggcagagtcagagcgggagccgaagtcggagcaggagccatgggcggcgaaaccgacggcgccgggaggacgagggacggcgcagacggaggcggcggagccgggagcgcaggtcagattcagaggaagagcggtggcagcgctcagggatgcgaagccggagccccccgcggcccaagtggcactcaagagatgggtcctctcagtcggactcaggagaggagcagtcacggggccagtgggctcgccggcgacggcgcgcacgctcgtggtctcctagctcctcagcatccagctccgcgtctccagggcgatcccagagcccccgggcggccgcggctgccctgagccagcagcagagcctgcaggagcggctgcggctgcgggaggagcggaagcagcaggaggagctgatgaaggccttcgagacgcccgaggagaagcgcgcacggcggctggccaagaaggaggccaaggagcgcaagaagcgggagaagatgggctggggtgaggagtacatgggctacaccaacaccgacaaccccttcggagacaacaacctgctgggcaccttcatctggaataaggccctggagaagaaggggatcagccacctggaggagaaggagctgaaggagcggaacaagaggatccaggaggacaaccggctggagctgcagaaggtgaagcagctgcggctggagcgggagcgggagaaggccatgcgcgagcaggagctggagatgctgcagcgcgagaaggaggcagagcacttcaagacatgggaggagcaggaggacaacttccacctccagcaggccaagctgcgttccaagatccgcatccgggacgggcgggccaagcccatcgacctgctggccaagtacatcagcgctgaggatgacgatctggccgtggagatgcatgagccctacacgttcctcaacggcctcaccgtggccgacatggaggacctgctggaggatatccaggtctacatggagctggagcagggcaagaacgccgacttctggcgggacatgaccaccatcaccgaggacgagatctccaagctccgcaagctggaggcctcgggcaaggggccaggtgagcgccgcgagggggtcaacgcctccgtcagctctgatgtgcagtcggtgttcaaggggaagacatacaaccagctgcaggtcatcttccagggcatcgagggcaaaatccgcgctggtggccccaacctggacatgggctactgggagagcctcctgcagcagcttcgtgcccacatggcacgggcccggctgcgtgagcgccaccaggacgtgctgcggcagaagctgtacaaactgaagcaggagcagggcgtggagagcgagccgctgttccccatcctcaagcaggagccccagtcccccagccgcagcctggagcctgaggacgcggcgcccaccccgcccgggccctcctcggagggcggccccgcggaggccgaggtggacggcgcgaccccgacagagggcgacggcgacggggacggtgagggcgagggcgagggcgaggcggtgctcatggaggaggacctgatccagcagagcctggacgactacgacgccggcaggtacagcccgcggctgctcacggcgcacgagctgccactggacgcgcacgtgctggaaccggatgaggacctgcagcgcctgcagctctcgcgccagcagctccaggtcacgggagacgccagcgagagcgccgaggacatcttcttccggcgggccaaggagggcatgggccaggacgaggcgcagttcagcgtggagatgccactcaccggcaaggcctacctgtgggccgacaagtaccggccacgcaagccgcgcttcttcaaccgcgtgcacacgggcttcgagtggaacaagtacaaccagacgcactacgactttgacaacccaccgcccaagatcgtgcagggatacaagttcaacatcttctaccccgacctcatcgacaagcgctccacgcccgagtacttcctggaggcctgcgccgacaacaaggatttcgccatcctgcgcttccacgcggggccgccctacgaggacatcgctttcaagatcgtcaaccgcgagtgggaatactcgcaccgccacggcttccgctgccagtttgccaacggcatcttccagctgtggtttcacttcaagcgctaccgctatcggcggtgacggccctggggaacggcaggcagcactgaggccgggaccctgctggcgcccgatccgccactgcagaagagaccctctgtggacacccacactctgcagggactggcccccaactcaccccgtgctggctggtggggtccatttccccgcagcgggccaggagggccgagggccacacgggtgccacagcccaggtcggagtggcccagccggcaggcttgttcttcagcatccgacgggaacatctccaacagaagcaaaacggaaagtgcctcccggacccccagagggccacccaacctcaccagtcaccagccccagaccacccacagcccctcccagacaccccgcctcatctggaaatagttccgtttgtttctctaaaaagacttgtaggtgggaaaaaaaatcttttgttctcatggaattggcctattggcaagatcgcatgtttttttaataaacgt

SEQ ID NO: 112734 - DNA, 2671 bp, Homo sapiens
  Payload ID: 2062
  Gene Symbol: CACTIN
  Gene Name: cactin, spliceosome C complex subunit
  Uniprot ID: Q8WUQ7
  ENST ID: ENST00000248420
  CDS Start-End: 54-2330
cccagcgcaggcttcggctattggtgttggtgccgcggccactggcccagccgatgggtcgggacacacgctcgcgctcgcggtccgcgggtcgccggggccgaaggcggcagagtcagagcgggagccgaagtcggagcaggagccatgggcggcgaaaccgacggcgccgggaggacgagggacggcgcagacggaggcggcggagccgggagcgcaggtcagattcagaggaagagcggtggcagcgctcagggatgcgaagccggagccccccgcggcccaagtggcactcaagagatgggtcctctcagtcggactcaggagaggagcagtcacggggccagtgggctcgccggcgacggcgcgcacgctcgtggtctcctagctcctcagcatccagctccgcgtctccagggcgatcccagagcccccgggcggccgcggctgccctgagccagcagcagagcctgcaggagcggctgcggctgcgggaggagcggaagcagcaggaggagctgatgaaggccttcgagacgcccgaggagaagcgcgcacggcggctggccaagaaggaggccaaggagcgcaagaagcgggagaagatgggctggggtgaggagtacatgggctacaccaacaccgacaaccccttcggagacaacaacctgctgggcaccttcatctggaataaggccctggagaagaaggggatcagccacctggaggagaaggagctgaaggagcggaacaagaggatccaggaggacaaccggctggagctgcagaaggtgaagcagctgcggctggagcgggagcgggagaaggccatgcgcgagcaggagctggagatgctgcagcgcgagaaggaggcagagcacttcaagacatgggaggagcaggaggacaacttccacctccagcaggccaagctgcgttccaagatccgcatccgggacgggcgggccaagcccatcgacctgctggccaagtacatcagcgctgaggatgacgatctggccgtggagatgcatgagccctacacgttcctcaacggcctcaccgtggccgacatggaggacctgctggaggatatccaggtctacatggagctggagcagggcaagaacgccgacttctggcgggacatgaccaccatcaccgaggacgagatctccaagctccgcaagctggaggcctcgggcaaggggccaggtgagcgccgcgagggggtcaacgcctccgtcagctctgatgtgcagtcggtgttcaaggggaagacatacaaccagctgcaggtcatcttccagggcatcgagggcaaaatccgcgctggtggccccaacctggacatgggctactgggagagcctcctgcagcagcttcgtgcccacatggcacgggcccggctgcgtgagcgccaccaggacgtgctgcggcagaagctgtacaaactgaagcaggagcagggcgtggagagcgagccgctgttccccatcctcaagcaggagccccagtcccccagccgcagcctggagcctgaggacgcggcgcccaccccgcccgggccctcctcggagggcggccccgcggaggccgaggtggacggcgcgaccccgacagagggcgacggcgacggggacggtgagggcgagggcgagggcgaggcggtgctcatggaggaggacctgatccagcagagcctggacgactacgacgccggcaggtacagcccgcggctgctcacggcgcacgagctgccactggacgcgcacgtgctggaaccggatgaggacctgcagcgcctgcagctctcgcgccagcagctccaggtcacgggagacgccagcgagagcgccgaggacatcttcttccggcgggccaaggagggcatgggccaggacgaggcgcagttcagcgtggagatgccactcaccggcaaggcctacctgtgggccgacaagtaccggccacgcaagccgcgcttcttcaaccgcgtgcacacgggcttcgagtggaacaagtacaaccagacgcactacgactttgacaacccaccgcccaagatcgtgcagggatacaagttcaacatcttctaccccgacctcatcgacaagcgctccacgcccgagtacttcctggaggcctgcgccgacaacaaggatttcgccatcctgcgcttccacgcggggccgccctacgaggacatcgctttcaagatcgtcaaccgcgagtgggaatactcgcaccgccacggcttccgctgccagtttgccaacggcatcttccagctgtggtttcacttcaagcgctaccgctatcggcggtgacggccctggggaacggcaggccaggagggccgagggccacacgggtgccacagcccaggtcggagtggcccagccggcaggcttgttcttcagcatccgacgggaacatctccaacagaagcaaaacggaaagtgcctcccggacccccagagggccacccaacctcaccagtcaccagccccagaccacccacagcccctcccagacaccccgcctcatctggaaatagttccgtttgtttctctaaaaagacttgtaggtgggaaaaaaaatcttttgttctcatggaattggcctattggcaagatcgcatgtttttttaataaacgttgtattttag

SEQ ID NO: 112735 - DNA, 3612 bp, Homo sapiens
  Payload ID: 2062
  Gene Symbol: CACTIN
  Gene Name: cactin, spliceosome C complex subunit
  Uniprot ID: Q8WUQ7
  ENST ID: ENST00000429344
  CDS Start-End: 54-2330
cccagcgcaggcttcggctattggtgttggtgccgcggccactggcccagccgatgggtcgggacacacgctcgcgctcgcggtccgcgggtcgccggggccgaaggcggcagagtcagagcgggagccgaagtcggagcaggagccatgggcggcgaaaccgacggcgccgggaggacgagggacggcgcagacggaggcggcggagccgggagcgcaggtcagattcagaggaagagcggtggcagcgctcagggatgcgaagccggagccccccgcggcccaagtggcactcaagagatgggtcctctcagtcggactcaggagaggagcagtcacggggccagtgggctcgccggcgacggcgcgcacgctcgtggtctcctagctcctcagcatccagctccgcgtctccagggcgatcccagagcccccgggcggccgcggctgccctgagccagcagcagagcctgcaggagcggctgcggctgcgggaggagcggaagcagcaggaggagctgatgaaggccttcgagacgcccgaggagaagcgcgcacggcggctggccaagaaggaggccaaggagcgcaagaagcgggagaagatgggctggggtgaggagtacatgggctacaccaacaccgacaaccccttcggagacaacaacctgctgggcaccttcatctggaataaggccctggagaagaaggggatcagccacctggaggagaaggagctgaaggagcggaacaagaggatccaggaggacaaccggctggagctgcagaaggtgaagcagctgcggctggagcgggagcgggagaaggccatgcgcgagcaggagctggagatgctgcagcgcgagaaggaggcagagcacttcaagacatgggaggagcaggaggacaacttccacctccagcaggccaagctgcgttccaagatccgcatccgggacgggcgggccaagcccatcgacctgctggccaagtacatcagcgctgaggatgacgatctggccgtggagatgcatgagccctacacgttcctcaacggcctcaccgtggccgacatggaggacctgctggaggatatccaggtctacatggagctggagcagggcaagaacgccgacttctggcgggacatgaccaccatcaccgaggacgagatctccaagctccgcaagctggaggcctcgggcaaggggccaggtgagcgccgcgagggggtcaacgcctccgtcagctctgatgtgcagtcggtgttcaaggggaagacatacaaccagctgcaggtcatcttccagggcatcgagggcaaaatccgcgctggtggccccaacctggacatgggctactgggagagcctcctgcagcagcttcgtgcccacatggcacgggcccggctgcgtgagcgccaccaggacgtgctgcggcagaagctgtacaaactgaagcaggagcagggcgtggagagcgagccgctgttccccatcctcaagcaggagccccagtcccccagccgcagcctggagcctgaggacgcggcgcccaccccgcccgggccctcctcggagggcggccccgcggaggccgaggtggacggcgcgaccccgacagagggcgacggcgacggggacggtgagggcgagggcgagggcgaggcggtgctcatggaggaggacctgatccagcagagcctggacgactacgacgccggcaggtacagcccgcggctgctcacggcgcacgagctgccactggacgcgcacgtgctggaaccggatgaggacctgcagcgcctgcagctctcgcgccagcagctccaggtcacgggagacgccagcgagagcgccgaggacatcttcttccggcgggccaaggagggcatgggccaggacgaggcgcagttcagcgtggagatgccactcaccggcaaggcctacctgtgggccgacaagtaccggccacgcaagccgcgcttcttcaaccgcgtgcacacgggcttcgagtggaacaagtacaaccagacgcactacgactttgacaacccaccgcccaagatcgtgcagggatacaagttcaacatcttctaccccgacctcatcgacaagcgctccacgcccgagtacttcctggaggcctgcgccgacaacaaggatttcgccatcctgcgcttccacgcggggccgccctacgaggacatcgctttcaagatcgtcaaccgcgagtgggaatactcgcaccgccacggcttccgctgccagtttgccaacggcatcttccagctgtggtttcacttcaagcgctaccgctatcggcggtgacggccctggggaacggcaggcaggtgtcctcgggggcacagtaaaggggcttcggtgaagctggtggtcactccggggccgctgtctgggctgcagggccgcgggttcacgtcccacctcaggccgcatctttctttcgccaggcctcagtttcctcctatataaaaggggggtcaccattgagcctgccatggtgagctgaggagacactgggacaggctggcctagggtcctgatgcaacggagggggcgctaggggcatctttcgagcacgagggtggccagcagccgccagctgacctcaccgtccaggcggacactctccaccgcccctcagccaggctgggtggggcccacagggcctgccccaagtggcggccacacagggtgttgtggagatgggccagaggggcctgggcttggcggtgccaggctcgtgagaagcaggaaactcaaggccagccctgccacatcacggggcacccactgggcgtgaggcagagcccgcggctgtggggcagctccagccctgcccacaggccaccctcgcccgcacaggcagcactgaggccgggaccctgctggcgcccgatccgccactgcagaagagaccctctgtggacacccacactctgcagggactggcccccaactcaccccgtgctggctggtggggtccatttccccgcagcgggtatggaggatgcgtcgaggtccctgtctctgtcaaggtcgtgggaaccaaaagtcactgagccgtcctccccccacctctgagcacagggcctggagggcaggggctccccgaaggctgggggttggagaagggtgaggggcttcccccagggatccccccacctggcctgctcacggggccttggagcatgagaccagtgaccccgagttttgcccatatcaggacagtggctccttctcactcccctttctcaggccaggagggccgagggccacacgggtgccacagcccaggtcggagtggcccagccggcaggcttgttcttcagcatccgacgggaacatctccaacagaagcaaaacggaaagtgcctcccggacccccagagggccacccaacctcaccagtcaccagccccagaccacccacagcccctcccagacaccccgcctcatctggaaatagttccgtttgtttctctaaaaagacttgtaggtgggaaaaaaaatcttttgttctcatggaattggcctattggcaagatcgcatgtttttttaataaacgttgtattttagaataatctt

SEQ ID NO: 112736 - DNA, 699 bp, Homo sapiens
  Payload ID: 2062
  Gene Symbol: CACTIN
  Gene Name: cactin, spliceosome C complex subunit
  ENST ID: ENST00000591726
  CDS Start-End: 1-354
aagccgcgcttcttcaaccgcgtgcacacgggcttcgagtggaacaagtacaaccagacgcactacgactttgacaacccaccgcccaagatcgtgcagggatacaagttcaacatcttctaccccgacctcatcgacaagcgctccacgcccgagtacttcctggaggcctgcgccgacaacaaggatttcgccatcctgcgcttccacgcggggccgccctacgaggacatcgctttcaagatcgtcaaccgcgagtgggaatactcgcaccgccacggcttccgctgccagtttgccaacggcatcttccagctgtggtttcacttcaagcgctaccgctatcggcggtgacggccctggggaacggcaggcaggagggccgagggccacacgggtgccacagcccaggtcggagtggcccagccggcaggcttgttcttcagcatccgacgggaacatctccaacagaagcaaaacggaaagtgcctcccggacccccagagggccacccaacctcaccagtcaccagccccagaccacccacagcccctcccagacaccccgcctcatctggaaatagttccgtttgtttctctaaaaagacttgtaggtgggaaaaaaaatcttttgttctcatggaattggcctattggcaagatcgcatgtttttttaataaacgttgtattttagaataa

SEQ ID NO: 112737 - DNA, 2810 bp, Homo sapiens
  Payload ID: 2062
  Gene Symbol: CACTIN
  Gene Name: cactin, spliceosome C complex subunit
  Uniprot ID: Q8WUQ7
  ENST ID: ENST00000585942
  CDS Start-End: 54-2330
cccagcgcaggcttcggctattggtgttggtgccgcggccactggcccagccgatgggtcgggacacacgctcgcgctcgcggtccgcgggtcgccggggccgaaggcggcagagtcagagcgggagccgaagtcggagcaggagccatgggcggcgaaaccgacggcgccgggaggacgagggacggcgcagacggaggcggcggagccgggagcgcaggtcagattcagaggaagagcggtggcagcgctcagggatgcgaagccggagccccccgcggcccaagtggcactcaagagatgggtcctctcagtcggactcaggagaggagcagtcacggggccagtgggctcgccggcgacggcgcgcacgctcgtggtctcctagctcctcagcatccagctccgcgtctccagggcgatcccagagcccccgggcggccgcggctgccctgagccagcagcagagcctgcaggagcggctgcggctgcgggaggagcggaagcagcaggaggagctgatgaaggccttcgagacgcccgaggagaagcgcgcacggcggctggccaagaaggaggccaaggagcgcaagaagcgggagaagatgggctggggtgaggagtacatgggctacaccaacaccgacaaccccttcggagacaacaacctgctgggcaccttcatctggaataaggccctggagaagaaggggatcagccacctggaggagaaggagctgaaggagcggaacaagaggatccaggaggacaaccggctggagctgcagaaggtgaagcagctgcggctggagcgggagcgggagaaggccatgcgcgagcaggagctggagatgctgcagcgcgagaaggaggcagagcacttcaagacatgggaggagcaggaggacaacttccacctccagcaggccaagctgcgttccaagatccgcatccgggacgggcgggccaagcccatcgacctgctggccaagtacatcagcgctgaggatgacgatctggccgtggagatgcatgagccctacacgttcctcaacggcctcaccgtggccgacatggaggacctgctggaggatatccaggtctacatggagctggagcagggcaagaacgccgacttctggcgggacatgaccaccatcaccgaggacgagatctccaagctccgcaagctggaggcctcgggcaaggggccaggtgagcgccgcgagggggtcaacgcctccgtcagctctgatgtgcagtcggtgttcaaggggaagacatacaaccagctgcaggtcatcttccagggcatcgagggcaaaatccgcgctggtggccccaacctggacatgggctactgggagagcctcctgcagcagcttcgtgcccacatggcacgggcccggctgcgtgagcgccaccaggacgtgctgcggcagaagctgtacaaactgaagcaggagcagggcgtggagagcgagccgctgttccccatcctcaagcaggagccccagtcccccagccgcagcctggagcctgaggacgcggcgcccaccccgcccgggccctcctcggagggcggccccgcggaggccgaggtggacggcgcgaccccgacagagggcgacggcgacggggacggtgagggcgagggcgagggcgaggcggtgctcatggaggaggacctgatccagcagagcctggacgactacgacgccggcaggtacagcccgcggctgctcacggcgcacgagctgccactggacgcgcacgtgctggaaccggatgaggacctgcagcgcctgcagctctcgcgccagcagctccaggtcacgggagacgccagcgagagcgccgaggacatcttcttccggcgggccaaggagggcatgggccaggacgaggcgcagttcagcgtggagatgccactcaccggcaaggcctacctgtgggccgacaagtaccggccacgcaagccgcgcttcttcaaccgcgtgcacacgggcttcgagtggaacaagtacaaccagacgcactacgactttgacaacccaccgcccaagatcgtgcagggatacaagttcaacatcttctaccccgacctcatcgacaagcgctccacgcccgagtacttcctggaggcctgcgccgacaacaaggatttcgccatcctgcgcttccacgcggggccgccctacgaggacatcgctttcaagatcgtcaaccgcgagtgggaatactcgcaccgccacggcttccgctgccagtttgccaacggcatcttccagctgtggtttcacttcaagcgctaccgctatcggcggtgacggccctggggaacggcaggcagcactgaggccgggaccctgctggcgcccgatccgccactgcagaagagaccctctgtggacacccacactctgcagggactggcccccaactcaccccgtgctggctggtggggtccatttccccgcagcgggccaggagggccgagggccacacgggtgccacagcccaggtcggagtggcccagccggcaggcttgttcttcagcatccgacgggaacatctccaacagaagcaaaacggaaagtgcctcccggacccccagagggccacccaacctcaccagtcaccagccccagaccacccacagcccctcccagacaccccgcctcatctggaaatagttccgtttgtttctctaaaaagacttgtaggtgggaaaaaaaatcttttgttctcatggaattggcctattggcaagatcgcatgtttttttaataaacgttgtattttagaat

SEQ ID NO: 112738 - DNA, 1708 bp, Homo sapiens
  Payload ID: 2062
  Gene Symbol: CACTIN
  Gene Name: cactin, spliceosome C complex subunit
  ENST ID: ENST00000589321
  CDS Start-End: 1-424
caagtacatcagcgctgaggatgacgatctggccgtggagatgcatgagccctacacgttcctcaacggcctcaccgtggccgacatggaggacctgctggaggatatccaggtctacatggagctggagcagggcaagaacgccgacttctggcgggacatgaccaccatcaccgaggacgagatctccaagctccgcaagctggaggcctcgggcaaggggccaggtgagcgccgcgagggggtcaacgcctccgtcagctctgatgtgcagtcggtgttcaaggggaagacatacaaccagctgcaggtcatcttccagggcatcgagggcaaaatccgcgctggtggccccaacctggacatgggctactgggagagcctcctgcagcagcttcgtgcccacatggcacgggcccggtgagcactaggctgcgtgagcgccaccaggacgtgctgcggcagaagctgtacaaactgaagcaggagcagggcgtggagagcgagccgctgttccccatcctcaagcaggagccccagtcccccagccgcagcctggagcctgaggacgcggcgcccaccccgcccgggccctcctcggagggcggccccgcggaggccgaggtggacggcgcgaccccgacagagggcgacggcgacggggacggtgagggcgagggcgagggcgaggcggtgctcatggaggaggacctgatccagcagagcctggacgactacgacgccggcaggtacagcccgcggctgctcacggcgcacgagctgccactggacgcgcacgtgctggaaccggatgaggacctgcagcgcctgcagctctcgcgccagcagctccaggtcacgggagacgccagcgagagcgccgaggacatcttcttccggcgggccaaggagggcatgggccaggacgaggcgcagttcagcgtggagatgccactcaccggcaaggcctacctgtgggccgacaagtaccggccacgcaagccgcgcttcttcaaccgcgtgcacacgggcttcgagtggaacaagtacaaccagacgcactacgactttgacaacccaccgcccaagatcgtgcagggatacaagttcaacatcttctaccccgacctcatcgacaagcgctccacgcccgagtacttcctggaggcctgcgccgacaacaaggatttcgccatcctgcgcttccacgcggggccgccctacgaggacatcgctttcaagatcgtcaaccgcgagtgggaatactcgcaccgccacggcttccgctgccagtttgccaacggcatcttccagctgtggtttcacttcaagcgctaccgctatcggcggtgacggccctggggaacggcaggcaggtgtcctcgggggcacagtaaaggggcttcggtgaagctggtggtcactccggggccgctgtctgggctgcagggccgcgggttcacgtcccacctcaggccgcatctttctttcgccaggcctcagtttcctcctatataaaaggggggtcaccattgagcctgccatggtgagctgaggagacactgggacaggctggcctagggtcctgatgcaacggagggggcgctaggggcatctttcgagcacgagggtggccagcagccgccagctgacctcaccgtccaggcggacactctccaccgcccctcagccaggctgggtggggccc

SEQ ID NO: 112739 - DNA, 1220 bp, Homo sapiens
  Payload ID: 2062
  Gene Symbol: CACTIN
  Gene Name: cactin, spliceosome C complex subunit
  ENST ID: ENST00000592721
  CDS Start-End: 1-874
gaagcaggagcagggcgtggagagcgagccgctgttccccatcctcaagcaggagccccagtcccccagccgcagcctggagcctgaggacgcggcgcccaccccgcccgggccctcctcggagggcggccccgcggaggccgaggtggacggcgcgaccccgacagagggcgacggcgacggggacggtgagggcgagggcgagggcgaggcggtgctcatggaggaggacctgatccagcagagcctggacgactacgacgccggcaggtacagcccgcggctgctcacggcgcacgagctgccactggacgcgcacgtgctggaaccggatgaggacctgcagcgcctgcagctctcgcgccagcagctccaggtcacgggagacgccagcgagagcgccgaggacatcttcttccggcgggccaaggagggcatgggccaggacgaggcgcagttcagcgtggagatgccactcaccggcaaggcctacctgtgggccgacaagtaccggccacgcaagccgcgcttcttcaaccgcgtgcacacgggcttcgagtggaacaagtacaaccagacgcactacgactttgacaacccaccgcccaagatcgtgcagggatacaagttcaacatcttctaccccgacctcatcgacaagcgctccacgcccgagtacttcctggaggcctgcgccgacaacaaggatttcgccatcctgcgcttccacgcggggccgccctacgaggacatcgctttcaagatcgtcaaccgcgagtgggaatactcgcaccgccacggcttccgctgccagtttgccaacggcatcttccagctgtggtttcacttcaagcgctaccgctatcggcggtgacggccctggggaacggcaggccaggagggccgagggccacacgggtgccacagcccaggtcggagtggcccagccggcaggcttgttcttcagcatccgacgggaacatctccaacagaagcaaaacggaaagtgcctcccggacccccagagggccacccaacctcaccagtcaccagccccagaccacccacagcccctcccagacaccccgcctcatctggaaatagttccgtttgtttctctaaaaagacttgtaggtgggaaaaaaaatcttttgttctcatggaattggcctattggcaagatcgcatgtttttttaataaacgttgtattttagaataa

SEQ ID NO: 112740 - DNA, 391 bp, Homo sapiens
  Payload ID: 2062
  Gene Symbol: CACTIN
  Gene Name: cactin, spliceosome C complex subunit
  ENST ID: ENST00000588749
  CDS Start-End: 1-391
gatctggccgtggagatgcatgagccctacacgttcctcaacggcctcaccgtggccgacatggaggacctgctggaggatatccaggtctacatggagctggagcagggcaagaacgccgacttctggcgggacatgaccaccatcaccgaggacgagatctccaagctccgcaagctggaggcctcgggcaaggggccagggcatcgagggcaaaatccgcgctggtggccccaacctggacatgggctactgggagagcctcctgcagcagcttcgtgcccacatggcacgggcccggtgagcactaggctgcgtgagcgccaccaggacgtgctgcggcagaagctgtacaaactgaagcaggagcagggcgtggagagcgagccgc

SEQ ID NO: 112741 - DNA, 4889 bp, Homo sapiens
  Payload ID: 2063
  Gene Symbol: CDH1
  Gene Name: cadherin 1, type 1
  Uniprot ID: P12830
  ENST ID: ENST00000261769
  CDS Start-End: 192-2840
agccaatcagcggtacggggggcggtgcctccggggctcacctggctgcagccacgcaccccctctcagtggcgtcggaactgcaaagcacctgtgagcttgcggaagtcagttcagactccagcccgctccagcccggcccgacccgaccgcacccggcgcctgccctcgctcggcgtccccggccagccatgggcccttggagccgcagcctctcggcgctgctgctgctgctgcaggtctcctcttggctctgccaggagccggagccctgccaccctggctttgacgccgagagctacacgttcacggtgccccggcgccacctggagagaggccgcgtcctgggcagagtgaattttgaagattgcaccggtcgacaaaggacagcctatttttccctcgacacccgattcaaagtgggcacagatggtgtgattacagtcaaaaggcctctacggtttcataacccacagatccatttcttggtctacgcctgggactccacctacagaaagttttccaccaaagtcacgctgaatacagtggggcaccaccaccgccccccgccccatcaggcctccgtttctggaatccaagcagaattgctcacatttcccaactcctctcctggcctcagaagacagaagagagactgggttattcctcccatcagctgcccagaaaatgaaaaaggcccatttcctaaaaacctggttcagatcaaatccaacaaagacaaagaaggcaaggttttctacagcatcactggccaaggagctgacacaccccctgttggtgtctttattattgaaagagaaacaggatggctgaaggtgacagagcctctggatagagaacgcattgccacatacactctcttctctcacgctgtgtcatccaacgggaatgcagttgaggatccaatggagattttgatcacggtaaccgatcagaatgacaacaagcccgaattcacccaggaggtctttaaggggtctgtcatggaaggtgctcttccaggaacctctgtgatggaggtcacagccacagacgcggacgatgatgtgaacacctacaatgccgccatcgcttacaccatcctcagccaagatcctgagctccctgacaaaaatatgttcaccattaacaggaacacaggagtcatcagtgtggtcaccactgggctggaccgagagagtttccctacgtataccctggtggttcaagctgctgaccttcaaggtgaggggttaagcacaacagcaacagctgtgatcacagtcactgacaccaacgataatcctccgatcttcaatcccaccacgtacaagggtcaggtgcctgagaacgaggctaacgtcgtaatcaccacactgaaagtgactgatgctgatgcccccaataccccagcgtgggaggctgtatacaccatattgaatgatgatggtggacaatttgtcgtcaccacaaatccagtgaacaacgatggcattttgaaaacagcaaagggcttggattttgaggccaagcagcagtacattctacacgtagcagtgacgaatgtggtaccttttgaggtctctctcaccacctccacagccaccgtcaccgtggatgtgctggatgtgaatgaagcccccatctttgtgcctcctgaaaagagagtggaagtgtccgaggactttggcgtgggccaggaaatcacatcctacactgcccaggagccagacacatttatggaacagaaaataacatatcggatttggagagacactgccaactggctggagattaatccggacactggtgccatttccactcgggctgagctggacagggaggattttgagcacgtgaagaacagcacgtacacagccctaatcatagctacagacaatggttctccagttgctactggaacagggacacttctgctgatcctgtctgatgtgaatgacaacgcccccataccagaacctcgaactatattcttctgtgagaggaatccaaagcctcaggtcataaacatcattgatgcagaccttcctcccaatacatctcccttcacagcagaactaacacacggggcgagtgccaactggaccattcagtacaacgacccaacccaagaatctatcattttgaagccaaagatggccttagaggtgggtgactacaaaatcaatctcaagctcatggataaccagaataaagaccaagtgaccaccttagaggtcagcgtgtgtgactgtgaaggggccgctggcgtctgtaggaaggcacagcctgtcgaagcaggattgcaaattcctgccattctggggattcttggaggaattcttgctttgctaattctgattctgctgctcttgctgtttcttcggaggagagcggtggtcaaagagcccttactgcccccagaggatgacacccgggacaacgtttattactatgatgaagaaggaggcggagaagaggaccaggactttgacttgagccagctgcacaggggcctggacgctcggcctgaagtgactcgtaacgacgttgcaccaaccctcatgagtgtcccccggtatcttccccgccctgccaatcccgatgaaattggaaattttattgatgaaaatctgaaagcggctgatactgaccccacagccccgccttatgattctctgctcgtgtttgactatgaaggaagcggttccgaagctgctagtctgagctccctgaactcctcagagtcagacaaagaccaggactatgactacttgaacgaatggggcaatcgcttcaagaagctggctgacatgtacggaggcggcgaggacgactaggggactcgagagaggcgggccccagacccatgtgctgggaaatgcagaaatcacgttgctggtggtttttcagctcccttcccttgagatgagtttctggggaaaaaaaagagactggttagtgatgcagttagtatagctttatactctctccactttatagctctaataagtttgtgttagaaaagtttcgacttatttcttaaagcttttttttttttcccatcactctttacatggtggtgatgtccaaaagatacccaaattttaatattccagaagaacaactttagcatcagaaggttcacccagcaccttgcagattttcttaaggaattttgtctcacttttaaaaagaaggggagaagtcagctactctagttctgttgttttgtgtatataattttttaaaaaaaatttgtgtgcttctgctcattactacactggtgtgtccctctgccttttttttttttttaagacagggtctcattctatcggccaggctggagtgcagtggtgcaatcacagctcactgcagccttgtcctcccaggctcaagctatccttgcacctcagcctcccaagtagctgggaccacaggcatgcaccactacgcatgactaattttttaaatatttgagacggggtctccctgtgttacccaggctggtctcaaactcctgggctcaagtgatcctcccatcttggcctcccagagtattgggattacagacatgagccactgcacctgcccagctccccaactccctgccattttttaagagacagtttcgctccatcgcccaggcctgggatgcagtgatgtgatcatagctcactgtaacctcaaactctggggctcaagcagttctcccaccagcctcctttttatttttttgtacagatggggtcttgctatgttgcccaagctggtcttaaactcctggcctcaagcaatccttctgccttggccccccaaagtgctgggattgtgggcatgagctgctgtgcccagcctccatgttttaatatcaactctcactcctgaattcagttgctttgcccaagataggagttctctgatgcagaaattattgggctcttttagggtaagaagtttgtgtctttgtctggccacatcttgactaggtattgtctactctgaagacctttaatggcttccctctttcatctcctgagtatgtaacttgcaatgggcagctatccagtgacttgttctgagtaagtgtgttcattaatgtttatttagctctgaagcaagagtgatatactccaggacttagaatagtgcctaaagtgctgcagccaaagacagagcggaactatgaaaagtgggcttggagatggcaggagagcttgtcattgagcctggcaatttagcaaactgatgctgaggatgattgaggtgggtctacctcatctctgaaaattctggaaggaatggaggagtctcaacatgtgtttctgacacaagatccgtggtttgtactcaaagcccagaatccccaagtgcctgcttttgatgatgtctacagaaaatgctggctgagctgaacacatttgcccaattccaggtgtgcacagaaaaccgagaatattcaaaattccaaatttttttcttaggagcaagaagaaaatgtggccctaaagggggttagttgaggggtagggggtagtgaggatcttgatttggatctctttttatttaaatgtgaatttcaacttttgacaatcaaagaaaagacttttgttgaaatagctttactgtttctcaagtgttttggagaaaaaaatcaaccctgcaatcactttttggaattgtcttgatttttcggcagttcaagctatatcgaatatagttctgtgtagagaatgtcactgtagttttgagtgtatacatgtgtgggtgctgataattgtgtattttctttgggggtggaaaaggaaaacaattcaagctgagaaaagtattctcaaagatgcatttttataaattttattaaacaattttgttaaaccattgtcaaa

SEQ ID NO: 112742 - DNA, 2567 bp, Homo sapiens
  Payload ID: 2063
  Gene Symbol: CDH1
  Gene Name: cadherin 1, type 1
  Uniprot ID: P12830
  ENST ID: ENST00000422392
  CDS Start-End: 65-2530
gctccagcccggcccgacccgaccgcacccggcgcctgccctcgctcggcgtccccggccagccatgggcccttggagccgcagcctctcggcgctgctgctgctgctgcaggtctcctcttggctctgccaggagccggagccctgccaccctggctttgacgccgagagctacacgttcacggtgccccggcgccacctggagagaggccgcgtcctgggcagagtgaattttgaagattgcaccggtcgacaaaggacagcctatttttccctcgacacccgattcaaagtgggcacagatggtgtgattacagtcaaaaggcctctacggtttcataacccacagatccatttcttggtctacgcctgggactccacctacagaaagttttccaccaaagtcacgctgaatacagtggggcaccaccaccgccccccgccccatcaggcctccgtttctggaatccaagcagaattgctcacatttcccaactcctctcctggcctcagaagacagaagagagactgggttattcctcccatcagctgcccagaaaatgaaaaaggcccatttcctaaaaacctggttcagatcaaatccaacaaagacaaagaaggcaaggttttctacagcatcactggccaaggagctgacacaccccctgttggtgtctttattattgaaagagaaacaggatggctgaaggtgacagagcctctggatagagaacgcattgccacatacactctcttctctcacgctgtgtcatccaacgggaatgcagttgaggatccaatggagattttgatcacggtaaccgatcagaatgacaacaagcccgaattcacccaggaggtctttaaggggtctgtcatggaaggtgctcttccaggaacctctgtgatggaggtcacagccacagacgcggacgatgatgtgaacacctacaatgccgccatcgcttacaccatcctcagccaagatcctgagctccctgacaaaaatatgttcaccattaacaggaacacaggagtcatcagtgtggtcaccactgggctggaccgagagagtttccctacgtataccctggtggttcaagctgctgaccttcaaggtgaggggttaagcacaacagcaacagctgtgatcacagtcactgacaccaacgataatcctccgatcttcaatcccaccacgggcttggattttgaggccaagcagcagtacattctacacgtagcagtgacgaatgtggtaccttttgaggtctctctcaccacctccacagccaccgtcaccgtggatgtgctggatgtgaatgaagcccccatctttgtgcctcctgaaaagagagtggaagtgtccgaggactttggcgtgggccaggaaatcacatcctacactgcccaggagccagacacatttatggaacagaaaataacatatcggatttggagagacactgccaactggctggagattaatccggacactggtgccatttccactcgggctgagctggacagggaggattttgagcacgtgaagaacagcacgtacacagccctaatcatagctacagacaatggttctccagttgctactggaacagggacacttctgctgatcctgtctgatgtgaatgacaacgcccccataccagaacctcgaactatattcttctgtgagaggaatccaaagcctcaggtcataaacatcattgatgcagaccttcctcccaatacatctcccttcacagcagaactaacacacggggcgagtgccaactggaccattcagtacaacgacccaacccaagaatctatcattttgaagccaaagatggccttagaggtgggtgactacaaaatcaatctcaagctcatggataaccagaataaagaccaagtgaccaccttagaggtcagcgtgtgtgactgtgaaggggccgctggcgtctgtaggaaggcacagcctgtcgaagcaggattgcaaattcctgccattctggggattcttggaggaattcttgctttgctaattctgattctgctgctcttgctgtttcttcggaggagagcggtggtcaaagagcccttactgcccccagaggatgacacccgggacaacgtttattactatgatgaagaaggaggcggagaagaggaccaggactttgacttgagccagctgcacaggggcctggacgctcggcctgaagtgactcgtaacgacgttgcaccaaccctcatgagtgtcccccggtatcttccccgccctgccaatcccgatgaaattggaaattttattgatgaaaatctgaaagcggctgatactgaccccacagccccgccttatgattctctgctcgtgtttgactatgaaggaagcggttccgaagctgctagtctgagctccctgaactcctcagagtcagacaaagaccaggactatgactacttgaacgaatggggcaatcgcttcaagaagctggctgacatgtacggaggcggcgaggacgactaggggactcgagagaggcgggccccagacccatgtgctg

SEQ ID NO: 112743 - DNA, 4138 bp, Homo sapiens
  Payload ID: 2063
  Gene Symbol: CDH1
  Gene Name: cadherin 1, type 1
  ENST ID: ENST00000566612
  CDS Start-End: 105-1718
gcacctgtgagcttgcggaagtcagttcagactccagcccgctccagcccggcccgacccgaccgcacccggcgcctgccctcgctcggcgtccccggccagccatgggcccttggagccgcagcctctcggcgctgctgctgctgctgcaggtctcctcttggctctgccaggagccggagccctgccaccctggctttgacgccgagagctacacgttcacggtgccccggcgccacctggagagaggccgcgtcctgggcagagtgaattttgaagattgcaccggtcgacaaaggacagcctatttttccctcgacacccgattcaaagtgggcacagatggtgtgattacagtcaaaaggcctctacggtttcataacccacagatccatttcttggtctacgcctgggactccacctacagaaagttttccaccaaagtcacgctgaatacagtggggcaccaccaccgccccccgccccatcaggcctccgtttctggaatccaagcagaattgctcacatttcccaactcctctcctggcctcagaagacagaagagagactgggttattcctcccatcagctgcccagaaaatgaaaaaggcccatttcctaaaaacctggttcagatcaaatccaacaaagacaaagaaggcaaggttttctacagcatcactggccaaggagctgacacaccccctgttggtgtctttattattgaaagagaaacaggatggctgaaggtgacagagcctctggatagagaacgcattgccacatacactctcttctctcacgctgtgtcatccaacgggaatgcagttgaggatccaatggagattttgatcacggtaaccgatcagaatgacaacaagcccgaattcacccaggaggtctttaaggggtctgtcatggaaggtgctcttccaggaacctctgtgatggaggtcacagccacagacgcggacgatgatgtgaacacctacaatgccgccatcgcttacaccatcctcagccaagatcctgagctccctgacaaaaatatgttcaccattaacaggaacacaggagtcatcagtgtggtcaccactgggctggaccgagagagtttccctacgtataccctggtggttcaagctgctgaccttcaaggtgaggggttaagcacaacagcaacagctgtgatcacagtcactgacaccaacgataatcctccgatcttcaatcccaccacgtacaagggtcaggtgcctgagaacgaggctaacgtcgtaatcaccacactgaaagtgactgatgctgatgcccccaataccccagcgtgggaggctgtatacaccatattgaatgatgatggtggacaatttgtcgtcaccacaaatccagtgaacaacgatggcattttgaaaacagcaaagggcttggattttgaggccaagcagcagtacattctacacgtagcagtgacgaatgtggtaccttttgaggtctctctcaccacctccacagccaccgtcaccgtggatgtgctggatgtgaatgaagcccccatctttgtgcctcctgaaaagagagtggaagtgtccgaggactttggcgtgggccaggaaatcacatcctacactgcccaggagccagacacatttatggaacagaaaataacgttctccagttgctactggaacagggacacttctgctgatcctgtctgatgtgaatgacaacgcccccataccagaacctcgaactatattcttctgtgagaggaatccaaagcctcaggtcataaacatcattgatgcagaccttcctcccaatacatctcccttcacagcagaactaacacacggggcgagtgccaactggaccattcagtacaacgacccaacccaagaatctatcattttgaagccaaagatggccttagaggtgggtgactacaaaatcaatctcaagctcatggataaccagaataaagaccaagtgaccaccttagaggtcagcgtgtgtgactgtgaaggggccgctggcgtctgtaggaaggcacagcctgtcgaagcaggattgcaaattcctgccattctggggattcttggaggaattcttgctttgctaattctgattctgctgctcttgctgtttcttcggaggagagcggtggtcaaagagcccttactgcccccagaggatgacacccgggacaacgtttattactatgatgaagaaggaggcggagaagaggaccaggactttgacttgagccagctgcacaggggcctggacgctcggcctgaagtgactcgtaacgacgttgcaccaaccctcatgagtgtcccccggtatcttccccgccctgccaatcccgatgaaattggaaattttattgatgaaaatctgaaagcggctgatactgaccccacagccccgccttatgattctctgctcgtgtttgactatgaaggaagcggttccgaagctgctagtctgagctccctgaactcctcagagtcagacaaagaccaggactatgactacttgaacgaatggggcaatcgcttcaagaagctggctgacatgtacggaggcggcgaggacgactaggggactcgagagaggcgggccccagacccatgtgctgggaaatgcagaaatcacgttgctggtggtttttcagctcccttcccttgagatgagtttctggggaaaaaaaagagactggttagtgatgcagttagtatagctttatactctctccactttatagctctaataagtttgtgttagaaaagtttcgacttatttcttaaagcttttttttttttcccatcactctttacatggtggtgatgtccaaaagatacccaaattttaatattccagaagaacaactttagcatcagaaggttcacccagcaccttgcagattttcttaaggaattttgtctcacttttaaaaagaaggggagaagtcagctactctagttctgttgttttgtgtatataattttttaaaaaaaatttgtgtgcttctgctcattactacactggtgtgtccctctgccttttttttttttttaagacagggtctcattctatcggccaggctggagtgcagtggtgcaatcacagctcactgcagccttgtcctcccaggctcaagctatccttgcacctcagcctcccaagtagctgggaccacaggcatgcaccactacgcatgactaattttttaaatatttgagacggggtctccctgtgttacccaggctggtctcaaactcctgggctcaagtgatcctcccatcttggcctcccagagtattgggattacagacatgagccactgcacctgcccagctccccaactccctgccattttttaagagacagtttcgctccatcgcccaggcctgggatgcagtgatgtgatcatagctcactgtaacctcaaactctggggctcaagcagttctcccaccagcctcctttttatttttttgtacagatggggtcttgctatgttgcccaagctggtcttaaactcctggcctcaagcaatccttctgccttggccccccaaagtgctgggattgtgggcatgagctgctgtgcccagcctccatgttttaatatcaactctcactcctgaattcagttgctttgcccaagataggagttctctgatgcagaaattattgggctcttttagggtaagaagtttgtgtctttgtctggccacatcttgactaggtattgtctactctgaagacctttaatggcttccctctttcatctcctgagtatgtaacttgcaatgggcagctatccagtgacttgttctgagtaagtgtgttcattaatgtttatttagctctgaagcaagagtgatatactccaggacttagaatagtgcctaaagtgctgcagccaaagacagagcggaactatgaaaagtgggcttggagatggcaggagagcttgtcattgagcctggcaatttagcaaactgatgctgaggatgattgaggtgggtctacctcatctctgaaaattctggaaggaatggaggagtctcaacatgtgtttctgacacaagatccgtggtttgtactcaaagcccagaatccccaag

SEQ ID NO: 112744 - DNA, 2661 bp, Homo sapiens
  Payload ID: 2063
  Gene Symbol: CDH1
  Gene Name: cadherin 1, type 1
  ENST ID: ENST00000566510
  CDS Start-End: 65-1309
gctccagcccggcccgacccgaccgcacccggcgcctgccctcgctcggcgtccccggccagccatgggcccttggagccgcagcctctcggcgctgctgctgctgctgcaggtctcctcttggctctgccaggagccggagccctgccaccctggctttgacgccgagagctacacgttcacggtgccccggcgccacctggagagaggccgcgtcctgggcagagtgaattttgaagattgcaccggtcgacaaaggacagcctatttttccctcgacacccgattcaaagtgggcacagatggtgtgattacagtcaaaaggcctctacggtttcataacccacagatccatttcttggtctacgcctgggactccacctacagaaagttttccaccaaagtcacgctgaatacagtggggcaccaccaccgccccccgccccatcaggcctccgtttctggaatccaagcagaattgctcacatttcccaactcctctcctggcctcagaagacagaagagagactgggttattcctcccatcagctgcccagaaaatgaaaaaggcccatttcctaaaaacctggttcagctcttctctcacgctgtgtcatccaacgggaatgcagttgaggatccaatggagattttgatcacggtaaccgatcagaatgacaacaagcccgaattcacccaggaggtctttaaggggtctgtcatggaaggtgctcttccaggaacctctgtgatggaggtcacagccacagacgcggacgatgatgtgaacacctacaatgccgccatcgcttacaccatcctcagccaagatcctgagctccctgacaaaaatatgttcaccattaacaggaacacaggagtcatcagtgtggtcaccactgggctggaccgagagagtttccctacgtataccctggtggttcaagctgctgaccttcaaggtgaggggttaagcacaacagcaacagctgtgatcacagtcactgacaccaacgataatcctccgatcttcaatcccaccacgtacaagggtcaggtgcctgagaacgaggctaacgtcgtaatcaccacactgaaagtgactgatgctgatgcccccaataccccagcgtgggaggctgtatacaccatattgaatgatgatggtggacaatttgtcgtcaccacaaatccagtgaacaacgatggcattttgaaaacagcaaaggtttgtatggtacctggcaagatgcagaaactggcatcctcacagctgttcatacccttgtcccctgggcttggattttgaggccaagcagcagtacattctacacgtagcagtgacgaatgtggtaccttttgaggtctctctcaccacctccacagccaccgtcaccgtggatgtgctggatgtgaatgaagcccccatctttgtgcctcctgaaaagagagtggaagtgtccgaggactttggcgtgggccaggaaatcacatcctacactgcccaggagccagacacatttatggaacagaaaataacatatcggatttggagagacactgccaactggctggagattaatccggacactggtgccatttccactcgggctgagctggacagggaggattttgagcacgtgaagaacagcacgtacacagccctaatcatagctacagacaatggttctccagttgctactggaacagggacacttctgctgatcctgtctgatgtgaatgacaacgcccccataccagaacctcgaactatattcttctgtgagaggaatccaaagcctcaggtcataaacatcattgatgcagaccttcctcccaatacatctcccttcacagcagaactaacacacggggcgagtgccaactggaccattcagtacaacgacccaacccaagaatctatcattttgaagccaaagatggccttagaggtgggtgactacaaaatcaatctcaagctcatggataaccagaataaagaccaagtgaccaccttagaggtcagcgtgtgtgactgtgaaggggccgctggcgtctgtaggaaggcacagcctgtcgaagcaggattgcaaattcctgccattctggggattcttggaggaattcttgctttgctaattctgattctgctgctcttgctgtttcttcggaggagagcggtggtcaaagagcccttactgcccccagaggatgacacccgggacaacgtttattactatgatgaagaaggaggcggagaagaggaccaggactttgacttgagccagctgcacaggggcctggacgctcggcctgaagtgactcgtaacgacgttgcaccaaccctcatgagtgtcccccggtatcttccccgccctgccaatcccgatgaaattggaaattttattgatgaaaatctgaaagcggctgatactgaccccacagccccgccttatgattctctgctcgtgtttgactatgaaggaagcggttccgaagctgctagtctgagctccctgaactcctcagagtcagacaaagaccaggactatgactacttgaacgaatggggcaatcgcttcaagaagctggctgacatgtacggaggcggcgaggacgactaggggactcgagagaggcgggccccagacccatgtgctg

SEQ ID NO: 112745 - DNA, 736 bp, Homo sapiens
  Payload ID: 2063
  Gene Symbol: CDH1
  Gene Name: cadherin 1, type 1
  ENST ID: ENST00000561751
  CDS Start-End: 1-466
cacagatggtgtgattacagtcaaaaggcctctacggtttcataacccacagatccatttcttggtctacgcctgggactccacctacagaaagttttccaccaaagtcacgctgaatacagtggggcaccaccaccgccccccgccccatcaggcctccgtttctggaatccaagcagaattgctcacatttcccaactcctctcctggcctcagaagacagaagagagactgggttattcctcccatcagctgcccagaaaatgaaaaaggcccatttcctaaaaacctggttcagatcaaatccaacaaagacaaagaaggcaaggttttctacagcatcactggccaaggagctgacacaccccctgttggtgtctttattattgaaagagaaacaggatggctgaaggtgacagagcctctggatagagaacgcattgccacatacactgaacctctgtgatggaggtcacagccacagacgcggacgatgatgtgaacacctacaatgccgccatcgcttacaccatcctcagccaagatcctgagctccctgacaaaaatatgttcaccattaacaggaacacaggagtcatcagtgtggtcaccactgggctggaccgagagagtttccctacgtataccctggtggttcaagctgctgaccttcaaggtgaggggttaagcacaacagcaacagctgtgatcacagtcactgacaccaacgataatc

SEQ ID NO: 112746 - DNA, 2068 bp, Homo sapiens
  Payload ID: 2063
  Gene Symbol: CDH1
  Gene Name: cadherin 1, type 1
  ENST ID: ENST00000612417
  CDS Start-End: 125-2068
agtggcgtcggaactgcaaagcacctgtgagcttgcggaagtcagttcagactccagcccgctccagcccggcccgacccgaccgcacccggcgcctgccctcgctcggcgtccccggccagccatgggcccttggagccgcagcctctcggcgctgctgctgctgctgcaggtctcctcttggctctgccaggagccggagccctgccaccctggctttgacgccgagagctacacgttcacggtgccccggcgccacctggagagaggccgcgtcctgggcagagtgaattttgaagattgcaccggtcgacaaaggacagcctatttttccctcgacacccgattcaaagtgggcacagatggtgtgattacagtcaaaaggcctctacggtttcataacccacagatccatttcttggtctacgcctgggactccacctacagaaagttttccaccaaagtcacgctgaatacagtggggcaccaccaccgccccccgccccatcaggcctccgtttctggaatccaagcagaattgctcacatttcccaactcctctcctggcctcagaagacagaagagagactgggttattcctcccatcagctgcccagaaaatgaaaaaggcccatttcctaaaaacctggttcagatcaaatccaacaaagacaaagaaggcaaggttttctacagcatcactggccaaggagctgacacaccccctgttggtgtctttattattgaaagagaaacaggatggctgaaggtgacagagcctctggatagagaacgcattgccacatacactctcttctctcacgctgtgtcatccaacgggaatgcagttgaggatccaatggagattttgatcacggtaaccgatcagaatgacaacaagcccgaattcacccaggaggtctttaaggggtctgtcatggaaggtgctcttccaggaacctctgtgatggaggtcacagccacagacgcggacgatgatgtgaacacctacaatgccgccatcgcttacaccatcctcagccaagatcctgagctccctgacaaaaatatgttcaccattaacaggaacacaggagtcatcagtgtggtcaccactgggctggaccgagagagtttccctacgtataccctggtggttcaagctgctgaccttcaaggtgaggggttaagcacaacagcaacagctgtgatcacagtcactgacaccaacgataatcctccgatcttcaatcccaccacgtacaagggtcaggtgcctgagaacgaggctaacgtcgtaatcaccacactgaaagtgactgatgctgatgcccccaataccccagcgtgggaggctgtatacaccatattgaatgatgatggtggacaatttgtcgtcaccacaaatccagtgaacaacgatggcattttgaaaacagcaaagggcttggattttgaggccaagcagcagtacattctacacgtagcagtgacgaatgtggtaccttttgaggtctctctcaccacctccacagccaccgtcaccgtggatgtgctggatgtgaatgaagcccccatctttgtgcctcctgaaaagagagtggaagtgtccgaggactttggcgtgggccaggaaatcacatcctacactgcccaggagccagacacatttatggaacagaaaataacatatcggatttggagagacactgccaactggctggagattaatccggacactggtgccatttccactcgggctgagctggacagggaggattttgagcacgtgaagaacagcacgtacacagccctaatcatagctacagacaatggttctccagttgctactggaacagggacacttctgctgatcctgtctgatgtgaatgacaacgcccccataccagaacctcgaactatattcttctgtgagaggaatccaaagcctcaggtggcaggattgcttgaacctagtgatcctcccatcttggcctcccagagtattgggattacagacatgagccactgcacctgcccagctccccaactccctgccattttttaa

SEQ ID NO: 112747 - DNA, 3304 bp, Homo sapiens
  Payload ID: 2063
  Gene Symbol: CDH1
  Gene Name: cadherin 1, type 1
  ENST ID: ENST00000621016
  CDS Start-End: 108-2051
aaagcacctgtgagcttgcggaagtcagttcagactccagcccgctccagcccggcccgacccgaccgcacccggcgcctgccctcgctcggcgtccccggccagccatgggcccttggagccgcagcctctcggcgctgctgctgctgctgcaggtctcctcttggctctgccaggagccggagccctgccaccctggctttgacgccgagagctacacgttcacggtgccccggcgccacctggagagaggccgcgtcctgggcagagtgaattttgaagattgcaccggtcgacaaaggacagcctatttttccctcgacacccgattcaaagtgggcacagatggtgtgattacagtcaaaaggcctctacggtttcataacccacagatccatttcttggtctacgcctgggactccacctacagaaagttttccaccaaagtcacgctgaatacagtggggcaccaccaccgccccccgccccatcaggcctccgtttctggaatccaagcagaattgctcacatttcccaactcctctcctggcctcagaagacagaagagagactgggttattcctcccatcagctgcccagaaaatgaaaaaggcccatttcctaaaaacctggttcagatcaaatccaacaaagacaaagaaggcaaggttttctacagcatcactggccaaggagctgacacaccccctgttggtgtctttattattgaaagagaaacaggatggctgaaggtgacagagcctctggatagagaacgcattgccacatacactctcttctctcacgctgtgtcatccaacgggaatgcagttgaggatccaatggagattttgatcacggtaaccgatcagaatgacaacaagcccgaattcacccaggaggtctttaaggggtctgtcatggaaggtgctcttccaggaacctctgtgatggaggtcacagccacagacgcggacgatgatgtgaacacctacaatgccgccatcgcttacaccatcctcagccaagatcctgagctccctgacaaaaatatgttcaccattaacaggaacacaggagtcatcagtgtggtcaccactgggctggaccgagagagtttccctacgtataccctggtggttcaagctgctgaccttcaaggtgaggggttaagcacaacagcaacagctgtgatcacagtcactgacaccaacgataatcctccgatcttcaatcccaccacgtacaagggtcaggtgcctgagaacgaggctaacgtcgtaatcaccacactgaaagtgactgatgctgatgcccccaataccccagcgtgggaggctgtatacaccatattgaatgatgatggtggacaatttgtcgtcaccacaaatccagtgaacaacgatggcattttgaaaacagcaaagggcttggattttgaggccaagcagcagtacattctacacgtagcagtgacgaatgtggtaccttttgaggtctctctcaccacctccacagccaccgtcaccgtggatgtgctggatgtgaatgaagcccccatctttgtgcctcctgaaaagagagtggaagtgtccgaggactttggcgtgggccaggaaatcacatcctacactgcccaggagccagacacatttatggaacagaaaataacatatcggatttggagagacactgccaactggctggagattaatccggacactggtgccatttccactcgggctgagctggacagggaggattttgagcacgtgaagaacagcacgtacacagccctaatcatagctacagacaatggttctccagttgctactggaacagggacacttctgctgatcctgtctgatgtgaatgacaacgcccccataccagaacctcgaactatattcttctgtgagaggaatccaaagcctcaggtcataaacatcattgatgcagaccttcctcccaacttggcctcccagagtattgggattacagacatgagccactgcacctgcccagctccccaactccctgccattttttaagagacagtttcgctccatcgcccaggcctgggatgcagtgatgtgatcatagctcactgtaacctcaaactctggggctcaagcagttctcccaccagcctcctttttatttttttgtacagatggggtcttgctatgttgcccaagctggtcttaaactcctggcctcaagcaatccttctgccttggccccccaaagtgctgggattgtgggcatgagctgctgtgcccagcctccatgttttaatatcaactctcactcctgaattcagttgctttgcccaagataggagttctctgatgcagaaattattgggctcttttagggtaagaagtttgtgtctttgtctggccacatcttgactaggtattgtctactctgaagacctttaatggcttccctctttcatctcctgagtatgtaacttgcaatgggcagctatccagtgacttgttctgagtaagtgtgttcattaatgtttatttagctctgaagcaagagtgatatactccaggacttagaatagtgcctaaagtgctgcagccaaagacagagcggaactatgaaaagtgggcttggagatggcaggagagcttgtcattgagcctggcaatttagcaaactgatgctgaggatgattgaggtgggtctacctcatctctgaaaattctggaaggaatggaggagtctcaacatgtgtttctgacacaagatccgtggtttgtactcaaagcccagaatccccaagtgcctgcttttgatgatgtctacagaaaatgctggctgagctgaacacatttgcccaattccaggtgtgcacagaaaaccgagaatattcaaaattccaaatttttttcttaggagcaagaagaaaatgtggccctaaagggggttagttgaggggtagggggtagtgaggatcttgatttggatctctttttatttaaatgtgaatttcaacttttgacaatcaaagaaaagacttttgttgaaatagctttactgtttctcaagtgttttggagaaaaaaatcaaccctgcaatcactttttggaattgtcttgatttttcggcagttcaagctatatcgaatatagttctgtgtagagaatgtcactgtagttttgagtgtatacatgtgtgggtgctgataattgtgtattttctttgggggtggaaaaggaaaacaattcaagctgagaaaagtattctcaaagatgcatttttataaattttattaaacaattttgtt

SEQ ID NO: 112748 - DNA, 4878 bp, Homo sapiens
  Payload ID: 2063
  Gene Symbol: CDH1
  Gene Name: cadherin 1, type 1
  ENST ID: ENST00000611625
  CDS Start-End: 125-2836
agtggcgtcggaactgcaaagcacctgtgagcttgcggaagtcagttcagactccagcccgctccagcccggcccgacccgaccgcacccggcgcctgccctcgctcggcgtccccggccagccatgggcccttggagccgcagcctctcggcgctgctgctgctgctgcaggtctcctcttggctctgccaggagccggagccctgccaccctggctttgacgccgagagctacacgttcacggtgccccggcgccacctggagagaggccgcgtcctgggcagagtgaattttgaagattgcaccggtcgacaaaggacagcctatttttccctcgacacccgattcaaagtgggcacagatggtgtgattacagtcaaaaggcctctacggtttcataacccacagatccatttcttggtctacgcctgggactccacctacagaaagttttccaccaaagtcacgctgaatacagtggggcaccaccaccgccccccgccccatcaggcctccgtttctggaatccaagcagaattgctcacatttcccaactcctctcctggcctcagaagacagaagagagactgggttattcctcccatcagctgcccagaaaatgaaaaaggcccatttcctaaaaacctggttcagatcaaatccaacaaagacaaagaaggcaaggttttctacagcatcactggccaaggagctgacacaccccctgttggtgtctttattattgaaagagaaacaggatggctgaaggtgacagagcctctggatagagaacgcattgccacatacactctcttctctcacgctgtgtcatccaacgggaatgcagttgaggatccaatggagattttgatcacggtaaccgatcagaatgacaacaagcccgaattcacccaggaggtctttaaggggtctgtcatggaaggtgctcttccaggaacctctgtgatggaggtcacagccacagacgcggacgatgatgtgaacacctacaatgccgccatcgcttacaccatcctcagccaagatcctgagctccctgacaaaaatatgttcaccattaacaggaacacaggagtcatcagtgtggtcaccactgggctggaccgagagagtttccctacgtataccctggtggttcaagctgctgaccttcaaggtgaggggttaagcacaacagcaacagctgtgatcacagtcactgacaccaacgataatcctccgatcttcaatcccaccacgtacaagggtcaggtgcctgagaacgaggctaacgtcgtaatcaccacactgaaagtgactgatgctgatgcccccaataccccagcgtgggaggctgtatacaccatattgaatgatgatggtggacaatttgtcgtcaccacaaatccagtgaacaacgatggcattttgaaaacagcaaaggtatggtacctggcaagatgcagaaactggcatcctcacagctgttcatacccttgtcccctgggcttggattttgaggccaagcagcagtacattctacacgtagcagtgacgaatgtggtaccttttgaggtctctctcaccacctccacagccaccgtcaccgtggatgtgctggatgtgaatgaagcccccatctttgtgcctcctgaaaagagagtggaagtgtccgaggactttggcgtgggccaggaaatcacatcctacactgcccaggagccagacacatttatggaacagaaaataacatatcggatttggagagacactgccaactggctggagattaatccggacactggtgccatttccactcgggctgagctggacagggaggattttgagcacgtgaagaacagcacgtacacagccctaatcatagctacagacaatggttctccagttgctactggaacagggacacttctgctgatcctgtctgatgtgaatgacaacgcccccataccagaacctcgaactatattcttctgtgagaggaatccaaagcctcaggtcataaacatcattgatgcagaccttcctcccaatacatctcccttcacagcagaactaacacacggggcgagtgccaactggaccattcagtacaacgacccaacccaagaatctatcattttgaagccaaagatggccttagaggtgggtgactacaaaatcaatctcaagctcatggataaccagaataaagaccaagtgaccaccttagaggtcagcgtgtgtgactgtgaaggggccgctggcgtctgtaggaaggcacagcctgtcgaagcaggattgcaaattcctgccattctggggattcttggaggaattcttgctttgctaattctgattctgctgctcttgctgtttcttcggaggagagcggtggtcaaagagcccttactgcccccagaggatgacacccgggacaacgtttattactatgatgaagaaggaggcggagaagaggaccaggactttgacttgagccagctgcacaggggcctggacgctcggcctgaagtgactcgtaacgacgttgcaccaaccctcatgagtgtcccccggtatcttccccgccctgccaatcccgatgaaattggaaattttattgatgaaaatctgaaagcggctgatactgaccccacagccccgccttatgattctctgctcgtgtttgactatgaaggaagcggttccgaagctgctagtctgagctccctgaactcctcagagtcagacaaagaccaggactatgactacttgaacgaatggggcaatcgcttcaagaagctggctgacatgtacggaggcggcgaggacgactaggggactcgagagaggcgggccccagacccatgtgctgggaaatgcagaaatcacgttgctggtggtttttcagctcccttcccttgagatgagtttctggggaaaaaaaagagactggttagtgatgcagttagtatagctttatactctctccactttatagctctaataagtttgtgttagaaaagtttcgacttatttcttaaagcttttttttttttcccatcactctttacatggtggtgatgtccaaaagatacccaaattttaatattccagaagaacaactttagcatcagaaggttcacccagcaccttgcagattttcttaaggaattttgtctcacttttaaaaagaaggggagaagtcagctactctagttctgttgttttgtgtatataattttttaaaaaaaatttgtgtgcttctgctcattactacactggtgtgtccctctgccttttttttttttttaagacagggtctcattctatcggccaggctggagtgcagtggtgcaatcacagctcactgcagccttgtcctcccaggctcaagctatccttgcacctcagcctcccaagtagctgggaccacaggcatgcaccactacgcatgactaattttttaaatatttgagacggggtctccctgtgttacccaggctggtctcaaactcctgggctcaagtgatcctcccatcttggcctcccagagtattgggattacagacatgagccactgcacctgcccagctccccaactccctgccattttttaagagacagtttcgctccatcgcccaggcctgggatgcagtgatgtgatcatagctcactgtaacctcaaactctggggctcaagcagttctcccaccagcctcctttttatttttttgtacagatggggtcttgctatgttgcccaagctggtcttaaactcctggcctcaagcaatccttctgccttggccccccaaagtgctgggattgtgggcatgagctgctgtgcccagcctccatgttttaatatcaactctcactcctgaattcagttgctttgcccaagataggagttctctgatgcagaaattattgggctcttttagggtaagaagtttgtgtctttgtctggccacatcttgactaggtattgtctactctgaagacctttaatggcttccctctttcatctcctgagtatgtaacttgcaatgggcagctatccagtgacttgttctgagtaagtgtgttcattaatgtttatttagctctgaagcaagagtgatatactccaggacttagaatagtgcctaaagtgctgcagccaaagacagagcggaactatgaaaagtgggcttggagatggcaggagagcttgtcattgagcctggcaatttagcaaactgatgctgaggatgattgaggtgggtctacctcatctctgaaaattctggaaggaatggaggagtctcaacatgtgtttctgacacaagatccgtggtttgtactcaaagcccagaatccccaagtgcctgcttttgatgatgtctacagaaaatgctggctgagctgaacacatttgcccaattccaggtgtgcacagaaaaccgagaatattcaaaattccaaatttttttcttaggagcaagaagaaaatgtggccctaaagggggttagttgaggggtagggggtagtgaggatcttgatttggatctctttttatttaaatgtgaatttcaacttttgacaatcaaagaaaagacttttgttgaaatagctttactgtttctcaagtgttttggagaaaaaaatcaaccctgcaatcactttttggaattgtcttgatttttcggcagttcaagctatatcgaatatagttctgtgtagagaatgtcactgtagttttgagtgtatacatgtgtgggtgctgataattgtgtattttctttgggggtggaaaaggaaaacaattcaagctgagaaaagtattctcaaagatgcatttttataaattttattaaacaattttgttaaaccat

SEQ ID NO: 112749 - DNA, 3438 bp, Homo sapiens
  Payload ID: 2064
  Gene Symbol: CDH10
  Gene Name: cadherin 10, type 2 (T2-cadherin)
  Uniprot ID: Q9Y6N8
  ENST ID: ENST00000264463
  CDS Start-End: 509-2875
acttgcaaatcgctgtgtgctcgcagaagccagcacttccacagtctctaaccttcccatggcgagtgctgcagctctatcagcagaacctttctctccgtgtgaggaagagcttttttcccccctttccttttttttttttttcctttccccttaatcagaagcactgaatgaaagccaatcagagagagctcgcccccgttttcttcggttccctgctgtccagagttaaaagtgatgctgagaaagagcttgagttagattgaagtagaatcagtgatagaaaataacagccgaaaacaaacaaaaaggggacatagtgacaatttctcctgggttattttggctggaaccaacttccattatccagaagctgataaaaaagctttgggaaacatgaacaaaacattgatgaaatgttggaaaccagttgaaacacagtaaaaccaactgggtaaaataggaccacttctcttcatctacactgggatttgtcaagaagtgaactatgacaatacatcaatttttgctactgtttctattctgggtatgcctgccacatttctgctctccagaaataatgttcagaaggacgcctgtgccacagcaaagaattttaagttcacgtgtaccaaggagtgatggcaaaattctccatcgtcaaaaacgtggttggatgtggaatcaatttttcttacttgaagaatatacaggatctgattatcagtacgtaggcaagctacattcagaccaagataaaggagatggatcactcaaatatatcttatctggagatggagctggtactctttttattattgatgaaaaaacaggtgatattcatgccacaaggcgaattgatagggaggaaaaggccttttatactctacgcgcacaagctattaacagaagaactctgaggccagtagagccagagtcagagtttgtgatcaaaattcatgatatcaatgacaatgagccaacgttcccagaagaaatctatacagctagtgttcccgaaatgtctgttgtaggtacttctgtggtgcaagtcacagctacagatgccgatgacccttcatatgggaacagcgccagagtcatttacagcatacttcaagggcagccctatttctctgtggagcctgaaacaggtatcatcaggactgctttaccgaacatgaacagagaaaacagagagcaataccaagtggtcatccaggccaaagacatgggcggccagatgggaggcttatcggggacaaccactgtgaacatcacgctgacagatgtcaatgacaacccaccacgtttcccccagaacactattcatcttcgagttcttgaatcctccccagttggcacagccattggaagtgtcaaagcaactgatgctgacactgggaaaaatgctgaagtagaataccgaattattgatggtgacggtactgatatgtttgacatcgtgactgagaaggacacacaggaaggcatcatcactgtgaaaaagccactcgactatgagagccgaagactttatactctgaaagtcgaagcagaaaacacccatgtagatccccgtttttattacctaggaccatttaaagatactaccatagtgaaaatctctatagaagatgtggatgaacctcctgtttttagtaggtcctcctatctgtttgaagttcatgaagatattgaagtgggcacaatcattggtactgtaatggcaagggacccagattctatttccagccccattagattttccttggatcgccatactgaccttgacagaatctttaacattcattcaggaaatggatctctttatacatcaaaacctcttgaccgtgaactatctcagtggcataatcttactgttattgctgctgaaatcaacaatcccaaagagacaacacgcgtggctgtttttgtgagaattttggatgttaatgacaatgccccacagtttgctgtgttctatgacacttttgtatgtgaaaatgccagaccagggcagctaatacagactataagtgcagtagacaaagatgaccctttaggtggacagaaattttttttcagtttagctgctgtcaatccaaacttcacagtacaggataatgaagataatactgccagaatcttaaccagaaaaaatggattcaatagacatgaaatcagtacctatctcttgcctgtggtgatatcagacaatgattacccaattcagagcagcacaggcacactgaccattcgagtgtgtgcttgtgacagccaaggcaacatgcaatcctgcagtgctgaagccctgctcctccctgccggcctcagcactggggccttgatcgccatcctcctctgcatcatcattctactggttatagtagtactgtttgcagctctgaaaagacagcgaaaaaaagagcctctgatcttgtcaaaagaagatatcagagacaacattgtgagctataacgatgagggtggtggagaggaggacacccaggcctttgatatcggcaccctgaggaatcctgcagccattgaggaaaaaaagctccggcgagatattattccagaaacgttatttattcctcggaggactcctacagctccagataacacggacgtccgggatttcattaatgaaaggctaaaagagcatgatcttgaccccaccgcacccccctacgactcacttgcaacctatgcctatgaaggaaatgattccattgctgaatctctgagttcattagaatcaggtactactgaaggagaccaaaactacgattacctccgagaatggggccctcggtttaataagctagcagaaatgtatggtggtggggaaagtgacaaagactcttaacgtaggatatatgttctgttcaaacaagagaaagtaactctacccatgctgtctccacttcacaatatttgatattcaggagcattttcctgccagtcagcacaattttttttctcatttacttcttaatttgttcattaattacattaattctttcctgtaggatgtctcatggaatatatatgacattttatttaatcacttccaagagccaaagctatggaaatacagtgttgtccatcttagtaaataaaagataatttcagaaacatgaacaggatagttctcccttaagcaacctcacaaacaagccgcttctgttaggtacatgtcctgcccttgcaaatgaagcttttaaaaaggtgaagaaaaattttacagtatatcctgttctgtacattaaattaaaaaaacaaaaatgtacatgtgatgttagtaggtgtgatatgcaacctggtatacagacatttgtgcaatttcatttcatcaaattctatctgctaatgttttatatttatatttttgtatttatttttaaaaaaataaaccagtttttacaacta

SEQ ID NO: 112750 - DNA, 2855 bp, Homo sapiens
  Payload ID: 2064
  Gene Symbol: CDH10
  Gene Name: cadherin 10, type 2 (T2-cadherin)
  ENST ID: ENST00000510477
  CDS Start-End: 311-1621
ccgttttcttcggttccctgctgtccagagttaaaagtgatgctgagaaagagcttgagttagattgaagtagaatcagtgatagaaaataacagccgaaaacaaacaaaaaggggacatagtgacaatttctcctgggttattttggctggaaccaacttccattatccagaagctgataaaaaagctttgggaaacatgaacaaaacattgatgaaatgttggaaaccagttgaaacacagtaaaaccaactgggtaaaataggaccacttctcttcatctacactgggatttgtcaagaagtgaactatgacaatacatcaatttttgctactgtttctattctgggtatgcctgccacatttctgctctccagaaataatgttcagaaggacgcctgtgccacagcaaagaattttaagttcacgtgtaccaaggagtgatggcaaaattctccatcgtcaaaaacgtggttggatgtggaatcaatttttcttacttgaagaatatacaggatctgattatcagtacgtaggcaagctacattcagaccaagataaaggagatggatcactcaaatatatcttatctggagatggagctggtactctttttattattgatgaaaaaacaggtgatattcatgccacaaggcgaattgatagggaggaaaaggccttttatactctacgcgcacaagctattaacagaagaactctgaggccagtagagccagagtcagagtttgtgatcaaaattcatgatatcaatgacaatgagccaacgttcccagaagaaatctatacagctagtgttcccgaaatgtctgttgtaggtacttctgtggtgcaagtcacagctacagatgccgatgacccttcatatgggaacagcgccagagtcatttacagcatacttcaagggcagccctatttctctgtggagcctgaaacaggtatcatcaggactgctttaccgaacatgaacagagaaaacagagagcaataccaagtggtcatccaggccaaagacatgggcggccagatgggaggcttatcggggacaaccactgtgaacatcacgctgacagatgtcaatgacaacccaccacgtttcccccagaacactattcatcttcgagttcttgaatcctccccagttggcacagccattggaagtgtcaaagcaactgatgctgacactgggaaaaatgctgaagtagaataccgaattattgatggtgacggtactgatatgtttgacatcgtgactgagaaggacacacaggaaggcatcatcactgtgaaaaagccactcgactatgagagccgaagactttatactctgaaagtcgaagcagaaaacacccatgtagatccccgtttttattacctaggaccatttaaagatactaccatagtgaaaatctctatagaagatgtggatgaacctcctgtttttagtaggtcctcctatctgtttgaagttcatgaagatattgaagtgggcacaatcattggtactgtaatggcaagggacccagattctatttccagccccattagacaatcccaaagagacaacacgcgtggctgtttttgtgagaattttggatgttaatgacaatgccccacagtttgctgtgttctatgacacttttgtatgtgaaaatgccagaccagggcagctaatacagactataagtgcagtagacaaagatgaccctttaggtggacagaaattttttttcagtttagctgctgtcaatccaaacttcacagtacaggataatgaagataatactgccagaatcttaaccagaaaaaatggattcaatagacatgaaatcagtacctatctcttgcctgtggtgatatcagacaatgattacccaattcagagcagcacaggcacactgaccattcgagtgtgtgcttgtgacagccaaggcaacatgcaatcctgcagtgctgaagccctgctcctccctgccggcctcagcactggggccttgatcgccatcctcctctgcatcatcattctactggttatagtagtactgtttgcagctctgaaaagacagcgaaaaaaagagcctctgatcttgtcaaaagaagatatcagagacaacattgtgagctataacgatgagggtggtggagaggaggacacccaggcctttgatatcggcaccctgaggaatcctgcagccattgaggaaaaaaagctccggcgagatattattccagaaacgttatttattcctcggaggactcctacagctccagataacacggacgtccgggatttcattaatgaaaggctaaaagagcatgatcttgaccccaccgcacccccctacgactcacttgcaacctatgcctatgaaggaaatgattccattgctgaatctctgagttcattagaatcaggtactactgaaggagaccaaaactacgattacctccgagaatggggccctcggtttaataagctagcagaaatgtatggtggtggggaaagtgacaaagactcttaacgtaggatatatgttctgttcaaacaagagaaagtaactctacccatgctgtctccacttcacaatatttgatattcaggagcattttcctgccagtcagcacaattttttttctcatttacttcttaatttgttcattaattacattaattctttcctgtaggatgtctcatggaatatatatgacattttatttaatcacttccaagagccaaagctatggaaatacagtgttgtccatcttagtaaataaaagataatttcagaaacatgaacaggatagttctcccttaagcaacctcacaaacaagccgc

SEQ ID NO: 112751 - DNA, 6857 bp, Homo sapiens
  Payload ID: 2065
  Gene Symbol: CDH11
  Gene Name: cadherin 11, type 2, OB-cadherin (osteoblast)
  Uniprot ID: P55287
  ENST ID: ENST00000268603
  CDS Start-End: 617-3007
ttctctcagcccccgccctttccttccctcacagcggcagcctccctcctcccgccccccccgccccgcacccgcctgcccgcccgccacctccccccggtttctcattcctgccactagcgcgctcggcggctcattccgcggccgccgccagctgaggggagcgtcgcgggccgaggagcagatgccgcgggggccgctcgcagccgccgctgacttgtgaatgggaccgggactggggccgggactgacaccgcagcgcttgccctgcgccagggactggcggctcggaggttgcgtccaccctcaagggccccagaaatcactgtgttttcagctcagcggccctgtgacattccttcgtgttgtcatttgttgagtgaccaatcagatgggtggagtgtgttacagaaattggcagcaagtatccaatgggtgaagaagaagctaactggggacgtgggcagccctgacgtgatgagctcaaccagcagagacattccatcccaagagaggtctgcgtgacgcgtccgggaggccaccctcagcaagaccaccgtacagttggtggaaggggtgacagctgcattctcctgtgcctaccacgtaaccaaaaatgaaggagaactactgtttacaagccgccctggtgtgcctgggcatgctgtgccacagccatgcctttgccccagagcggcgggggcacctgcggccctccttccatgggcaccatgagaagggcaaggaggggcaggtgctacagcgctccaagcgtggctgggtctggaaccagttcttcgtgatagaggagtacaccgggcctgaccccgtgcttgtgggcaggcttcattcagatattgactctggtgatgggaacattaaatacattctctcaggggaaggagctggaaccatttttgtgattgatgacaaatcagggaacattcatgccaccaagacgttggatcgagaagagagagcccagtacacgttgatggctcaggcggtggacagggacaccaatcggccactggagccaccgtcggaattcattgtcaaggtccaggacattaatgacaaccctccggagttcctgcacgagacctatcatgccaacgtgcctgagaggtccaatgtgggaacgtcagtaatccaggtgacagcttcagatgcagatgaccccacttatggaaatagcgccaagttagtgtacagtatcctcgaaggacaaccctatttttcggtggaagcacagacaggtatcatcagaacagccctacccaacatggacagggaggccaaggaggagtaccacgtggtgatccaggccaaggacatgggtggacatatgggcggactctcagggacaaccaaagtgacgatcacactgaccgatgtcaatgacaacccaccaaagtttccgcagagcgtataccagatgtctgtgtcagaagcagccgtccctggggaggaagtaggaagagtgaaagctaaagatccagacattggagaaaatggcttagtcacatacaatattgttgatggagatggtatggaatcgtttgaaatcacaacggactatgaaacacaggagggggtgataaagctgaaaaagcctgtagattttgaaaccaaaagagcctatagcttgaaggtagaggcagccaacgtgcacatcgacccgaagtttatcagcaatggccctttcaaggacactgtgaccgtcaagatctcagtagaagatgctgatgagccccctatgttcttggccccaagttacatccacgaagtccaagaaaatgcagctgctggcaccgtggttgggagagtgcatgccaaagaccctgatgctgccaacagcccgataaggtattccatcgatcgtcacactgacctcgacagatttttcactattaatccagaggatggttttattaaaactacaaaacctctggatagagaggaaacagcctggctcaacatcactgtctttgcagcagaaatccacaatcggcatcaggaagccaaagtcccagtggccattagggtccttgatgtcaacgataatgctcccaagtttgctgccccttatgaaggtttcatctgtgagagtgatcagaccaagccactttccaaccagccaattgttacaattagtgcagatgacaaggatgacacggccaatggaccaagatttatcttcagcctaccccctgaaatcattcacaatccaaatttcacagtcagagacaaccgagataacacagcaggcgtgtacgcccggcgtggagggttcagtcggcagaagcaggacttgtaccttctgcccatagtgatcagcgatggcggcatcccgcccatgagtagcaccaacaccctcaccatcaaagtctgcgggtgcgacgtgaacggggcactgctctcctgcaacgcagaggcctacattctgaacgccggcctgagcacaggcgccctgatcgccatcctcgcctgcatcgtcattctcctggtcattgtagtattgtttgtgaccctgagaaggcaaaagaaagaaccactcattgtctttgaggaagaagatgtccgtgagaacatcattacttatgatgatgaagggggtggggaagaagacacagaagcctttgatattgccaccctccagaatcctgatggtatcaatggatttatcccccgcaaagacatcaaacctgagtatcagtacatgcctagacctgggctccggccagcgcccaacagcgtggatgtcgatgacttcatcaacacgagaatacaggaggcagacaatgaccccacggctcctccttatgactccattcaaatctacggttatgaaggcaggggctcagtggccgggtccctgagctccctagagtcggccaccacagattcagacttggactatgattatctacagaactggggacctcgttttaagaaactagcagatttgtatggttccaaagacacttttgatgacgattcttaacaataacgatacaaatttggccttaagaactgtgtctggcgttctcaagaatctagaagatgtgtaaacaggtatttttttaaatcaaggaaaggctcatttaaaacaggcaaagttttacagagaggatacatttaataaaactgcgaggacatcaaagtggtaaatactgtgaaataccttttctcacaaaaaggcaaatattgaagttgtttatcaacttcgctagaaaaaaaaaacacttggcatacaaaatatttaagtgaaggagaagtctaacgctgaactgacaatgaagggaaattgtttatgtgttatgaacatccaagtctttcttcttttttaagttgtcaaagaagcttccacaaaattagaaaggacaacagttctgagctgtaatttcgccttaaactctggacactctatatgtagtgcatttttaaacttgaaatatataatattcagccagcttaaacccatacaatgtatgtacaatacaatgtacaattatgtctcttgagcatcaatcttgttactgctgattcttgtaaatctttttgcttctactttcatcttaaactaatacgtgccagatataactgtcttgtttcagtgagagacgccctatttctatgtcatttttaatgtatctatttgtacaattttaaagttcttattttagtatacgtataaatatcagtattctgacatgtaagaaaatgttacggcatcacacttatattttatgaacattgtactgttgctttaatatgagcttcaatataagaagcaatctttgaaataaaaaaagatttttttttaattctgggtttgattcttaacattgaaacaaacgttaagtatttctaatgatccatttatatttctaatttaattgtgatcttttaataaccctatttatgatctgttgttgtctgtctgctgcttttattgtttatttaaaatcaaatatgttttacaaatgttttttcagacaagattctgtaacatcatgtaaagcttttttgtacattcttggtgttaacctcctggcttctcttcacacacatcttctaaaaaagaaggatgtgaaagaactaggtcagtctatgactttgcaatatgtgttatatagtatgcatttatcttgtatatcagtaatttgatggttatgagagatgaatccatgagggaatggagctatcagaactctaatgttccaggtatacattctatgccccacactgagcactggggaactgggggactagagtcaaaaatataaatttgcccagactctaatgttattctattttttcttctgttgaacttaccaggctattgtaagactcttgatagttgaaactgcttatttttcctcctgtaattttaactaattgtaaaatgatgtggcattttatgttttaatgagaatgggcgattcatttaaaaaagctttgtttagaatatgcttggggccgtaagctcagaatgagggcagggaccattttggattctgagagtcgatgccatttggtccaggagtgtgtctacagtcccctgcattccagctagtttcttggggattgaaacttatgtgaagggcatttcacctgttcagttgggccaaaggtcaaaacgtagcaatacttggggaaagaccacataaagtcacactgcaagtgctttccctctttccccctacacacagggcacgtgctttttcttggattgcagacaatttttacagtttttttctgactttattgtgaaagtttgtttcaagcatttcttgatatcatgttatgtactatttttatgatttagtcaacatgcatacaaagaaatgttttttatgaagtgctcacttccattttactttgcattgaaatcaaattgggctgaacacttcaatggaatacattttgtggacaatgtcactttagaatctttcatctcagtgaaggattacacattctcaatacttccataattgcaggttgtgttcatttttttatatagtttttgtaatccaaagaatattttgctagatttgcacagatctccaattgaatttgcaatgaagaaataactcaaaaggaatatgaatagcatttaaataagtatacagctgtaagtaaccctgtcaccatggatgatccttttctctaggaatgtatttggattagagatgacaactacattttcgcatttttatgttgaagtcttttttaaaaaggctgtttacttttcagtagttaagaatacttgtttttctttttcttttttttttttttttttaccttttattttttcgttaagcctctattgtttgtagaacactcttagaaacttggaaataaaatgtctttcccaactagtggagtcctttttcatttggagcacattgccttaaaagaagtcttaatttaaacggtccttccttattctaaagtaatcactgttttataccatctatgcagctaaaagaaggaacatgcttctgttcttttcctcaagtaatggttattgtttctagtcatcattcattcattgattcattcattaattcatcaaaatcttattttataaaccctgttccacttactggaggattcagaatgaatcttactaccttttctgacatcttttgataattcagccctgtaccaaagtatccaccttgttgtcttataatcacctatttacctatttgccctcctagaaaatgcaagaagatattttctctccttccaaattgaaggaagaacataaaagatataacaggaaggagatggtgagatatagagtgtgagcggaaattaggccagctgtggcaattctggacagatcttgggtttagctaagttatttcttttaggcctgggtttctgggggtgacagggaagataaaagagtagtttatttgcacctcttggagaattgcttaaaaatatagagatcatggctctgtatgtcaggtggaaccaggtcaggagtatttgaaactgctcctgggtcattgtgacatatccttcacatctttttgagaaactttataagacaatgggggtgaatgggggctgggcagttggagtctctgagcagaagaggggcaaaatttatttggcaggcagtgtggaggacagattaggagcatataaacccagaggtgtgccccaggagggcttttgcaaaggtcaatatgagatagaatgagggcctgaaataattcagtaatttggagatggagaagaggaaagacttctctgctcttgcactgccatcagcctggtctgggccatggtcatctctgacccggaagactgaccccacctcttggctcaccctctgcctcccaacctcctcttcacaaagaagccagagggatacttttaacacacaacccagatcacatgacttcgtaacttaaacctcttcactggcttcccaaagacttaaaatgaattctgatgcctttattttattgctttacatgaacagggccctgcgaacctctccagtgtcattccactccatcctcctttcagtgcacgatgctccagccacactggccatctttcggttcctgatacaaaaaaaaacacgttccttttccatggaaagcaggtcacccttgttattttgtatcgatgacaactctttaaacttattttgctttttggctttatgtatgtgtgtgggtgggtgggactgactgccccactagaatgtaagctccatgagggcagggaatcttgctttcttgtttaccattgtatactcagttctttacacagtgcctgaaacataacaggtacacaataaatatctattgaatgaaagcaaa

SEQ ID NO: 112752 - DNA, 6874 bp, Homo sapiens
  Payload ID: 2065
  Gene Symbol: CDH11
  Gene Name: cadherin 11, type 2, OB-cadherin (osteoblast)
  Uniprot ID: P55287
  ENST ID: ENST00000394156
  CDS Start-End: 455-2536
agcgtcgcgggccgaggagcagatgccgcgggggccgctcgcagccgccgctgacttgtgaatgggaccgggactggggccgggactgacaccgcagcgcttgccctgcgccagggactggcggctcggaggttgcgtccaccctcaagggccccagaaatcactgtgttttcagctcagcggccctgtgacattccttcgtgttgtcatttgttgagtgaccaatcagatgggtggagtgtgttacagaaattggcagcaagtatccaatgggtgaagaagaagctaactggggacgtgggcagccctgacgtgatgagctcaaccagcagagacattccatcccaagagaggtctgcgtgacgcgtccgggaggccaccctcagcaagaccaccgtacagttggtggaaggggtgacagctgcattctcctgtgcctaccacgtaaccaaaaatgaaggagaactactgtttacaagccgccctggtgtgcctgggcatgctgtgccacagccatgcctttgccccagagcggcgggggcacctgcggccctccttccatgggcaccatgagaagggcaaggaggggcaggtgctacagcgctccaagcgtggctgggtctggaaccagttcttcgtgatagaggagtacaccgggcctgaccccgtgcttgtgggcaggcttcattcagatattgactctggtgatgggaacattaaatacattctctcaggggaaggagctggaaccatttttgtgattgatgacaaatcagggaacattcatgccaccaagacgttggatcgagaagagagagcccagtacacgttgatggctcaggcggtggacagggacaccaatcggccactggagccaccgtcggaattcattgtcaaggtccaggacattaatgacaaccctccggagttcctgcacgagacctatcatgccaacgtgcctgagaggtccaatgtgggaacgtcagtaatccaggtgacagcttcagatgcagatgaccccacttatggaaatagcgccaagttagtgtacagtatcctcgaaggacaaccctatttttcggtggaagcacagacaggtatcatcagaacagccctacccaacatggacagggaggccaaggaggagtaccacgtggtgatccaggccaaggacatgggtggacatatgggcggactctcagggacaaccaaagtgacgatcacactgaccgatgtcaatgacaacccaccaaagtttccgcagagcgtataccagatgtctgtgtcagaagcagccgtccctggggaggaagtaggaagagtgaaagctaaagatccagacattggagaaaatggcttagtcacatacaatattgttgatggagatggtatggaatcgtttgaaatcacaacggactatgaaacacaggagggggtgataaagctgaaaaagcctgtagattttgaaaccaaaagagcctatagcttgaaggtagaggcagccaacgtgcacatcgacccgaagtttatcagcaatggccctttcaaggacactgtgaccgtcaagatctcagtagaagatgctgatgagccccctatgttcttggccccaagttacatccacgaagtccaagaaaatgcagctgctggcaccgtggttgggagagtgcatgccaaagaccctgatgctgccaacagcccgataaggtattccatcgatcgtcacactgacctcgacagatttttcactattaatccagaggatggttttattaaaactacaaaacctctggatagagaggaaacagcctggctcaacatcactgtctttgcagcagaaatccacaatcggcatcaggaagccaaagtcccagtggccattagggtccttgatgtcaacgataatgctcccaagtttgctgccccttatgaaggtttcatctgtgagagtgatcagaccaagccactttccaaccagccaattgttacaattagtgcagatgacaaggatgacacggccaatggaccaagatttatcttcagcctaccccctgaaatcattcacaatccaaatttcacagtcagagacaaccgagataacacagcaggcgtgtacgcccggcgtggagggttcagtcggcagaagcaggacttgtaccttctgcccatagtgatcagcgatggcggcatcccgcccatgagtagcaccaacaccctcaccatcaaagtctgcgggtgcgacgtgaacggggcactgctctcctgcaacgcagaggcctacattctgaacgccggcctgagcacaggcgccctgatcgccatcctcgcctgcatcgtcattctcctgggttgcccaagcttaatggaacccccctctcccagggaagacatgagattgctttatctgggcttccagctgatgctattttcctatgttaaagtaaacagaagattttgtcttctgggggtctttataaaacttcctttcctctatgtggtggctacagagagtccaaccacacttacgtcattgtagtattgtttgtgaccctgagaaggcaaaagaaagaaccactcattgtctttgaggaagaagatgtccgtgagaacatcattacttatgatgatgaagggggtggggaagaagacacagaagcctttgatattgccaccctccagaatcctgatggtatcaatggatttatcccccgcaaagacatcaaacctgagtatcagtacatgcctagacctgggctccggccagcgcccaacagcgtggatgtcgatgacttcatcaacacgagaatacaggaggcagacaatgaccccacggctcctccttatgactccattcaaatctacggttatgaaggcaggggctcagtggccgggtccctgagctccctagagtcggccaccacagattcagacttggactatgattatctacagaactggggacctcgttttaagaaactagcagatttgtatggttccaaagacacttttgatgacgattcttaacaataacgatacaaatttggccttaagaactgtgtctggcgttctcaagaatctagaagatgtgtaaacaggtatttttttaaatcaaggaaaggctcatttaaaacaggcaaagttttacagagaggatacatttaataaaactgcgaggacatcaaagtggtaaatactgtgaaataccttttctcacaaaaaggcaaatattgaagttgtttatcaacttcgctagaaaaaaaaaacacttggcatacaaaatatttaagtgaaggagaagtctaacgctgaactgacaatgaagggaaattgtttatgtgttatgaacatccaagtctttcttcttttttaagttgtcaaagaagcttccacaaaattagaaaggacaacagttctgagctgtaatttcgccttaaactctggacactctatatgtagtgcatttttaaacttgaaatatataatattcagccagcttaaacccatacaatgtatgtacaatacaatgtacaattatgtctcttgagcatcaatcttgttactgctgattcttgtaaatctttttgcttctactttcatcttaaactaatacgtgccagatataactgtcttgtttcagtgagagacgccctatttctatgtcatttttaatgtatctatttgtacaattttaaagttcttattttagtatacgtataaatatcagtattctgacatgtaagaaaatgttacggcatcacacttatattttatgaacattgtactgttgctttaatatgagcttcaatataagaagcaatctttgaaataaaaaaagatttttttttaattctgggtttgattcttaacattgaaacaaacgttaagtatttctaatgatccatttatatttctaatttaattgtgatcttttaataaccctatttatgatctgttgttgtctgtctgctgcttttattgtttatttaaaatcaaatatgttttacaaatgttttttcagacaagattctgtaacatcatgtaaagcttttttgtacattcttggtgttaacctcctggcttctcttcacacacatcttctaaaaaagaaggatgtgaaagaactaggtcagtctatgactttgcaatatgtgttatatagtatgcatttatcttgtatatcagtaatttgatggttatgagagatgaatccatgagggaatggagctatcagaactctaatgttccaggtatacattctatgccccacactgagcactggggaactgggggactagagtcaaaaatataaatttgcccagactctaatgttattctattttttcttctgttgaacttaccaggctattgtaagactcttgatagttgaaactgcttatttttcctcctgtaattttaactaattgtaaaatgatgtggcattttatgttttaatgagaatgggcgattcatttaaaaaagctttgtttagaatatgcttggggccgtaagctcagaatgagggcagggaccattttggattctgagagtcgatgccatttggtccaggagtgtgtctacagtcccctgcattccagctagtttcttggggattgaaacttatgtgaagggcatttcacctgttcagttgggccaaaggtcaaaacgtagcaatacttggggaaagaccacataaagtcacactgcaagtgctttccctctttccccctacacacagggcacgtgctttttcttggattgcagacaatttttacagtttttttctgactttattgtgaaagtttgtttcaagcatttcttgatatcatgttatgtactatttttatgatttagtcaacatgcatacaaagaaatgttttttatgaagtgctcacttccattttactttgcattgaaatcaaattgggctgaacacttcaatggaatacattttgtggacaatgtcactttagaatctttcatctcagtgaaggattacacattctcaatacttccataattgcaggttgtgttcatttttttatatagtttttgtaatccaaagaatattttgctagatttgcacagatctccaattgaatttgcaatgaagaaataactcaaaaggaatatgaatagcatttaaataagtatacagctgtaagtaaccctgtcaccatggatgatccttttctctaggaatgtatttggattagagatgacaactacattttcgcatttttatgttgaagtcttttttaaaaaggctgtttacttttcagtagttaagaatacttgtttttctttttcttttttttttttttttttaccttttattttttcgttaagcctctattgtttgtagaacactcttagaaacttggaaataaaatgtctttcccaactagtggagtcctttttcatttggagcacattgccttaaaagaagtcttaatttaaacggtccttccttattctaaagtaatcactgttttataccatctatgcagctaaaagaaggaacatgcttctgttcttttcctcaagtaatggttattgtttctagtcatcattcattcattgattcattcattaattcatcaaaatcttattttataaaccctgttccacttactggaggattcagaatgaatcttactaccttttctgacatcttttgataattcagccctgtaccaaagtatccaccttgttgtcttataatcacctatttacctatttgccctcctagaaaatgcaagaagatattttctctccttccaaattgaaggaagaacataaaagatataacaggaaggagatggtgagatatagagtgtgagcggaaattaggccagctgtggcaattctggacagatcttgggtttagctaagttatttcttttaggcctgggtttctgggggtgacagggaagataaaagagtagtttatttgcacctcttggagaattgcttaaaaatatagagatcatggctctgtatgtcaggtggaaccaggtcaggagtatttgaaactgctcctgggtcattgtgacatatccttcacatctttttgagaaactttataagacaatgggggtgaatgggggctgggcagttggagtctctgagcagaagaggggcaaaatttatttggcaggcagtgtggaggacagattaggagcatataaacccagaggtgtgccccaggagggcttttgcaaaggtcaatatgagatagaatgagggcctgaaataattcagtaatttggagatggagaagaggaaagacttctctgctcttgcactgccatcagcctggtctgggccatggtcatctctgacccggaagactgaccccacctcttggctcaccctctgcctcccaacctcctcttcacaaagaagccagagggatacttttaacacacaacccagatcacatgacttcgtaacttaaacctcttcactggcttcccaaagacttaaaatgaattctgatgcctttattttattgctttacatgaacagggccctgcgaacctctccagtgtcattccactccatcctcctttcagtgcacgatgctccagccacactggccatctttcggttcctgatacaaaaaaaaacacgttccttttccatggaaagcaggtcacccttgttattttgtatcgatgacaactctttaaacttattttgctttttggctttatgtatgtgtgtgggtgggtgggactgactgccccactagaatgtaagctccatgagggcagggaatcttgctttcttgtttaccattgtatactcagttctttacacagtgcctgaaacataacaggtacacaataaatatctattgaatgaaagcaaa

SEQ ID NO: 112753 - DNA, 613 bp, Homo sapiens
  Payload ID: 2065
  Gene Symbol: CDH11
  Gene Name: cadherin 11, type 2, OB-cadherin (osteoblast)
  ENST ID: ENST00000562712
  CDS Start-End: 453-613
tttatggtggcagcacaatgggcctttcagggctcagggaaagagctgtgagatcctgctccccggcttttcaaggcctctagtctttttatcaggcctggacaatgccggattcagcggctgcctgagcctcctgaccgtccattggccgtcagaaatcactgtgttttcagctcagcggccctgtgacattccttcgtgttgtcatttgttgagtgaccaatcagatgggtggagtgtgttacagaaattggcagcaagtatccaatgggtgaagaagaagctaactggggacgtgggcagccctgacgtgatgagctcaaccagcagagacattccatcccaagagaggtctgcgtgacgcgtccgggaggccaccctcagcaagaccaccgtacagttggtggaaggggtgacagctgcattctcctgtgcctaccacgtaaccaaaaatgaaggagaactactgtttacaagccgccctggtgtgcctgggcatgctgtgccacagccatgcctttgccccagagcggcgggggcacctgcggccctccttccatgggcaccatgagaagggcaaggaggggcaggtgctacagcgctccaagcgtgg

SEQ ID NO: 112754 - DNA, 568 bp, Homo sapiens
  Payload ID: 2065
  Gene Symbol: CDH11
  Gene Name: cadherin 11, type 2, OB-cadherin (osteoblast)
  ENST ID: ENST00000562998
  CDS Start-End: 359-568
tcattccgcggccgccgccagctgaggggagcgtcgcgggccgaggagcagatgccgcgggggccgctcgcagccgccgctgacttgtgaatgggaccgggactggggccgggactgacaccgcagcgcttgccctgcgccagggactggcggctcggaggttgcgtccaccctcaagggccccagaagctaactggggacgtgggcagccctgacgtgatgagctcaaccagcagagacattccatcccaagagaggtctgcgtgacgcgtccgggaggccaccctcagcaagaccaccgtacagttggtggaaggggtgacagctgcattctcctgtgcctaccacgtaaccaaaaatgaaggagaactactgtttacaagccgccctggtgtgcctgggcatgctgtgccacagccatgcctttgccccagagcggcgggggcacctgcggccctccttccatgggcaccatgagaagggcaaggaggggcaggtgctacagcgctccaagcgtggctgggtctggaaccagttcttcgtgatagaggagtacaccgggcctgac

SEQ ID NO: 112755 - DNA, 569 bp, Homo sapiens
  Payload ID: 2065
  Gene Symbol: CDH11
  Gene Name: cadherin 11, type 2, OB-cadherin (osteoblast)
  ENST ID: ENST00000562882
  CDS Start-End: 466-569
aaagctgggctgagccctctcacggtcctgtggcccttggtctccccacatgaggtgtcccgagattgaagagagaaggtgcctcctggcattgccaaggctggaatctgcctgtcaaggaagtccctcggcggctagctgctgcaccatgaccttcgtgatggtggaaaatcactgtgttttcagctcagcggccctgtgacattccttcgtgttgtcatttgttgagtgaccaatcagatgggtggagtgtgttacagaaattggcagcaagtatccaatgggtgaagaagaagctaactggggacgtgggcagccctgacgtgatgagctcaaccagcagagacattccatcccaagagaggtctgcgtgacgcgtccgggaggccaccctcagcaagaccaccgtacagttggtggaaggggtgacagctgcattctcctgtgcctaccacgtaaccaaaaatgaaggagaactactgtttacaagccgccctggtgtgcctgggcatgctgtgccacagccatgcctttgccccagagcggcgggggcacctgcggccctcctt

SEQ ID NO: 112756 - DNA, 1235 bp, Homo sapiens
  Payload ID: 2065
  Gene Symbol: CDH11
  Gene Name: cadherin 11, type 2, OB-cadherin (osteoblast)
  ENST ID: ENST00000567934
  CDS Start-End: 570-1235
gctggcagtgccagggatcaggagccgcctctccgtctgtccagaacaaagctgggctgagccctctcacggtcctgtggcccttggtctccccacatgaggtgtcccgagattgaagagagaaggtgcctcctggcattgccaaggctggaatctgcctgtcaaggaagtccctcggcggctagctgctgcaccatgaccttcgtgatggtggagtgagtaggcactggaatcaataagcctggcctctccatctgccagcctgaatgcagaaatcactgtgttttcagctcagcggccctgtgacattccttcgtgttgtcatttgttgagtgaccaatcagatgggtggagtgtgttacagaaattggcagcaagtatccaatgggtgaagaagaagctaactggggacgtgggcagccctgacgtgatgagctcaaccagcagagacattccatcccaagagaggtctgcgtgacgcgtccgggaggccaccctcagcaagaccaccgtacagttggtggaaggggtgacagctgcattctcctgtgcctaccacgtaaccaaaaatgaaggagaactactgtttacaagccgccctggtgtgcctgggcatgctgtgccacagccatgcctttgccccagagcggcgggggcacctgcggccctccttccatgggcaccatgagaagggcaaggaggggcaggtgctacagcgctccaagcgtggctgggtctggaaccagttcttcgtgatagaggagtacaccgggcctgaccccgtgcttgtgggcaggcttcattcagatattgactctggtgatgggaacattaaatacattctctcaggggaaggagctggaaccatttttgtgattgatgacaaatcagggaacattcatgccaccaagacgttggatcgagaagagagagcccagtacacgttgatggctcaggcggtggacagggacaccaatcggccactggagccaccgtcggaattcattgtcaaggtccaggacattaatgacaaccctccggagttcctgcacgagacctatcatgccaacgtgcctgagaggtccaatgtgggaacgtcagtaatccaggtgacagcttcagatgcagatgaccccacttatggaaatagcgccaagttagtgtacagtatcctcgaaggacaaccctatttttcggtggaagcacagacaggtatcatcagaacagccctaccc

SEQ ID NO: 112757 - DNA, 582 bp, Homo sapiens
  Payload ID: 2065
  Gene Symbol: CDH11
  Gene Name: cadherin 11, type 2, OB-cadherin (osteoblast)
  ENST ID: ENST00000562325
  CDS Start-End: 516-582
attcctgccactagcgcgctcggcggctcattccgcggccgccgccagctgaggggagcgtcgcgggccgaggagcagatgccgcgggggccgctcgcagccgccgctgacttgtgaatgggaccgggactggggccgggactgacaccgcagcgcttgccctgcgccagggactggcggctcggaggttgcgtccaccctcaagggccccaggtgagaaatcactgtgttttcagctcagcggccctgtgacattccttcgtgttgtcatttgttgagtgaccaatcagatgggtggagtgtgttacagaaattggcagcaagtatccaatgggtgaagaagaagctaactggggacgtgggcagccctgacgtgatgagctcaaccagcagagacattccatcccaagagaggtctgcgtgacgcgtccgggaggccaccctcagcaagaccaccgtacagttggtggaaggggtgacagctgcattctcctgtgcctaccacgtaaccaaaaatgaaggagaactactgtttacaagccgccctggtgtgcctgggcatgctgtgccacagccatgcct

SEQ ID NO: 112758 - DNA, 566 bp, Homo sapiens
  Payload ID: 2065
  Gene Symbol: CDH11
  Gene Name: cadherin 11, type 2, OB-cadherin (osteoblast)
  ENST ID: ENST00000564317
  CDS Start-End: 370-566
agactccatctgagccctgagggagtcggagcgccgcgccacggggcgggaggggcggccacgaatccagggaaatcactgtgttttcagctcagcggccctgtgacattccttcgtgttgtcatttgttgagtgaccaatcagatgggtggagtgtgttacagaaattggcagcaagtatccaatgggtgaagaagaagctaactggggacgtgggcagccctgacgtgatgagctcaaccagcagagacattccatcccaagagaggtctgcgtgacgcgtccgggaggccaccctcagcaagaccaccgtacagttggtggaaggggtgacagctgcattctcctgtgcctaccacgtaaccaaaaatgaaggagaactactgtttacaagccgccctggtgtgcctgggcatgctgtgccacagccatgcctttgccccagagcggcgggggcacctgcggccctccttccatgggcaccatgagaagggcaaggaggggcaggtgctacagcgctccaagcgtggctgggtctggaaccagttcttcgtgatagaggagta

SEQ ID NO: 112759 - DNA, 2395 bp, Homo sapiens
  Payload ID: 2065
  Gene Symbol: CDH11
  Gene Name: cadherin 11, type 2, OB-cadherin (osteoblast)
  ENST ID: ENST00000566827
  CDS Start-End: 327-2339
tgcgccagggactggcggctcggaggttgcgtccaccctcaagggccccagaaatcactgtgttttcagctcagcggccctgtgacattccttcgtgttgtcatttgttgagtgaccaatcagatgggtggagtgtgttacagaaattggcagcaagtatccaatgggtgaagaagcttcattcagatattgactctggtgatgggaacattaaatacattctctcaggggaaggagctggaaccatttttgtgattgatgacaaatcagggaacattcatgccaccaagacgttggatcgagaagagagagcccagtacacgttgatggctcaggcggtggacagggacaccaatcggccactggagccaccgtcggaattcattgtcaaggtccaggacattaatgacaaccctccggagttcctgcacgagacctatcatgccaacgtgcctgagaggtccaatgtgggaacgtcagtaatccaggtgacagcttcagatgcagatgaccccacttatggaaatagcgccaagttagtgtacagtatcctcgaaggacaaccctatttttcggtggaagcacagacaggtatcatcagaacagccctacccaacatggacagggaggccaaggaggagtaccacgtggtgatccaggccaaggacatgggtggacatatgggcggactctcagggacaaccaaagtgacgatcacactgaccgatgtcaatgacaacccaccaaagtttccgcagagcgtataccagatgtctgtgtcagaagcagccgtccctggggaggaagtaggaagagtgaaagctaaagatccagacattggagaaaatggcttagtcacatacaatattgttgatggagatggtatggaatcgtttgaaatcacaacggactatgaaacacaggagggggtgataaagctgaaaaagcctgtagattttgaaaccaaaagagcctatagcttgaaggtagaggcagccaacgtgcacatcgacccgaagtttatcagcaatggccctttcaaggacactgtgaccgtcaagatctcagtagaagatgctgatgagccccctatgttcttggccccaagttacatccacgaagtccaagaaaatgcagctgctggcaccgtggttgggagagtgcatgccaaagaccctgatgctgccaacagcccgataaggtattccatcgatcgtcacactgacctcgacagatttttcactattaatccagaggatggttttattaaaactacaaaacctctggatagagaggaaacagcctggctcaacatcactgtctttgcagcagaaatccacaatcggcatcaggaagccaaagtcccagtggccattagggtccttgatgtcaacgataatgctcccaagtttgctgccccttatgaaggtttcatctgtgagagtgatcagaccaagccactttccaaccagccaattgttacaattagtgcagatgacaaggatgacacggccaatggaccaagatttatcttcagcctaccccctgaaatcattcacaatccaaatttcacagtcagagacaaccgagataacacagcaggcgtgtacgcccggcgtggagggttcagtcggcagaagcaggacttgtaccttctgcccatagtgatcagcgatggcggcatcccgcccatgagtagcaccaacaccctcaccatcaaagtctgcgggtgcgacgtgaacggggcactgctctcctgcaacgcagaggcctacattctgaacgccggcctgagcacaggcgccctgatcgccatcctcgcctgcatcgtcattctcctggtcattgtagtattgtttgtgaccctgagaaggcaaaagaaagaaccactcattgtctttgaggaagaagatgtccgtgagaacatcattacttatgatgatgaagggggtggggaagaagacacagaagcctttgatattgccaccctccagaatcctgatggtatcaatggatttatcccccgcaaagacatcaaacctgagtatcagtacatgcctagacctgggctccggccagcgcccaacagcgtggatgtcgatgacttcatcaacacgagaatacaggaggcagacaatgaccccacggctcctccttatgactccattcaaatctacggttatgaaggcaggggctcagtggccgggtccctgagctccctagagtcggccaccacagattcagacttggactatgattatctacagaactggggacctcgttttaagaaactagcagatttgtatggttccaaagacacttttgatgacgattcttaacaataacgatacaaatttggccttaagaactgtgtctggcgttctcaagaatctag

SEQ ID NO: 112760 - DNA, 3639 bp, Homo sapiens
  Payload ID: 2065
  Gene Symbol: CDH11
  Gene Name: cadherin 11, type 2, OB-cadherin (osteoblast)
  ENST ID: ENST00000619158
  CDS Start-End: 1-187
gatgtctgtgtcagaagcagccgtccctggggaggaagtaggaagagtgaaagctaaagatccagacattggagaaaatggcttagtcacatacaatattgttgatggagatggtatggaatcgtttgaaatcacaacggactatgaaacacaggagggggtgataaagctgaaaaaggtgagttagggtaaggaatcagacgtgtcagtggtatggcctgctctgccaaggcaacactgcaagaaacagggaggcgacggttaagaaatgagaatttgcgaaaccaggggctgacctgactttgtagttgagctctgagctctggaagatcacagaattgtattcctttctgttactgcagagaagctgacaaaggggctggtgatacctgcctgagattgctagttagttcttaaatgttttccgatggagggaagcacagttctcccatggagggaaggacaatgagataaatctagattttgaagaagcagccctgagcatgcatggaattccccccttagctctgccacactgaatctgttagataagctgttcagaactcttactgtttcaacattcaagattcactgcattgctggaccctctgtgaaactgaagccttctctacttgtttttatctcaagtgaacctggagaagcaacaataatggaccttctcccctagtcaaagagcctgtggacctcccctcatagtcagtctccaaaaacatgtatctggaattaatttattacaaagagaagtttagtgtttcttcttttttacatgcgctcaatactgactactggccagacacagcaccatcctcttacaaacatcatttcatttacttttcacaaaaacaaacaaaagtatgaagtaggtagtgttatcccaatgggcaaagagacctcaacttaattttgaggagattggggctcagacagatgaaatcatttgacccagtcactgtcatatagctcaggcatgccgacctggaattcacaccttagttattctagaacaacttccctctcaagacattttgaaaacagctggcctggaaagcgtttgtaaagaagagccagataagattcacttccaagtgaagaaataattcccgtacattctaaaaaggtttccccccgtgatttaccacttgagaaatcaacacctctccatcatgaaagtgtatggagcattaaatcggaattggaagatgggattaccttggttttaatcaagcgttcattttcaacttagttttatagcatgaatattaaactccttggtgcgatggaaaagactggactctaacactgatagaaaattaatttgaagcatcaataaagaggccagtagctaaagaggagggaaggaccagtgggggaagacaggtcctgaaaggaatctttcaggtgggggagcaaggagtgacctgtgctaagaaactgacctttcacagacttttaaagtatgttggggttggggaaaatattatagagcacaaaacaaagaaaaggtagggggtgattgttataaaaaaagaaagaaaatgaaggatatggaaattggggtgaaatttggatacttggaaaagtctacattaatggatgaatggtaggaccgaggaagcctaattatcaaccacagggagctagggcagtcactaattctggtttctcctctggaaaagtagctgtgtgaattgtgtgttgcctagagctgtcaacttacttcgttaattaatattactatctcttctgcttgacactgacatatgaacattgacatcagcaattcctgcctcccatcctttgctgttcatgtaattgggtagttggttatgctaaggttgtcacctgtttttagtgtattcagggcataaacacacactgtatctctgaaatcctgaaacatttaaatcacccccatggaactcacacgtcgcaaatgagctctctgcatatgattaatttgcacatttgcctccaattcagtgtgtttattctaggcaaaggaataatcttctataaagcactgatgcttaggttttaaatagtgtaagatgttattgcatttgtaaaagaacatttgctcaaacttctagcacaaagttccaaatgtccaccgggggaaaaaaaagaaaaattatagatgaatttaacagagtaaaaatatgactccttgtgaaagtcattccatgcaatttaatactgtaaaagtctatagagacattatggcaatatttctgcattttaaagtattttttaacttagtgtttttatttatttcctaatttattcacccatttttccaccaagagttattgagttcttactatttgtcaggcaggccctttgccagaggctggaaatctaaagttgaagaggcagagtcttgaccacagggagttcacaatttaacaggacagtgaagtgatacaataattaaaaccgagagggttttctcagccttagcagtgttgatgtctagggctggataattctttgttgtaggaggctgttctgcgcattgtaggatatttggtagtatctagtatcccaggcttcccctcactaaaggtcattaagcacgtgctctaccccacccaacagtcctgataataataataaaaataattactctagacattgcctaatagccctggagtaactgggagcaaaatcactccccagttgaaaattgactgcaatagtgtgataaggcctatgcacatgggacatgaatgacttcttgtgggggcagttctcaagctgagtcttgatagatgaggagaaatttgctggatagttaaggacagaaaaggcagaaaaaataactcatgatgggctagtatcaatggaaacaggacacatttaagaaactgcaataccttcaatcttgagaatcttaagatatatacggtaaaaccaacaaacaaacttgttaaaattcaagggagatgttacaaagaattgaagaaggtagaagaggtagtgagatagtagtgaaggagaagaattcaagaaataattactagatagaatcattcatttattgaatattttagaaaacaataaatacctcttgagttctgactgtgtcttagtttaatagtgcacaggaaagagagaaactacccttggggtatttggacaatctctgtgtggttagctgaggaagaaccagggtcaaataaagatgaggttttaggtggcttcgtggacttagaggggaaaatccaatctgttcacgcagcacctttgactaaatgggaatcccatctatctcagagaaatcaccgcacagtgtctgagctatttattttcaaccagataaactccttgaaaagcagtgtcagagcagaattataaggcatttttaatattccctgttttaataaaactctttttatgtttgatttttctttatattctttgtccgcacgtatatagatgtggatacataacatttaacacggttgcaatcagagggtgatctgatttgttaacttaatgtcacatcataaacattttacatgctgttatataatgtacataatcatttttaatgactacataacatcccatcctattgacgaatcattatgtccttaataaaatctcacagttgga

SEQ ID NO: 112761 - DNA, 4164 bp, Homo sapiens
  Payload ID: 2066
  Gene Symbol: CDH12
  Gene Name: cadherin 12, type 2 (N-cadherin 2)
  Uniprot ID: P55289
  ENST ID: ENST00000382254
  CDS Start-End: 1088-3472
cgcctaatcttcacccgctgctaggctcgtttaatgagtcttctgagagctaaggagtcctcggattcattcaaagcattctacaatgaacgctaggggggaaaaagaacaaacaaaatacatttcaaatataggattcaattacttttcactactcaatgatgtgtcaaaggcacgctgtgttttgttttgagggcggggagatgacaggagggaatcctgggcccccattggctcgccgctcgccgctgcagttgagctccagccgctccgagagcattattgatctgaagggtaaatgtggagggagccacagagaggggtccaggcttttctgagaagagaggcagcctcttccaggaagaaagtggtgtctactggctgcccggcctggagaaccttctttgaatgaaaacggacaaaatgcaaagcagtgtgttggcacagtgatttggaaaggggaaacagaagagaagggtctcaccttccgcgcaaggctgagctgttggcaccctgctgcggccgtcggtgctgctgctcctgcagctgccttttctgccatcagctttgttacctaacagcttggctcttttgggaaatatagacaagctggaacccaggagcagttgggagttttaaagaatgccagcctttttaaagctttgatgtccagtgctatagaatcaagttactgtggaggtcaaaacaatttgagatacataagctggccttagaaaataaattgcctctaacttacagtgaggagctcaacataacagggaaaaggagcacaggatgcagctacttggagggtgttgattgaaaacttcgatctccccaccccattcacggttgatttgacggatttctcacctcgttcacagagaaaatttcaattaaggcccctttagatggaatataatacagcagaagccttttcatcaaaaggattaatgcctgcatcatcatttctgcaataaaacaagaagctaagtggtggaggccacagacacctcaaacctggattccacaattctacgttaagtgttggagtttttattactctgctgtaggaaagcctttgccaatgcttacaaggaactgtttatccctgcttctctgggttctgtttgatggaggtctcctaacaccactacaaccacagccacagcagactttagccacagagccaagagaaaatgttatccatctgccaggacaacggtcacatttccaacgtgttaaacgtggctgggtatggaatcaattttttgtgctggaagaatacgtgggctccgagcctcagtatgtgggaaagctccattccgacttagacaagggagagggcactgtgaaatacaccctctcaggagatggcgctggcaccgtttttaccattgatgaaaccacaggggacattcatgcaataaggagcctagatagagaagagaaacctttctacactcttcgtgctcaggctgtggacatagaaaccagaaagcccctggagcctgaatcagaattcatcatcaaagtgcaggatattaatgataatgagccaaagtttttggatggaccttatgttgctactgttccagaaatgtctcctgtgggtgcatatgtactccaggtcaaggccacagatgcagatgacccgacctatggaaacagtgccagagtcgtttacagcattcttcagggacaaccttatttctctattgatcccaagacaggtgttattagaacagctttgccaaacatggacagagaagtcaaagaacaatatcaagtactcatccaagccaaggatatgggaggacagcttggaggattagccggaacaacaatagtcaacatcactctcaccgatgtcaatgacaatccacctcgattccccaaaagcatcttccacttgaaagttcctgagtcttcccctattggttcagctattggaagaataagagctgtggatcctgattttggacaaaatgcagaaattgaatacaatattgttccaggagatgggggaaatttgtttgacatcgtcacagatgaggatacacaagagggagtcatcaaattgaaaaagcctttagattttgaaacaaagaaggcatacactttcaaagttgaggcttccaaccttcaccttgaccaccggtttcactcggcgggccctttcaaagacacagctacggtgaagatcagcgtgctggacgtagatgagccaccggttttcagcaagccgctctacaccatggaggtttatgaagacactccggtagggaccatcattggcgctgtcactgctcaagacctggatgtaggcagcagtgctgttaggtacttcatagattggaagagtgatggggacagctactttacaatagatggaaatgaaggaaccatcgccactaatgaattactagacagagaaagcactgcgcagtataatttctccataattgcgagtaaagttagtaaccctttattgaccagcaaagtcaatatactgattaatgtcttagatgtaaatgaatttcctccagaaatatctgtgccatatgagacagccgtgtgtgaaaatgccaagccaggacagataattcagatagtcagtgctgcagaccgagatctttcacctgctgggcaacaattctcctttagattatcacctgaggctgctatcaaaccaaattttacagttcgtgacttcagaaacaacacagcggggattgaaacccgaagaaatggatacagccgcaggcagcaagagttgtatttcctccctgttgtaatagaagacagcagctaccctgtccagagcagcacaaacacaatgactattcgagtctgtagatgtgactctgatggcaccatcctgtcttgtaatgtggaagcaatttttctacctgtaggacttagcactggggcgttgattgcaattctactatgcattgttatactcttagccatagttgtactgtatgtagcactgcgaaggcagaagaaaaaagacaccctgatgacctctaaagaagacatcagagacaacgtcatccattacgatgatgaaggaggtggggaggaagatacccaggctttcgacatcggggctctgagaaacccaaaagtgattgaggagaacaaaattcgcagggatataaaaccagactctctctgtttacctcgtcagagaccacccatggaagataacacagacataagggatttcattcatcaaaggctacaggaaaatgatgtggatccaactgccccaccatacgattcactggccacatatgcctacgaagggagtgggtccgtggcagagtccctcagctctatagactctctcaccacagaagccgaccaggactatgactatctgacagactggggaccccgctttaaagtcttggcagacatgtttggcgaagaagagagttataaccctgataaagtcacttaagggagtcgtggaggctaaaatacaaccgagaggggagatttttaaaaaagaaaaagaaacacaaatattaatagaaatctctctcacacacacacacacacacaaacacacacacacacacacacactctgggacaagattcctttgattacctggtttctagtaagttactaaattaatcatattgtcagttttggtttattctgccaacaagagatacatcctataatgtgtacttgctttgttttgttgttttgttttttcacaatcacactgagacaagctcaggcctattcaatacaatttactgacatgacaacctagaacgaagatagctatgtggcatcacggtggaagagtgttagatttttcttaattccactaaagtgcctattgaaactcttatcatttaaagtggtgtacagtacactctgctgtgatggtattgcgggattcagagataaagacataaaacaaagacaccgtctttatgtcaagaagcaatagcgacactctgactctcctcattccttttgagaacaaaagaagaacactttctgatctccaccttcttctaattcaaaaggttttctttttcttttttaaactgtatgctaaaacgtatttgtttatcctatcctttcagaaaattgaaataaatatgaaaatatcaagttcaatatgtaagtccc

SEQ ID NO: 112762 - DNA, 4160 bp, Homo sapiens
  Payload ID: 2066
  Gene Symbol: CDH12
  Gene Name: cadherin 12, type 2 (N-cadherin 2)
  Uniprot ID: P55289
  ENST ID: ENST00000504376
  CDS Start-End: 712-3096
attgatctgaagggtaaatgtggagggagccacagagaggggtccaggcttttctgagaagagaggcagcctcttccaggaagaaagtggtgtctactggctgcccggcctggagaaccttctttgaatgaaaacggacaaaatgcaaagcagtgtgttggcacagtgatttggaaaggggaaacagaagagaagggtctcaccttccgcgcaaggctgagctgttggcaccctgctgcggccgtcggtgctgctgctcctgcagctgccttttctgccatcagctttgttacctaacagcttggctcttttgggaaatatagacaagctggaacccaggagcagttgggagttttaaagaatgccagcctttttaaagacagtgaggagctcaacataacagggaaaaggagcacaggatgcagctacttggagggtgttgattgaaaacttcgatctccccaccccattcacggttgatttgacggatttctcacctcgttcacagagaaaatttcaattaaggcccctttagatggaatataatacagcagaagccttttcatcaaaaggattaatgcctgcatcatcatttctgcaataaaacaagaagctaagtggtggaggccacagacacctcaaacctggattccacaattctacgttaagtgttggagtttttattactctgctgtaggaaagcctttgccaatgcttacaaggaactgtttatccctgcttctctgggttctgtttgatggaggtctcctaacaccactacaaccacagccacagcagactttagccacagagccaagagaaaatgttatccatctgccaggacaacggtcacatttccaacgtgttaaacgtggctgggtatggaatcaattttttgtgctggaagaatacgtgggctccgagcctcagtatgtgggaaagctccattccgacttagacaagggagagggcactgtgaaatacaccctctcaggagatggcgctggcaccgtttttaccattgatgaaaccacaggggacattcatgcaataaggagcctagatagagaagagaaacctttctacactcttcgtgctcaggctgtggacatagaaaccagaaagcccctggagcctgaatcagaattcatcatcaaagtgcaggatattaatgataatgagccaaagtttttggatggaccttatgttgctactgttccagaaatgtctcctgtgggtgcatatgtactccaggtcaaggccacagatgcagatgacccgacctatggaaacagtgccagagtcgtttacagcattcttcagggacaaccttatttctctattgatcccaagacaggtgttattagaacagctttgccaaacatggacagagaagtcaaagaacaatatcaagtactcatccaagccaaggatatgggaggacagcttggaggattagccggaacaacaatagtcaacatcactctcaccgatgtcaatgacaatccacctcgattccccaaaagcatcttccacttgaaagttcctgagtcttcccctattggttcagctattggaagaataagagctgtggatcctgattttggacaaaatgcagaaattgaatacaatattgttccaggagatgggggaaatttgtttgacatcgtcacagatgaggatacacaagagggagtcatcaaattgaaaaagcctttagattttgaaacaaagaaggcatacactttcaaagttgaggcttccaaccttcaccttgaccaccggtttcactcggcgggccctttcaaagacacagctacggtgaagatcagcgtgctggacgtagatgagccaccggttttcagcaagccgctctacaccatggaggtttatgaagacactccggtagggaccatcattggcgctgtcactgctcaagacctggatgtaggcagcagtgctgttaggtacttcatagattggaagagtgatggggacagctactttacaatagatggaaatgaaggaaccatcgccactaatgaattactagacagagaaagcactgcgcagtataatttctccataattgcgagtaaagttagtaaccctttattgaccagcaaagtcaatatactgattaatgtcttagatgtaaatgaatttcctccagaaatatctgtgccatatgagacagccgtgtgtgaaaatgccaagccaggacagataattcagatagtcagtgctgcagaccgagatctttcacctgctgggcaacaattctcctttagattatcacctgaggctgctatcaaaccaaattttacagttcgtgacttcagaaacaacacagcggggattgaaacccgaagaaatggatacagccgcaggcagcaagagttgtatttcctccctgttgtaatagaagacagcagctaccctgtccagagcagcacaaacacaatgactattcgagtctgtagatgtgactctgatggcaccatcctgtcttgtaatgtggaagcaatttttctacctgtaggacttagcactggggcgttgattgcaattctactatgcattgttatactcttagccatagttgtactgtatgtagcactgcgaaggcagaagaaaaaagacaccctgatgacctctaaagaagacatcagagacaacgtcatccattacgatgatgaaggaggtggggaggaagatacccaggctttcgacatcggggctctgagaaacccaaaagtgattgaggagaacaaaattcgcagggatataaaaccagactctctctgtttacctcgtcagagaccacccatggaagataacacagacataagggatttcattcatcaaaggctacaggaaaatgatgtggatccaactgccccaccatacgattcactggccacatatgcctacgaagggagtgggtccgtggcagagtccctcagctctatagactctctcaccacagaagccgaccaggactatgactatctgacagactggggaccccgctttaaagtcttggcagacatgtttggcgaagaagagagttataaccctgataaagtcacttaagggagtcgtggaggctaaaatacaaccgagaggggagatttttaaaaaagaaaaagaaacacaaatattaatagaaatctctctcacacacacacacacacacaaacacacacacacacacacacactctgggacaagattcctttgattacctggtttctagtaagttactaaattaatcatattgtcagttttggtttattctgccaacaagagatacatcctataatgtgtacttgctttgttttgttgttttgttttttcacaatcacactgagacaagctcaggcctattcaatacaatttactgacatgacaacctagaacgaagatagctatgtggcatcacggtggaagagtgttagatttttcttaattccactaaagtgcctattgaaactcttatcatttaaagtggtgtacagtacactctgctgtgatggtattgcgggattcagagataaagacataaaacaaagacaccgtctttatgtcaagaagcaatagcgacactctgactctcctcattccttttgagaacaaaagaagaacactttctgatctccaccttcttctaattcaaaaggttttctttttcttttttaaactgtatgctaaaacgtatttgtttatcctatcctttcagaaaattgaaataaatatgaaaatatcaagttcaatatgtaagtcccaaattctagaaacaatgtttgatcttaacattagttcacattaaagctgttcattaaaatgttactttcttttccaaaaaaaaaagaaagaaaaaaaagaaaaaatattcctctttataaagagaggcctcagggctcaaattacacattaaaataaatattggttttgcttaatattgtactggtgtgtggaaaattggttttaacagtcaccagattcagcttttagtcatagatgtaatttcaagttgtgtttctatgaaaattcttagaagaaaaaagtgccattcatttaagcatggaaagagaaattcattatacagtttctcagagtttcttacaatctagtgattctttgatgagcagcaaaaa

SEQ ID NO: 112763 - DNA, 3028 bp, Homo sapiens
  Payload ID: 2066
  Gene Symbol: CDH12
  Gene Name: cadherin 12, type 2 (N-cadherin 2)
  Uniprot ID: P55289
  ENST ID: ENST00000522262
  CDS Start-End: 524-2788
tctttttatgttatttgcataattttatcctgcaaaagtgagagctgtcaaaaattaaccatttggggctttggcattcagttatgtgaccttttccagagagttagatctcttcagggaactaggaacttgatgaggaagtgctgagaaggtggtcagtggcagaaagagcggatgacggatggggaccagcagtgaggagctcaacataacagggaaaaggagcacaggatgcagctacttggagggtgttgattgaaaacttcgatctccccaccccattcacggttgatttgacggatttctcacctcgttcacagagaaaatttcaattaaggcccctttagatggaatataatacagcagaagccttttcatcaaaaggattaatgcctgcatcatcatttctgcaataaaacaagaagctaagtggtggaggccacagacacctcaaacctggattccacaattctacgttaagtgttggagtttttattactctgctgtaggaaagcctttgccaatgcttacaaggaactgtttatccctgcttctctgggttctgtttgatggaggtctcctaacaccactacaaccacagccacagcagactttagccacagagccaagagaaaatgttatccatctgccaggacaacggtcacatttccaacgtgttaaacgtggctgggtatggaatcaattttttgtgctggaagaatacgtgggctccgagcctcagtatgtgggaaagctccattccgacttagacaagggagagggcactgtgaaatacaccctctcaggagatggcgctggcaccgtttttaccattgatgaaaccacaggggacattcatgcaataaggagcctagatagagaagagaaacctttctacactcttcgtgctcaggctgtggacatagaaaccagaaagcccctggagcctgaatcagaattcatcatcaaagtgcaggatattaatgataatgagccaaagtttttggatggaccttatgttgctactgttccagaaatgtctcctgtgggtgttattagaacagctttgccaaacatggacagagaagtcaaagaacaatatcaagtactcatccaagccaaggatatgggaggacagcttggaggattagccggaacaacaatagtcaacatcactctcaccgatgtcaatgacaatccacctcgattccccaaaagcatcttccacttgaaagttcctgagtcttcccctattggttcagctattggaagaataagagctgtggatcctgattttggacaaaatgcagaaattgaatacaatattgttccaggagatgggggaaatttgtttgacatcgtcacagatgaggatacacaagagggagtcatcaaattgaaaaagcctttagattttgaaacaaagaaggcatacactttcaaagttgaggcttccaaccttcaccttgaccaccggtttcactcggcgggccctttcaaagacacagctacggtgaagatcagcgtgctggacgtagatgagccaccggttttcagcaagccgctctacaccatggaggtttatgaagacactccggtagggaccatcattggcgctgtcactgctcaagacctggatgtaggcagcagtgctgttaggtacttcatagattggaagagtgatggggacagctactttacaatagatggaaatgaaggaaccatcgccactaatgaattactagacagagaaagcactgcgcagtataatttctccataattgcgagtaaagttagtaaccctttattgaccagcaaagtcaatatactgattaatgtcttagatgtaaatgaatttcctccagaaatatctgtgccatatgagacagccgtgtgtgaaaatgccaagccaggacagataattcagatagtcagtgctgcagaccgagatctttcacctgctgggcaacaattctcctttagattatcacctgaggctgctatcaaaccaaattttacagttcgtgacttcagaaacaacacagcggggattgaaacccgaagaaatggatacagccgcaggcagcaagagttgtatttcctccctgttgtaatagaagacagcagctaccctgtccagagcagcacaaacacaatgactattcgagtctgtagatgtgactctgatggcaccatcctgtcttgtaatgtggaagcaatttttctacctgtaggacttagcactggggcgttgattgcaattctactatgcattgttatactcttagccatagttgtactgtatgtagcactgcgaaggcagaagaaaaaagacaccctgatgacctctaaagaagacatcagagacaacgtcatccattacgatgatgaaggaggtggggaggaagatacccaggctttcgacatcggggctctgagaaacccaaaagtgattgaggagaacaaaattcgcagggatataaaaccagactctctctgtttacctcgtcagagaccacccatggaagataacacagacataagggatttcattcatcaaaggctacaggaaaatgatgtggatccaactgccccaccatacgattcactggccacatatgcctacgaagggagtgggtccgtggcagagtccctcagctctatagactctctcaccacagaagccgaccaggactatgactatctgacagactggggaccccgctttaaagtcttggcagacatgtttggcgaagaagagagttataaccctgataaagtcacttaagggagtcgtggaggctaaaatacaaccgagaggggagatttttaaaaaagaaaaagaaacacaaatattaatagaaatctctctcacacacacacacacacacaaacacacacacacacacacacactctgggacaagattcctttgattacctggtttctagtaagttactaaattaatcatattgtcagttttggtttattctgccaacaagagatacatcctataatgtgtacttgc

SEQ ID NO: 112764 - DNA, 3792 bp, Homo sapiens
  Payload ID: 2066
  Gene Symbol: CDH12
  Gene Name: cadherin 12, type 2 (N-cadherin 2)
  Uniprot ID: P55289
  ENST ID: ENST00000619694
  CDS Start-End: 535-2919
ttgtctttccagctttgttacctaacagcttggctcttttgggaaatatagacaagctggaacccaggagcagttgggagttttaaagaatgccagcctttttaaagctttgatgtccagtgctatagaatcaagttactgtggaggtcaaaacaatttgagatacataagctggccttagaaaataaattgcctctaacttacagtgaggagctcaacataacagggaaaaggagcacaggatgcagctacttggagggtgttgattgaaaacttcgatctccccaccccattcacggttgatttgacggatttctcacctcgttcacagagaaaatttcaattaaggcccctttagatggaatataatacagcagaagccttttcatcaaaaggattaatgcctgcatcatcatttctgcaataaaacaagaagctaagtggtggaggccacagacacctcaaacctggattccacaattctacgttaagtgttggagtttttattactctgctgtaggaaagcctttgccaatgcttacaaggaactgtttatccctgcttctctgggttctgtttgatggaggtctcctaacaccactacaaccacagccacagcagactttagccacagagccaagagaaaatgttatccatctgccaggacaacggtcacatttccaacgtgttaaacgtggctgggtatggaatcaattttttgtgctggaagaatacgtgggctccgagcctcagtatgtgggaaagctccattccgacttagacaagggagagggcactgtgaaatacaccctctcaggagatggcgctggcaccgtttttaccattgatgaaaccacaggggacattcatgcaataaggagcctagatagagaagagaaacctttctacactcttcgtgctcaggctgtggacatagaaaccagaaagcccctggagcctgaatcagaattcatcatcaaagtgcaggatattaatgataatgagccaaagtttttggatggaccttatgttgctactgttccagaaatgtctcctgtgggtgcatatgtactccaggtcaaggccacagatgcagatgacccgacctatggaaacagtgccagagtcgtttacagcattcttcagggacaaccttatttctctattgatcccaagacaggtgttattagaacagctttgccaaacatggacagagaagtcaaagaacaatatcaagtactcatccaagccaaggatatgggaggacagcttggaggattagccggaacaacaatagtcaacatcactctcaccgatgtcaatgacaatccacctcgattccccaaaagcatcttccacttgaaagttcctgagtcttcccctattggttcagctattggaagaataagagctgtggatcctgattttggacaaaatgcagaaattgaatacaatattgttccaggagatgggggaaatttgtttgacatcgtcacagatgaggatacacaagagggagtcatcaaattgaaaaagcctttagattttgaaacaaagaaggcatacactttcaaagttgaggcttccaaccttcaccttgaccaccggtttcactcggcgggccctttcaaagacacagctacggtgaagatcagcgtgctggacgtagatgagccaccggttttcagcaagccgctctacaccatggaggtttatgaagacactccggtagggaccatcattggcgctgtcactgctcaagacctggatgtaggcagcagtgctgttaggtacttcatagattggaagagtgatggggacagctactttacaatagatggaaatgaaggaaccatcgccactaatgaattactagacagagaaagcactgcgcagtataatttctccataattgcgagtaaagttagtaaccctttattgaccagcaaagtcaatatactgattaatgtcttagatgtaaatgaatttcctccagaaatatctgtgccatatgagacagccgtgtgtgaaaatgccaagccaggacagataattcagatagtcagtgctgcagaccgagatctttcacctgctgggcaacaattctcctttagattatcacctgaggctgctatcaaaccaaattttacagttcgtgacttcagaaacaacacagcggggattgaaacccgaagaaatggatacagccgcaggcagcaagagttgtatttcctccctgttgtaatagaagacagcagctaccctgtccagagcagcacaaacacaatgactattcgagtctgtagatgtgactctgatggcaccatcctgtcttgtaatgtggaagcaatttttctacctgtaggacttagcactggggcgttgattgcaattctactatgcattgttatactcttagccatagttgtactgtatgtagcactgcgaaggcagaagaaaaaagacaccctgatgacctctaaagaagacatcagagacaacgtcatccattacgatgatgaaggaggtggggaggaagatacccaggctttcgacatcggggctctgagaaacccaaaagtgattgaggagaacaaaattcgcagggatataaaaccagactctctctgtttacctcgtcagagaccacccatggaagataacacagacataagggatttcattcatcaaaggctacaggaaaatgatgtggatccaactgccccaccatacgattcactggccacatatgcctacgaagggagtgggtccgtggcagagtccctcagctctatagactctctcaccacagaagccgaccaggactatgactatctgacagactggggaccccgctttaaagtcttggcagacatgtttggcgaagaagagagttataaccctgataaagtcacttaagggagtcgtggaggctaaaatacaaccgagaggggagatttttaaaaaagaaaaagaaacacaaatattaatagaaatctctctcacacacacacacacacacaaacacacacacacacacacacactctgggacaagattcctttgattacctggtttctagtaagttactaaattaatcatattgtcagttttggtttattctgccaacaagagatacatcctataatgtgtacttgctttgttttgttgttttgttttttcacaatcacactgagacaagctcaggcctattcaatacaatttactgacatgacaacctagaacgaagatagctatgtggcatcacggtggaagagtgttagatttttcttaattccactaaagtgcctattgaaactcttatcatttaaagtggtgtacagtacactctgctgtgatggtattgcgggattcagagataaagacataaaacaaagacaccgtctttatgtcaagaagcaatagcgacactctgactctcctcattccttttgagaacaaaagaagaacactttctgatctccaccttcttctaattcaaaaggttttctttttcttttttaaactgtatgctaaaacgtatttgtttatcctatcctttcagaaaattgaaataaatatgaaaatatcaagttcaatatgtaagtcccaaattctagaaacaatgtttgatcttaacattagttcacattaaagctgttcattaaaatgttactttcttttccaaaaaaaaaagaaagaaaaaaaagaaaaaatattcctctttataaagagaggcctcagggctcaaattacacattaaaataaatattggttttgcttaatattgta

SEQ ID NO: 112765 - DNA, 2722 bp, Homo sapiens
  Payload ID: 2067
  Gene Symbol: CDH13
  Gene Name: cadherin 13
  Uniprot ID: P55290
  ENST ID: ENST00000268613
  CDS Start-End: 94-2376
atctatttgggaagttggctggctggcgaggcagagcctctcctcaaagcctggctcccacggaaaatatgctcagtgcagccgcgtgcatgaatgaaaacgccgccgggcgcttctagtcggacaaaatgcagccgagaactccgctcgttctgtgcgttctcctgtcccagggccaaacaacccacctgcactgcatggttcccccagcaagaacatcccagtgagaatggcccacagatgcctgggcgtgacccacctgcagcttcaaccatgcaggtgctgctgctaacatctgcagaagatttggactgcactcctggatttcagcagaaagtgttccatatcaatcagccagctgaattcattgaggaccagtcaattctaaacttgaccttcagtgactgtaagggaaacgacaagctacgctatgaggtctcgagcccatacttcaaggtgaacagcgatggcggcttagttgctctgagaaacataactgcagtgggcaaaactctgttcgtccatgcacggaccccccatgcggaagatatggcagaactcgtgattgtcggggggaaagacatccagggctccttgcaggatatatttaaatttgcaagaacttctcctgtcccaagacaaaagaggtccattgtggtatctcccattttaattccagagaatcagagacagcctttcccaagagatgttggcaaggtagtcgatagtgacaggccagaaaggtccaagttccggctcactggaaagggagtggatcaagagcctaaaggaattttcagaatcaatgagaacacagggagcgtctccgtgacacggaccttggacagagaagtaatcgctgtttatcaactatttgtggagaccactgatgtcaatggcaaaactctcgaggggccggtgcctctggaagtcattgtgattgatcagaatgacaaccgaccgatctttcgggaaggcccctacatcggccacgtcatggaagggtcacccacaggcaccacagtgatgcggatgacagcctttgatgcagatgacccagccaccgataatgccctcctgcggtataatatccgtcagcagacgcctgacaagccatctcccaacatgttctacatcgatcctgagaaaggagacattgtcactgttgtgtcacctgcgctgctggaccgagagactctggaaaatcccaagtatgaactgatcatcgaggctcaagatatggctggactggatgttggattaacaggcacggccacagccacgatcatgatcgatgacaaaaatgatcactcaccaaaattcaccaagaaagagtttcaagccacagtcgaggaaggagctgtgggagttattgtcaatttgacagttgaagataaggatgaccccaccacaggtgcatggagggctgcctacaccatcatcaacggaaaccccgggcagagctttgaaatccacaccaaccctcaaaccaacgaagggatgctttctgttgtcaaaccattggactatgaaatttctgccttccacaccctgctgatcaaagtggaaaatgaagacccactcgtacccgacgtctcctacggccccagctccacagccaccgtccacatcactgtcctggatgtcaacgagggcccagtcttctacccagaccccatgatggtgaccaggcaggaggacctctctgtgggcagcgtgctgctgacagtgaatgccacggaccccgactccctgcagcatcaaaccatcaggtattctgtttacaaggacccagcaggttggctgaatattaaccccatcaatgggactgttgacaccacagctgtgctggaccgtgagtccccatttgtcgacaacagcgtgtacactgctctcttcctggcaattgacagtggcaaccctcccgctacgggcactgggactttgctgataaccctggaggacgtgaatgacaatgccccgttcatttaccccacagtagctgaagtctgtgatgatgccaaaaacctcagtgtagtcattttgggagcatcagataaggatcttcacccgaatacagatcctttcaaatttgaaatccacaaacaagctgttcctgataaagtctggaagatctccaagatcaacaatacacacgccctggtaagccttcttcaaaatctgaacaaagcaaactacaacctgcccatcatggtgacagattcagggaaaccacccatgacgaatatcacagatctcagggtacaagtgtgctcctgcaggaattccaaagtggactgcaacgcggcaggggccctgcgcttcagcctgccctcagtcctgctcctcagcctcttcagcttagcttgtctgtgagaactcctgacgtctgaagcttgactcccaagtttccatagcaacaggaaaaaaaaaaatctatccaaatctgaagattgcggtttacagctatcgaacttcacaactaggcctcaattgttccggttttttattttctttacaatttcacttagtctgtacttcatcattttgacagcatcttcctccctcctttaattaatggaatcttctgaattttccctgaatgtttaaagatcatgacatatgacttgatcttctgggagcaggaacaatgactactttttctggtgtgttaacatgtcgctagccagtgctccaggcacccagctttgtctgtgggtta

SEQ ID NO: 112766 - DNA, 2195 bp, Homo sapiens
  Payload ID: 2067
  Gene Symbol: CDH13
  Gene Name: cadherin 13
  Uniprot ID: P55290
  ENST ID: ENST00000428848
  CDS Start-End: 124-2148
tttgggaagttggctggctggcgaggcagagcctctcctcaaagcctggctcccacggaaaatatgctcagtgcagccgcgtgcatgaatgaaaacgccgccgggcgcttctagtcggacaaaatgcagccgagaactccgctcgttctgtgcgttctcctgtcccaggtgctgctgctaacatctgcagaagatttggactgcactcctggatttcagcagaaagtgttccatatcaatcagccagctgaattcattgaggaccagtcaattctaaacttgaccttcagtgactgtaagggaaacgacaagctacgctatgaggtctcgagcccatacttcaaggtgaacagcgatggcggcttagttgctctgagaaacataactgcagtgggcaaaactctgttcgtccatgcacggaccccccatgcggaagatatggcagaactcgtgattgtcggggggaaagacatccagggctccttgcaggtagtcgatagtgacaggccagaaaggtccaagttccggctcactggaaagggagtggatcaagagcctaaaggaattttcagaatcaatgagaacacagggagcgtctccgtgacacggaccttggacagagaagtaatcgctgtttatcaactatttgtggagaccactgatgtcaatggcaaaactctcgaggggccggtgcctctggaagtcattgtgattgatcagaatgacaaccgaccgatctttcgggaaggcccctacatcggccacgtcatggaagggtcacccacaggcaccacagtgatgcggatgacagcctttgatgcagatgacccagccaccgataatgccctcctgcggtataatatccgtcagcagacgcctgacaagccatctcccaacatgttctacatcgatcctgagaaaggagacattgtcactgttgtgtcacctgcgctgctggaccgagagactctggaaaatcccaagtatgaactgatcatcgaggctcaagatatggctggactggatgttggattaacaggcacggccacagccacgatcatgatcgatgacaaaaatgatcactcaccaaaattcaccaagaaagagtttcaagccacagtcgaggaaggagctgtgggagttattgtcaatttgacagttgaagataaggatgaccccaccacaggtgcatggagggctgcctacaccatcatcaacggaaaccccgggcagagctttgaaatccacaccaaccctcaaaccaacgaagggatgctttctgttgtcaaaccattggactatgaaatttctgccttccacaccctgctgatcaaagtggaaaatgaagacccactcgtacccgacgtctcctacggccccagctccacagccaccgtccacatcactgtcctggatgtcaacgagggcccagtcttctacccagaccccatgatggtgaccaggcaggaggacctctctgtgggcagcgtgctgctgacagtgaatgccacggaccccgactccctgcagcatcaaaccatcaggtattctgtttacaaggacccagcaggttggctgaatattaaccccatcaatgggactgttgacaccacagctgtgctggaccgtgagtccccatttgtcgacaacagcgtgtacactgctctcttcctggcaattgacagtggcaaccctcccgctacgggcactgggactttgctgataaccctggaggacgtgaatgacaatgccccgttcatttaccccacagtagctgaagtctgtgatgatgccaaaaacctcagtgtagtcattttgggagcatcagataaggatcttcacccgaatacagatcctttcaaatttgaaatccacaaacaagctgttcctgataaagtctggaagatctccaagatcaacaatacacacgccctggtaagccttcttcaaaatctgaacaaagcaaactacaacctgcccatcatggtgacagattcagggaaaccacccatgacgaatatcacagatctcagggtacaagtgtgctcctgcaggaattccaaagtggactgcaacgcggcaggggccctgcgcttcagcctgccctcagtcctgctcctcagcctcttcagcttagcttgtctgtgagaactcctgacgtctgaagcttgactcccaagtttccatagcaacag

SEQ ID NO: 112767 - DNA, 831 bp, Homo sapiens
  Payload ID: 2067
  Gene Symbol: CDH13
  Gene Name: cadherin 13
  Uniprot ID: P55290
  ENST ID: ENST00000431540
  CDS Start-End: 124-696
tttgggaagttggctggctggcgaggcagagcctctcctcaaagcctggctcccacggaaaatatgctcagtgcagccgcgtgcatgaatgaaaacgccgccgggcgcttctagtcggacaaaatgcagccgagaactccgctcgttctgtgcgttctcctgtcccaggtgctgctgctaacatctgcagaagatttggactgcactcctggatttcagcagaaagtgttccatatcaatcagccagctgaattcattgaggaccagtcaattctaaacttgaccttcagtgactgtaagggaaacgacaagctacgctatgaggtctcgagcccatacttcaaggtgaacagcgatggcggcttagttgctctgagaaacataactgcagtgggcaaaactctgttcgtccatgcacggaccccccatgcggaagatatggcagaactcgtgattgtcggggggaaagacatccagggctccttgcaggatatatttaaatttgcaagaacttctcctgtcccaagacaaaagaggtccattgtggtatctcccattttaattccagagaatcagagacagcctttcccaagagatgttggcaagagaacccacaatcctattaacagcgaacttctcttgaatgaaggcattacagcagatttaaatccatgcattacaattttagcaatttaatgaacatcctatttggcgacattattgctttaaaggaataaatcacaaacattttacttcccactagcactcggtatttcaaatccattttctctacagaatgatgtgtttaaataaattgtcctgttgactgaa

SEQ ID NO: 112768 - DNA, 2199 bp, Homo sapiens
  Payload ID: 2067
  Gene Symbol: CDH13
  Gene Name: cadherin 13
  ENST ID: ENST00000539548
  CDS Start-End: 124-282
tttgggaagttggctggctggcgaggcagagcctctcctcaaagcctggctcccacggaaaatatgctcagtgcagccgcgtgcatgaatgaaaacgccgccgggcgcttctagtcggacaaaatgcagccgagaactccgctcgttctgtgcgttctcctgtcccaggtgctgctgctaacatctgcagaagatttggactgcactcctggatttcagcagaaagtgttccatatcaatcagccagctgaattcattgaggaccagtcaattctaaactgatatatttaaatttgcaagaacttctcctgtcccaagacaaaagaggtccattgtggtatctcccattttaattccagagaatcagagacagcctttcccaagagatgttggcaaggtagtcgatagtgacaggccagaaaggtccaagttccggctcactggaaagggagtggatcaagagcctaaaggaattttcagaatcaatgagaacacagggagcgtctccgtgacacggaccttggacagagaagtaatcgctgtttatcaactatttgtggagaccactgatgtcaatggcaaaactctcgaggggccggtgcctctggaagtcattgtgattgatcagaatgacaaccgaccgatctttcgggaaggcccctacatcggccacgtcatggaagggtcacccacaggcaccacagtgatgcggatgacagcctttgatgcagatgacccagccaccgataatgccctcctgcggtataatatccgtcagcagacgcctgacaagccatctcccaacatgttctacatcgatcctgagaaaggagacattgtcactgttgtgtcacctgcgctgctggaccgagagactctggaaaatcccaagtatgaactgatcatcgaggctcaagatatggctggactggatgttggattaacaggcacggccacagccacgatcatgatcgatgacaaaaatgatcactcaccaaaattcaccaagaaagagtttcaagccacagtcgaggaaggagctgtgggagttattgtcaatttgacagttgaagataaggatgaccccaccacaggtgcatggagggctgcctacaccatcatcaacggaaaccccgggcagagctttgaaatccacaccaaccctcaaaccaacgaagggatgctttctgttgtcaaaccattggactatgaaatttctgccttccacaccctgctgatcaaagtggaaaatgaagacccactcgtacccgacgtctcctacggccccagctccacagccaccgtccacatcactgtcctggatgtcaacgagggcccagtcttctacccagaccccatgatggtgaccaggcaggaggacctctctgtgggcagcgtgctgctgacagtgaatgccacggaccccgactccctgcagcatcaaaccatcaggtattctgtttacaaggacccagcaggttggctgaatattaaccccatcaatgggactgttgacaccacagctgtgctggaccgtgagtccccatttgtcgacaacagcgtgtacactgctctcttcctggcaattgacagtggcaaccctcccgctacgggcactgggactttgctgataaccctggaggacgtgaatgacaatgccccgttcatttaccccacagtagctgaagtctgtgatgatgccaaaaacctcagtgtagtcattttgggagcatcagataaggatcttcacccgaatacagatcctttcaaatttgaaatccacaaacaagctgttcctgataaagtctggaagatctccaagatcaacaatacacacgccctggtaagccttcttcaaaatctgaacaaagcaaactacaacctgcccatcatggtgacagattcagggaaaccacccatgacgaatatcacagatctcagggtacaagtgtgctcctgcaggaattccaaagtggactgcaacgcggcaggggccctgcgcttcagcctgccctcagtcctgctcctcagcctcttcagcttagcttgtctgtgagaactcctgacgtctgaagcttgactcccaagtttccatagcaacaggaaaaaaaaaaatctatccaaatctgaagattgcggtttacagctatcgaacttcacaactaggcctcaattgttccggttttttattttctttac

SEQ ID NO: 112769 - DNA, 3684 bp, Homo sapiens
  Payload ID: 2067
  Gene Symbol: CDH13
  Gene Name: cadherin 13
  ENST ID: ENST00000566620
  CDS Start-End: 1-2106
ttttctcaggtgctgctgctaacatctgcagaagatttggactgcactcctggatttcagcagaaagtgttccatatcaatcagccagctgaattcattgaggaccagtcaattctaaacttgaccttcagtgactgtaagggaaacgacaagctacgctatgaggtctcgagcccatacttcaaggtgaacagcgatggcggcttagttgctctgagaaacataactgcagtgggcaaaactctgttcgtccatgcacggaccccccatgcggaagatatggcagaactcgtgattgtcggggggaaagacatccagggctccttgcaggatatatttaaatttgcaagaacttctcctgtcccaagacaaaagaggtccattgtggtatctcccattttaattccagagaatcagagacagcctttcccaagagatgttggcaaggtagtcgatagtgacaggccagaaaggtccaagttccggctcactggaaagggagtggatcaagagcctaaaggaattttcagaatcaatgagaacacagggagcgtctccgtgacacggaccttggacagagaagtaatcgctgtttatcaactatttgtggagaccactgatgtcaatggcaaaactctcgaggggccggtgcctctggaagtcattgtgattgatcagaatgacaaccgaccgatctttcgggaaggcccctacatcggccacgtcatggaagggtcacccacaggcaccacagtgatgcggatgacagcctttgatgcagatgacccagccaccgataatgccctcctgcggtataatatccgtcagcagacgcctgacaagccatctcccaacatgttctacatcgatcctgagaaaggagacattgtcactgttgtgtcacctgcgctgctggaccgagagactctggaaaatcccaagtatgaactgatcatcgaggctcaagatatggctggactggatgttggattaacaggcacggccacagccacgatcatgatcgatgacaaaaatgatcactcaccaaaattcaccaagaaagagtttcaagccacagtcgaggaaggagctgtgggagttattgtcaatttgacagttgaagataaggatgaccccaccacaggtgcatggagggctgcctacaccatcatcaacggaaaccccgggcagagctttgaaatccacaccaaccctcaaaccaacgaagggatgctttctgttgtcaaaccattggactatgaaatttctgccttccacaccctgctgatcaaagtggaaaatgaagacccactcgtacccgacgtctcctacggccccagctccacagccaccgtccacatcactgtcctggatgtcaacgagggcccagtcttctacccagaccccatgatggtgaccaggcaggaggacctctctgtgggcagcgtgctgctgacagtgaatgccacggaccccgactccctgcagcatcaaaccatcaggtattctgtttacaaggacccagcaggttggctgaatattaaccccatcaatgggactgttgacaccacagctgtgctggaccgtgagtccccatttgtcgacaacagcgtgtacactgctctcttcctggcaattgacagtggcaaccctcccgctacgggcactgggactttgctgataaccctggaggacgtgaatgacaatgccccgttcatttaccccacagtagctgaagtctgtgatgatgccaaaaacctcagtgtagtcattttgggagcatcagataaggatcttcacccgaatacagatcctttcaaatttgaaatccacaaacaagctgttcctgataaagtctggaagatctccaagatcaacaatacacacgccctggtaagccttcttcaaaatctgaacaaagcaaactacaacctgcccatcatggtgacagattcagggaaaccacccatgacgaatatcacagatctcagggtacaagtgtgctcctgcaggaattccaaagtggactgcaacgcggcaggggccctgcgcttcagcctgccctcagtcctgctcctcagcctcttcagcttagcttgtctgtgagaactcctgacgtctgaagcttgactcccaagtttccatagcaacaggaaaaaaaaaaatctatccaaatctgaagattgcggtttacagctatcgaacttcacaactaggcctcaattgttccggttttttattttctttacaatttcacttagtctgtacttcatcattttgacagcatcttcctccctcctttaattaatggaatcttctgaattttccctgaatgtttaaagatcatgacatatgacttgatcttctgggagcaggaacaatgactactttttctggtgtgttaacatgtcgctagccagtgctccaggcacccagctttgtctgtgggttagtattggtgtatgtatgagtatctgtatgtatatatacacggtatttatagagagagactatcctggagaagcctcgttttgatgccattcttccttgcaaggttaagcaaggtgggtggaaactaagacacctgaaccctccagggcctcccgcatcaaggtcagcatgaggacagaccacagagctgtcacttttgctccgaagctacttctccactgtcccgttcagtctgaatgctgccacaaccagccaggcaggtccacagagagggagagcagagaaagaagtcctttctctttattgagttcgaggactacaaccaatttacactgccatctgatgccgtgatcctgagccaaggaggtgaggagcagagcaggcaatttcaccaccaaatgccaagaaaagggctgacattttctttcatgggcaccaacctgcatttgtatgtgtcccgaatccacagtcgtactgattctaatggggacacagatcatggtagagaatctctccctcctcagtaaatgtacaactgcacctgtcatcatggaggtcatacatgcatacaaagaggtgtacaggtaccatcttgtatacacatatatacccacatgtacagacatacatttatgcacattcacgctgtttgtttcatatatacaggcataaaatagagtaaatacaggtagttttaaaagtacccttttgtgtgaattgactaccgttgtttgcaaacccgaaaataaaagacgttcattatgtatgaaaagtaactgatttgtattctgtgagcatgtaaaagcggaaagttagtgcttgttctaagattaccttcttgttgataaaccataaatgaatcatcaaagctcacaccaaatttttctatcaaataaaactagtgacagcttgtggctttttattagagctcgccacgaactagggtaaggtgagtgtcttagcatattttaatgcagttgcttactaaaggttttaaccgcacatgcacacacacacgctttcttatgcaatctatgtttgcacttgtgctttcagttagccttctgtaggaagtagaagtcatatgttgtctttgttgtagtgaaattatacagatagagttccatatattgtatttgtttcaatggtaaatccttttggaacatatagaatgcagagatttttttttccattaaaataaatgggtattggtggttaaaactgctggacagt

SEQ ID NO: 112770 - DNA, 545 bp, Homo sapiens
  Payload ID: 2067
  Gene Symbol: CDH13
  Gene Name: cadherin 13
  ENST ID: ENST00000562601
  CDS Start-End: 126-329
tatttgggaagttggctggctggcgaggcagagcctctcctcaaagcctggctcccacggaaaatatgctcagtgcagccgcgtgcatgaatgaaaacgccgccgggcgcttctagtcggacaaaatgcagccgagaactccgctcgttctgtgcgttctcctgtcccagacaccagtgaggcctaccatatacctatgtcaaaacctgcaatttatcaaaaataaagcccgagatagtaacagtcttgctgaccacaaaggcaaaaggatccaggtaaacagattgcttccaggactattatttcatgatgagctttcaggtatatagcacatgagagggaggacaaggtgcggctgcacttcaagagaccacgttggacaggtgctgctgctaacatctgcagaagatttggactgcactcctggatttcagcagaaagtgttccatatcaatcagccagctgaattcattgaggaccagtcaattctaaacttgaccttcagtgactgtaagggaaacgacaagctacgctatgaggtctcg

SEQ ID NO: 112771 - DNA, 1456 bp, Homo sapiens
  Payload ID: 2067
  Gene Symbol: CDH13
  Gene Name: cadherin 13
  ENST ID: ENST00000567445
  CDS Start-End: 55-258
agtgcagccgcgtgcatgaatgaaaacgccgccgggcgcttctagtcggacaaaatgcagccgagaactccgctcgttctgtgcgttctcctgtcccaggtgctgctgctaacatctgcagaagatttggactgcactcctggatttcagcagaaagtgttccatatcaatcagccagctgaattcattgaggaccagtcaattctaaactgtaagcaatgtcactcaaagatgcttttagactcttctcatatttgaatttactaatgtttatgactgtgtctcaggatgtggtatttcctaaactaagtgttttctgattatttttcttatgtcactgcttgacccaaagtggaaattcttgaatgagggcctggccaacttagaggttaatagagtgatatgcatctctttttagtattttatcatcagtgggtatctccatactgctgtcagaaaagggggctgtcagcctccaatgagagttgtacactgtgcaaaggaaatgaaattcatttcccctgggcagatccccaaaatcaaaatcattgccttctcgcagattgctgttctacctgtagtttctcatacatagcattagatcaaaataatggtgagagtatgacattggcttctgggaatttttagacacagacatcaaaaactcttattcttaaggctaataagatgggttttagaaagattcaaaacctctactgattattctatggattaagctcaactcatcctgaattccaattgatttatttaaaatatgcatctttcatatctgtggtgatgatctctttttgtttttaatgtcaatattatattgctttatctttaagaagtgttagggtacattgctaaatgcataacaagtacagttttagtgcaatagaatttaaaattggtggtagacaaatagctatttcattgtaggctcttgagtaccttgcttaacaactggaaatgaagaatatggaaacaactgatctaaactgatcagatgcagtcgggtgtgatggctcatgcctgtaatctcaccactttgggaggccgaggaggatggatggcttgaggccagaagttcaagaccagtctgggcaacctggtgaaaccccatctctactaaagttacaaaacttagctgggcatggtggcatatgcctatagtcccagctacgcgggaggctgcggcagaagaatcgctttaacccaggaggtggaggctgcagtgagccgagatcataccattgcactccaacctgggtgacagagcgagactgtgtctcaaaaaagaaaaaaaaaaaagaagaagaagaaaattaaaataagctgatcatacgctccaaggtcttttcaaggaaggtgattccacattggctcttatggtctcaggtttacgttccacgctagctaagttcctttagtcctatgctatgtggctgacaag

SEQ ID NO: 112772 - DNA, 810 bp, Homo sapiens
  Payload ID: 2067
  Gene Symbol: CDH13
  Gene Name: cadherin 13
  Uniprot ID: P55290
  ENST ID: ENST00000565636
  CDS Start-End: 124-651
tttgggaagttggctggctggcgaggcagagcctctcctcaaagcctggctcccacggaaaatatgctcagtgcagccgcgtgcatgaatgaaaacgccgccgggcgcttctagtcggacaaaatgcagccgagaactccgctcgttctgtgcgttctcctgtcccaggtgctgctgctaacatctgcagaagatttggactgcactcctggatttcagcagaaagtgttccatatcaatcagccagctgaattcattgaggaccagtcaattctaaacttgaccttcagtgactgtaagggaaacgacaagctacgctatgaggtctcgagcccatacttcaaggtgaacagcgatggcggcttagttgctctgagaaacataactgcagtgggcaaaactctgttcgtccatgcacggaccccccatgcggaagatatggcagaactcgtgattgtcggggggaaagacatccagggctccttgcaggatatatttaaatttgcaagaacttctcctgtcccaagacaaaagaggtccattgtggtatctcccattttaattccagagaatcagagacagcctttcccaagagatgttggcaagatgaagatttggcaagttctgtgcctagcacgatggctgacatgagataaaacccacaatcctattaacagcgaacttctcttgaatgaaggcattacagcagatttaaatccatgcattacaattttagcaatttaatgaacatcctatttggcgacattattgctttaaaggaataaatcacaaacattttacttcccacta

SEQ ID NO: 112773 - DNA, 589 bp, Homo sapiens
  Payload ID: 2067
  Gene Symbol: CDH13
  Gene Name: cadherin 13
  ENST ID: ENST00000568770
  CDS Start-End: 125-238
atttgggaagttggctggctggcgaggcagagcctctcctcaaagcctggctcccacggaaaatatgctcagtgcagccgcgtgcatgaatgaaaacgccgccgggcgcttctagtcggacaaaatgcagccgagaactccgctcgttctgtgcgttctcctgtcccagtcaggtggtcctgtgtgcaagtcccagttccaggcccttccactggctgtccaatggcttggagtctgaggctcagttttcccacttgcagaaggaaggaatgatgccaacttcgtgctgctgctaacatctgcagaagatttggactgcactcctggatttcagcagaaagtgttccatatcaatcagccagctgaattcattgaggaccagtcaattctaaactatggtaggaaatctatgccttttggattttcatccccaagaaccaccttcaaaagaaagaaatggaaaagcataaaatcaagtgaccttcagtgactgtaagggaaacgacaagctacgctatgaggtctcgagcccatacttcaaggtgaacagcgatggcggcttagttgctctgagaaacataactgcagt

SEQ ID NO: 112774 - DNA, 583 bp, Homo sapiens
  Payload ID: 2067
  Gene Symbol: CDH13
  Gene Name: cadherin 13
  ENST ID: ENST00000569144
  CDS Start-End: 128-298
tctatttgggaagttggctggctggcgaggcagagcctctcctcaaagcctggctcccacggaaaatatgctcagtgcagccgcgtgcatgaatgaaaacgccgccgggcgcttctagtcggacaaaatgcagccgagaactccgctcgttctgtgcgttctcctgtcccaggtgctgctgctaacatctgcagaagatttggactgcactcctggatttcagcagaaagtgttccatatcaatcagccagctgaattcattgaggaccagtcaattctaaactatgtattctactagctgacagacttttaaagtagaggccacttttaaaagcctgggctcccatgagaaggaaatctgcagtagacaaagcaagatgcttagttaacagcagcaacccagtgcctgtaattttcaagtccttggaggcacaccatgtcacccaagtgaccttcagtgactgtaagggaaacgacaagctacgctatgaggtctcgagcccatacttcaaggtgaacagcgatggcggcttagttgctctgagaaacataactgcagtgggcaaaactctgttcgtccatg

SEQ ID NO: 112775 - DNA, 8042 bp, Homo sapiens
  Payload ID: 2067
  Gene Symbol: CDH13
  Gene Name: cadherin 13
  Uniprot ID: P55290
  ENST ID: ENST00000567109
  CDS Start-End: 291-2432
aagaagcaaatgggatgccacctccgcggggctcgctcctcgcgaggtgctcaccccgtatctgccatgcaaaacgagggagcgttaggaaggaatccgtcttgtaaagccattggtcctggtcatcagcctctacccaatgctttcgtgatgctgctgctgatctatttgggaagttggctggctggcgaggcagagcctctcctcaaagcctggctcccacggaaaatatgctcagtgcagccgcgtgcatgaatgaaaacgccgccgggcgcttctagtcggacaaaatgcagccgagaactccgctcgttctgtgcgttctcctgtcccaggtgctgctgctaacatctgcagaagatttggactgcactcctggatttcagcagaaagtgttccatatcaatcagccagctgaattcattgaggaccagtcaattctaaacttgaccttcagtgactgtaagggaaacgacaagctacgctatgaggtctcgagcccatacttcaaggtgaacagcgatggcggcttagttgctctgagaaacataactgcagtgggcaaaactctgttcgtccatgcacggaccccccatgcggaagatatggcagaactcgtgattgtcggggggaaagacatccagggctccttgcaggatatatttaaatttgcaagaacttctcctgtcccaagacaaaagaggtccattgtggtatctcccattttaattccagagaatcagagacagcctttcccaagagatgttggcaaggtagtcgatagtgacaggccagaaaggtccaagttccggctcactggaaagggagtggatcaagagcctaaaggaattttcagaatcaatgagaacacagggagcgtctccgtgacacggaccttggacagagaagtaatcgctgtttatcaactatttgtggagaccactgatgtcaatggcaaaactctcgaggggccggtgcctctggaagtcattgtgattgatcagaatgacaaccgaccgatctttcgggaaggcccctacatcggccacgtcatggaagggtcacccacaggcaccacagtgatgcggatgacagcctttgatgcagatgacccagccaccgataatgccctcctgcggtataatatccgtcagcagacgcctgacaagccatctcccaacatgttctacatcgatcctgagaaaggagacattgtcactgttgtgtcacctgcgctgctggaccgagagactctggaaaatcccaagtatgaactgatcatcgaggctcaagatatggctggactggatgttggattaacaggcacggccacagccacgatcatgatcgatgacaaaaatgatcactcaccaaaattcaccaagaaagagtttcaagccacagtcgaggaaggagctgtgggagttattgtcaatttgacagttgaagataaggatgaccccaccacaggtgcatggagggctgcctacaccatcatcaacggaaaccccgggcagagctttgaaatccacaccaaccctcaaaccaacgaagggatgctttctgttgtcaaaccattggactatgaaatttctgccttccacaccctgctgatcaaagtggaaaatgaagacccactcgtacccgacgtctcctacggccccagctccacagccaccgtccacatcactgtcctggatgtcaacgagggcccagtcttctacccagaccccatgatggtgaccaggcaggaggacctctctgtgggcagcgtgctgctgacagtgaatgccacggaccccgactccctgcagcatcaaaccatcaggtattctgtttacaaggacccagcaggttggctgaatattaaccccatcaatgggactgttgacaccacagctgtgctggaccgtgagtccccatttgtcgacaacagcgtgtacactgctctcttcctggcaattgacagtggcaaccctcccgctacgggcactgggactttgctgataaccctggaggacgtgaatgacaatgccccgttcatttaccccacagtagctgaagtctgtgatgatgccaaaaacctcagtgtagtcattttgggagcatcagataaggatcttcacccgaatacagatcctttcaaatttgaaatccacaaacaagctgttcctgataaagtctggaagatctccaagatcaacaatacacacgccctggtaagccttcttcaaaatctgaacaaagcaaactacaacctgcccatcatggtgacagattcagggaaaccacccatgacgaatatcacagatctcagggtacaagtgtgctcctgcaggaattccaaagtggactgcaacgcggcaggggccctgcgcttcagcctgccctcagtcctgctcctcagcctcttcagcttagcttgtctgtgagaactcctgacgtctgaagcttgactcccaagtttccatagcaacaggaaaaaaaaaaatctatccaaatctgaagattgcggtttacagctatcgaacttcacaactaggcctcaattgttccggttttttattttctttacaatttcacttagtctgtacttcatcattttgacagcatcttcctccctcctttaattaatggaatcttctgaattttccctgaatgtttaaagatcatgacatatgacttgatcttctgggagcaggaacaatgactactttttctggtgtgttaacatgtcgctagccagtgctccaggcacccagctttgtctgtgggttagtattggtgtatgtatgagtatctgtatgtatatatacacggtatttatagagagagactatcctggagaagcctcgttttgatgccattcttccttgcaaggttaagcaaggtgggtggaaactaagacacctgaaccctccagggcctcccgcatcaaggtcagcatgaggacagaccacagagctgtcacttttgctccgaagctacttctccactgtcccgttcagtctgaatgctgccacaaccagccaggcaggtccacagagagggagagcagagaaagaagtcctttctctttattgagttcgaggactacaaccaatttacactgccatctgatgccgtgatcctgagccaaggaggtgaggagcagagcaggcaatttcaccaccaaatgccaagaaaagggctgacattttctttcatgggcaccaacctgcatttgtatgtgtcccgaatccacagtcgtactgattctaatggggacacagatcatggtagagaatctctccctcctcagtaaatgtacaactgcacctgtcatcatggaggtcatacatgcatacaaagaggtgtacaggtaccatcttgtatacacatatatacccacatgtacagacatacatttatgcacattcacgctgtttgtttcatatatacaggcataaaatagagtaaatacaggtagttttaaaagtacccttttgtgtgaattgactaccgttgtttgcaaacccgaaaataaaagacgttcattatgtatgaaaagtaactgatttgtattctgtgagcatgtaaaagcggaaagttagtgcttgttctaagattaccttcttgttgataaaccataaatgaatcatcaaagctcacaccaaatttttctatcaaataaaactagtgacagcttgtggctttttattagagctcgccacgaactagggtaaggtgagtgtcttagcatattttaatgcagttgcttactaaaggttttaaccgcacatgcacacacacacgctttcttatgcaatctatgtttgcacttgtgctttcagttagccttctgtaggaagtagaagtcatatgttgtctttgttgtagtgaaattatacagatagagttccatatattgtatttgtttcaatggtaaatccttttggaacatatagaatgcagagatttttttttccattaaaataaatgggtattggtggttaaaactgctggacagtaactgttctctgatttctatcttgtgtccaatgtcactgatgttgggtcttgtcttagtgcaagttcacatttttgacagaccatttggggtccgtcgtacatctctggttggtgagtgagtctatgaagacagaagtaccagttctcagcatgggccatggactcatcttgtccacctcatgatatgatctgagggtgtcataatcagctataaaggtaattgcatactcaaagatgagacggaccattctcagttgatgaccacattaagcatagtcatggccatctgtcaacagtcccaagacctggggatttttctctggaacaaatcctgttgctggatcaggagatgccacaccttgaacttgatagggtcattctccacgagcacatgcccccgactcagggacaggggaatctaagcctgtgcattcacactccacaagatttcctctactggctttacagggcactgtcacgcgtctcccgggcgcaccttgctcccctcttcctgcaaggcagggggagaacgttcatccttgaacaaacaaagagcatcctcagccagtcaggcggctggtagccggacacatatgctaactggcaatcaggaagtcaccctccaatgtaaacttcagccacatgcagggagaaacacagcagctgagtggccattcactcaaggaaacaaatacagcatgactccttttctctcaagctggtaggctctcctgcactttgtgaaccgaaccagaagattaacttcgctgaaaattcagaaaaataggagtaaagtgcacacttcattaataaatagaatatgcctcaactttcccttatttaaacatattctctgtccccacagttctaatcaggacagagatacttctgtcatgttgttcctcctaatagtttccagaaaaaaaggaaaataaaccaattcttataggccaaagtggtagcatttcctgaatcataagatgttttgttcatttgctggaatatattacattgtttactgaaaaccatagtagaatcaaaatgttatttcattattacctatgcattttatctgagtccaacttattaaaaaacgaagtcaagtaaggaccagaaattgcttttcccaattactgagcacaggtctgagggttttatttccactgagcaaatagtcacaccttcacttctttttattaatactcaaccaacttagttgattaaaaatcacattttctccctcattttacatacgataaattaattattttggataatttgttttaataagaatatgcacacattttctaatttcaataaaagtcaccttcaataccgccagttctctccaaatgagcatcattccaggcagatatacctgctgtgcctcttggccgacaccagcaaatctaagcattataacgaaataaatccagccagatttcatggtaggtatcaaataagactttggctcttaaagaacatcgttagaaattttgatagctcattccagagtttcagaatgtcatttaaaacagtctgataaatggaacaaccatctaccatcacactcatagagtagctcaaattgcattttacccaaataaatacactgggtcttaatcttaagatgtgacaactaaaaaatttttaacaagtctgtgtttgatcctggatttagtgcagttgcacccaggcacgagctctccagatgattctgaggaaaggagtctacaattttcctagggggtgtatgaacatggtaccaaaaaggtgattaataattataataatggtttatatttatcaactgcttattatgtgcccacactgtacaaaatccttacagatagtaactcattaatccctccagtaacatatgagacaagcactactatcttctccaactcacagataaagaaggctgaggctcagaaaaattgaatggcttgcccaaggtaagtggcctccagaaccaaacctcaggctatctggctccagggttcatgttcttccgacaacatcacaatgccactctcaacccaggagcaaaaccagacaaagtgcctactgcagaccggaagaccctcgtttgaagcctccattagcgtgactatgcagctagaccaacttactgttaagcaacagtaccttttactatgaggtaccctttactattaagtaccttttactaacagtatcttctgttacctattattaagttcatgctatacttcttcaatctgaaagctttctgttaaaaaaaaaaatgttaacatcgttctaaattaatattgagaccttagaaatttttcctgtgcaagataacgtaattatttgccccttcccttccatggcttgttagcaggtagatgaggggcttctcctagattaatttaacatctcagttaatcaaaagtagccgggcatggtgactcatgcctgtaatcccagccctttgggaggcagaggcgggtggatcacttaaggtcaggagttcaagaccagcctggccagcatggtgaaaccctatctctactaaaaaatacaaaaattagctgggtgtggtggtgcacacctgaaaccccagctactcaggaggctgaggcaggagaatcgcttgaacccaggaggcagagtttgcagtgagccattgcactccagcctgggcaacagagcaagactccgtcaaaaaaaaaaaaaaaaaaaaagaaagaaaaggaaatttatgaactccagagtacccattcactaccaaaccaactgaggggagagaaaactgagggagaaagtggggtggggtctcaaagggtttgcactgtgctttgctataaatcattcaaaggggcaaattctaaaggatctctaagtagttgctgattttgtaaaggtagcccataaatctgtttacgtgtagctgccttaaacatgagtcaacagggtaagtcacaccaacaggaaacccaagcactaaaaaagccacctaccttttctgtttaccaaatactaagaataataatctaataatctggctacatctttcataaagacctccatcttctctccttaactgactgttgagatttgataattttcacagtctaatgataaaatgctttcaaaatggttcatctaacacaattaacaattcttttactatatgcaatgtgttacccttactatatttcctattgctaatagattagcccactattgaaaaaattctgcagttgtgaccgtgttcacatgaaagcatatacaagacatggagagacagcaaaaaatggtgggaatgggtgtgtgtatgagggtttcagataagaacttcaattatataatttaagaagagtcagtctataatttaagcagaaataattgagatactcatcaaattaagtaagcggaaaaatttcctctctctcatactatgttgctatcatcacatctatcgttggagggttgctgagcttgatacgcctttgaaccattttatttgactttccacgtgccgtctcattggtagggagatggtgaaaagcgttgggtggtgtaggacgagggaggttttcactctgaagctatgaagatttggagaaaggggcttatagaagcactatgaaaataaactggagactatttttttgctactttttaaaaagctttttctttagagagtactaaagccattctatatctgtcgtacacatgaattcagactattattagagagttatatctgtgttgtcatgcacatgtcaacactgtcctgatgacaaaattttatgtatccccccagataaaaattttaagaaattttaaatgctttttattcacacacacttttcaaaagggataaaagttaatcatgttaaaatattcagtctatggcagatgtcgctcctttgggccctcactgctgaattgcttacagtttctgagctgtaaactaacatttgctttactatgtagttacagagaaatgtgcaacttgtttgtgaaacattcaaataaagcttatctgggatttttaa

SEQ ID NO: 112776 - DNA, 2640 bp, Homo sapiens
  Payload ID: 2067
  Gene Symbol: CDH13
  Gene Name: cadherin 13
  ENST ID: ENST00000615627
  CDS Start-End: 1-1062
cccacattctgcaggagagaatttcaagccacagtcgaggaaggagctgtgggagttattgtcaatttgacagttgaagataaggatgaccccaccacaggtgcatggagggctgcctacaccatcatcaacggaaaccccgggcagagctttgaaatccacaccaaccctcaaaccaacgaagggatgctttctgttgtcaaaccattggactatgaaatttctgccttccacaccctgctgatcaaagtggaaaatgaagacccactcgtacccgacgtctcctacggccccagctccacagccaccgtccacatcactgtcctggatgtcaacgagggcccagtcttctacccagaccccatgatggtgaccaggcaggaggacctctctgtgggcagcgtgctgctgacagtgaatgccacggaccccgactccctgcagcatcaaaccatcaggtattctgtttacaaggacccagcaggttggctgaatattaaccccatcaatgggactgttgacaccacagctgtgctggaccgtgagtccccatttgtcgacaacagcgtgtacactgctctcttcctggcaattgacagtggcaaccctcccgctacgggcactgggactttgctgataaccctggaggacgtgaatgacaatgccccgttcatttaccccacagtagctgaagtctgtgatgatgccaaaaacctcagtgtagtcattttgggagcatcagataaggatcttcacccgaatacagatcctttcaaatttgaaatccacaaacaagctgttcctgataaagtctggaagatctccaagatcaacaatacacacgccctggtaagccttcttcaaaatctgaacaaagcaaactacaacctgcccatcatggtgacagattcagggaaaccacccatgacgaatatcacagatctcagggtacaagtgtgctcctgcaggaattccaaagtggactgcaacgcggcaggggccctgcgcttcagcctgccctcagtcctgctcctcagcctcttcagcttagcttgtctgtgagaactcctgacgtctgaagcttgactcccaagtttccatagcaacaggaaaaaaaaaaatctatccaaatctgaagattgcggtttacagctatcgaacttcacaactaggcctcaattgttccggttttttattttctttacaatttcacttagtctgtacttcatcattttgacagcatcttcctccctcctttaattaatggaatcttctgaattttccctgaatgtttaaagatcatgacatatgacttgatcttctgggagcaggaacaatgactactttttctggtgtgttaacatgtcgctagccagtgctccaggcacccagctttgtctgtgggttagtattggtgtatgtatgagtatctgtatgtatatatacacggtatttatagagagagactatcctggagaagcctcgttttgatgccattcttccttgcaaggttaagcaaggtgggtggaaactaagacacctgaaccctccagggcctcccgcatcaaggtcagcatgaggacagaccacagagctgtcacttttgctccgaagctacttctccactgtcccgttcagtctgaatgctgccacaaccagccaggcaggtccacagagagggagagcagagaaagaagtcctttctctttattgagttcgaggactacaaccaatttacactgccatctgatgccgtgatcctgagccaaggaggtgaggagcagagcaggcaatttcaccaccaaatgccaagaaaagggctgacattttctttcatgggcaccaacctgcatttgtatgtgtcccgaatccacagtcgtactgattctaatggggacacagatcatggtagagaatctctccctcctcagtaaatgtacaactgcacctgtcatcatggaggtcatacatgcatacaaagaggtgtacaggtaccatcttgtatacacatatatacccacatgtacagacatacatttatgcacattcacgctgtttgtttcatatatacaggcataaaatagagtaaatacaggtagttttaaaagtacccttttgtgtgaattgactaccgttgtttgcaaacccgaaaataaaagacgttcattatgtatgaaaagtaactgatttgtattctgtgagcatgtaaaagcggaaagttagtgcttgttctaagattaccttcttgttgataaaccataaatgaatcatcaaagctcacaccaaatttttctatcaaataaaactagtgacagcttgtggctttttattagagctcgccacgaactagggtaaggtgagtgtcttagcatattttaatgcagttgcttactaaaggttttaaccgcacatgcacacacacacgctttcttatgcaatctatgtttgcacttgtgctttcagttagccttctgtaggaagtagaagtcatatgttgtctttgttgtagtgaaattatacagatagagttccatatattgtatttgtttcaatggtaaatccttttggaacatatagaatgcagagatttttttttccattaaaataaatgggtattggtggttaaaactgctggacagt

SEQ ID NO: 112777 - DNA, 3564 bp, Homo sapiens
  Payload ID: 2067
  Gene Symbol: CDH13
  Gene Name: cadherin 13
  ENST ID: ENST00000622885
  CDS Start-End: 1-1986
tctcaggtgctgctgctaacatctgcagaagatttggactgcactcctggatttcagcagaaagtgttccatatcaatcagccagctgaattcattgaggaccagtcaattctaaacttgaccttcagtgactgtaagggaaacgacaagctacgctatgaggtctcgagcccatacttcaaggtgaacagcgatggcggcttagttgctctgagaaacataactgcagtgggcaaaactctgttcgtccatgcacggaccccccatgcggaagatatggcagaactcgtgattgtcggggggaaagacatccagggctccttgcaggtagtcgatagtgacaggccagaaaggtccaagttccggctcactggaaagggagtggatcaagagcctaaaggaattttcagaatcaatgagaacacagggagcgtctccgtgacacggaccttggacagagaagtaatcgctgtttatcaactatttgtggagaccactgatgtcaatggcaaaactctcgaggggccggtgcctctggaagtcattgtgattgatcagaatgacaaccgaccgatctttcgggaaggcccctacatcggccacgtcatggaagggtcacccacaggcaccacagtgatgcggatgacagcctttgatgcagatgacccagccaccgataatgccctcctgcggtataatatccgtcagcagacgcctgacaagccatctcccaacatgttctacatcgatcctgagaaaggagacattgtcactgttgtgtcacctgcgctgctggaccgagagactctggaaaatcccaagtatgaactgatcatcgaggctcaagatatggctggactggatgttggattaacaggcacggccacagccacgatcatgatcgatgacaaaaatgatcactcaccaaaattcaccaagaaagagtttcaagccacagtcgaggaaggagctgtgggagttattgtcaatttgacagttgaagataaggatgaccccaccacaggtgcatggagggctgcctacaccatcatcaacggaaaccccgggcagagctttgaaatccacaccaaccctcaaaccaacgaagggatgctttctgttgtcaaaccattggactatgaaatttctgccttccacaccctgctgatcaaagtggaaaatgaagacccactcgtacccgacgtctcctacggccccagctccacagccaccgtccacatcactgtcctggatgtcaacgagggcccagtcttctacccagaccccatgatggtgaccaggcaggaggacctctctgtgggcagcgtgctgctgacagtgaatgccacggaccccgactccctgcagcatcaaaccatcaggtattctgtttacaaggacccagcaggttggctgaatattaaccccatcaatgggactgttgacaccacagctgtgctggaccgtgagtccccatttgtcgacaacagcgtgtacactgctctcttcctggcaattgacagtggcaaccctcccgctacgggcactgggactttgctgataaccctggaggacgtgaatgacaatgccccgttcatttaccccacagtagctgaagtctgtgatgatgccaaaaacctcagtgtagtcattttgggagcatcagataaggatcttcacccgaatacagatcctttcaaatttgaaatccacaaacaagctgttcctgataaagtctggaagatctccaagatcaacaatacacacgccctggtaagccttcttcaaaatctgaacaaagcaaactacaacctgcccatcatggtgacagattcagggaaaccacccatgacgaatatcacagatctcagggtacaagtgtgctcctgcaggaattccaaagtggactgcaacgcggcaggggccctgcgcttcagcctgccctcagtcctgctcctcagcctcttcagcttagcttgtctgtgagaactcctgacgtctgaagcttgactcccaagtttccatagcaacaggaaaaaaaaaaatctatccaaatctgaagattgcggtttacagctatcgaacttcacaactaggcctcaattgttccggttttttattttctttacaatttcacttagtctgtacttcatcattttgacagcatcttcctccctcctttaattaatggaatcttctgaattttccctgaatgtttaaagatcatgacatatgacttgatcttctgggagcaggaacaatgactactttttctggtgtgttaacatgtcgctagccagtgctccaggcacccagctttgtctgtgggttagtattggtgtatgtatgagtatctgtatgtatatatacacggtatttatagagagagactatcctggagaagcctcgttttgatgccattcttccttgcaaggttaagcaaggtgggtggaaactaagacacctgaaccctccagggcctcccgcatcaaggtcagcatgaggacagaccacagagctgtcacttttgctccgaagctacttctccactgtcccgttcagtctgaatgctgccacaaccagccaggcaggtccacagagagggagagcagagaaagaagtcctttctctttattgagttcgaggactacaaccaatttacactgccatctgatgccgtgatcctgagccaaggaggtgaggagcagagcaggcaatttcaccaccaaatgccaagaaaagggctgacattttctttcatgggcaccaacctgcatttgtatgtgtcccgaatccacagtcgtactgattctaatggggacacagatcatggtagagaatctctccctcctcagtaaatgtacaactgcacctgtcatcatggaggtcatacatgcatacaaagaggtgtacaggtaccatcttgtatacacatatatacccacatgtacagacatacatttatgcacattcacgctgtttgtttcatatatacaggcataaaatagagtaaatacaggtagttttaaaagtacccttttgtgtgaattgactaccgttgtttgcaaacccgaaaataaaagacgttcattatgtatgaaaagtaactgatttgtattctgtgagcatgtaaaagcggaaagttagtgcttgttctaagattaccttcttgttgataaaccataaatgaatcatcaaagctcacaccaaatttttctatcaaataaaactagtgacagcttgtggctttttattagagctcgccacgaactagggtaaggtgagtgtcttagcatattttaatgcagttgcttactaaaggttttaaccgcacatgcacacacacacgctttcttatgcaatctatgtttgcacttgtgctttcagttagccttctgtaggaagtagaagtcatatgttgtctttgttgtagtgaaattatacagatagagttccatatattgtatttgtttcaatggtaaatccttttggaacatatagaatgcagagatttttttttccattaaaataaatgggtattggtggttaaaactgctggacagt

SEQ ID NO: 112778 - DNA, 2847 bp, Homo sapiens
  Payload ID: 2068
  Gene Symbol: CDH15
  Gene Name: cadherin 15, type 1, M-cadherin (myotubule)
  Uniprot ID: P55291
  ENST ID: ENST00000289746
  CDS Start-End: 66-2510
actcagcctggacgcgcttcttcgggtcgcgggtgcactccggcccggctcccgcctcggccccgatggacgccgcgttcctcctcgtcctcgggctgttggcccagagcctctgcctgtctttgggggttcctggatggaggaggcccaccaccctgtacccctggcgccgggcgcctgccctgagccgcgtgcggagggcctgggtcatccccccgatcagcgtatccgagaaccacaagcgtctcccctaccccctggttcagatcaagtcggacaagcagcagctgggcagcgtcatctacagcatccagggacccggcgtggatgaggagccccggggcgtcttctctatcgacaagttcacagggaaggtcttcctcaatgccatgctggaccgcgagaagactgatcgcttcaggctaagagcgtttgccctggacctgggaggatccaccctggaggaccccacggacctggagattgtagttgtggatcagaatgacaaccggccagccttcctgcaggaggcgttcactggccgcgtgctggagggtgcagtcccaggcacctatgtgaccagggcagaggccacagatgccgacgaccccgagacggacaacgcagcgctgcggttctccatcctgcagcagggcagccccgagctcttcagcatcgacgagctcacaggagagatccgcacagtgcaagtggggctggaccgcgaggtggtcgcggtgtacaatctgaccctgcaggtggcggacatgtctggagacggcctcacagccactgcctcagccatcatcacccttgatgacatcaatgacaatgcccccgagttcaccagggatgagttcttcatggaggccatagaggccgtcagcggagtggatgtgggacgcctggaagtggaggacagggacctgccaggctccccaaactgggtggccaggttcaccatcctggaaggcgaccccgatgggcagttcaccatccgcacggaccccaagaccaacgagggtgttctgtccattgtgaaggccctggactatgagagctgtgaacactacgaactcaaagtgtcggtgcagaatgaggccccgctgcaggcggctgcccttagggctgagcggggccaggccaaggtccgcgtgcatgtgcaggacaccaacgagccccccgtgttccaggagaacccacttcggaccagcctagcagagggggcacccccaggcactctggtggccaccttctctgcccgggaccctgacacagagcagctgcagaggctcagctactccaaggactacgacccggaagactggctgcaagtggacgcagccactggccggatccagacccagcacgtgctcagcccggcgtcccccttcctcaagggcggctggtacagagccatcgtcctggcccaggatgacgcctcccagccccgcaccgccaccggcaccctgtccatcgagatcctggaggtgaacgaccatgcacctgtgctggccccgccgccgccgggcagcctgtgcagcgagccacaccaaggcccaggcctcctcctgggcgccacggatgaggacctgcccccccacggggcccccttccacttccagctgagccccaggctcccagagctcggccggaactggagcctcagccaggtcaacgtgagccacgcgcgcctgcggccgcgacaccaggtccccgaaggcctgcaccgcctcagcctgctgctccgggactcggggcagccgccccagcagcgcgagcagcctctgaacgtgaccgtgtgccgctgcggcaaggacggcgtctgcctgccgggggccgcagcgctgctggcggggggcacaggcctcagcctgggcgcactggtcatcgtgctggccagcgccctcctgctgctggtgctggtcctgctcgtggcactccgggcgcggttctggaagcagtctcggggcaaggggctgctgcacggcccccaggacgaccttcgagacaatgtcctcaactacgatgagcaaggaggcggggaggaggaccaggacgcctacgacatcagccagctgcgtcacccgacagcgctgagcctgcctctgggaccgccgccacttcgcagagatgccccgcagggccgcctgcacccccagccaccccgagtgctgcccaccagccccctggacatcgccgacttcatcaatgatggcttggaggctgcagatagtgaccccagtgtgccgccttacgacacagccctcatctatgactacgagggtgacggctcggtggcggggacgctgagctccatcctgtccagccagggcgatgaggaccaggactacgactacctcagagactgggggccccgcttcgcccggctggcagacatgtatgggcacccgtgcgggttggagtacggggccagatgggaccaccaggccagggagggtctttctcctggggcactgctacccagacacagaggccggacagcctgaccctggggcgcaactggacatgccactccccggcctcgtggcagtgatggcccctgcagaggcagcctgaggtcaccgggcccgacccccctgggcctggggcagcctccttcctgtaggcgagggcccaagtctgggggcagaacctgagtgtggatggggcggccaggaagaggccccttcctgccggggtgggaagagtttctctccatcggccccatgcgggtcacctccctagtcccacctttgcctcctaccagtgaacctcatctttgtatgaaagacagcaacctcctgggtaaatctgaatgaaaaacgtgctagtctctttcatgca

SEQ ID NO: 112779 - DNA, 2954 bp, Homo sapiens
  Payload ID: 2069
  Gene Symbol: CDH16
  Gene Name: cadherin 16, KSP-cadherin
  Uniprot ID: O75309
  ENST ID: ENST00000299752
  CDS Start-End: 195-2684
aggcctgctgctgtgggcccagtggccttttccactcctgagcaagcgtggctgaaccctcctacctgctcaagtgccctgccttgccccacccagcccagcctggccagagccccctggagaaggagctctcttcttgcttggcagctggaccaagggagccagtcttgggcgctggagggcctgtcctgaccatggtccctgcctggctgtggctgctttgtgtctccgtcccccaggctctccccaaggcccagcctgcagagctgtctgtggaagttccagaaaactatggtggaaatttccctttatacctgaccaagttgccgctgccccgtgagggggctgaaggccagatcgtgctgtcaggggactcaggcaaggcaactgagggcccatttgctatggatccagattctggcttcctgctggtgaccagggccctggaccgagaggagcaggcagagtaccagctacaggtcaccctggagatgcaggatggacatgtcttgtggggtccacagcctgtgcttgtgcacgtgaaggatgagaatgaccaggtgccccatttctctcaagccatctacagagctcggctgagccggggtaccaggcctggcatccccttcctcttccttgaggcttcagaccgggatgagccaggcacagccaactcggatcttcgattccacatcctgagccaggctccagcccagccttccccagacatgttccagctggagcctcggctgggggctctggccctcagccccaaggggagcaccagccttgaccacgccctggagaggacctaccagctgttggtacaggtcaaggacatgggtgaccaggcctcaggccaccaggccactgccaccgtggaagtctccatcatagagagcacctgggtgtccctagagcctatccacctggcagagaatctcaaagtcctatacccgcaccacatggcccaggtacactggagtgggggtgatgtgcactatcacctggagagccatcccccgggaccctttgaagtgaatgcagagggaaacctctacgtgaccagagagctggacagagaagcccaggctgagtacctgctccaggtgcgggctcagaattcccatggcgaggactatgcggcccctctggagctgcacgtgctggtgatggatgagaatgacaacgtgcctatctgccctccccgtgaccccacagtcagcatccctgagctcagtccaccaggtactgaagtgactagactgtcagcagaggatgcagatgcccccggctcccccaattcccacgttgtgtatcagctcctgagccctgagcctgaggatggggtagaggggagagccttccaggtggaccccacttcaggcagtgtgacgctgggggtgctcccactccgagcaggccagaacatcctgcttctggtgctggccatggacctggcaggcgcagagggtggcttcagcagcacgtgtgaagtcgaagtcgcagtcacagatatcaatgatcacgcccctgagttcatcacttcccagattgggcctataagcctccctgaggatgtggagcccgggactctggtggccatgctaacagccattgatgctgacctcgagcccgccttccgcctcatggattttgccattgagaggggagacacagaagggacttttggcctggattgggagccagactctgggcatgttagactcagactctgcaagaacctcagttatgaggcagctccaagtcatgaggtggtggtggtggtgcagagtgtggcgaagctggtggggccaggcccaggccctggagccaccgccacggtgactgtgctagtggagagagtgatgccaccccccaagttggaccaggagagctacgaggccagtgtccccatcagtgccccagccggctctttcctgctgaccatccagccctccgaccccatcagccgaaccctcaggttctccctagtcaatgactcagagggctggctctgcattgagaaattctccggggaggtgcacaccgcccagtccctgcagggcgcccagcctggggacacctacacggtgcttgtggaggcccaggatacagatgagccgagactgagcgcttctgcacccctggtgatccacttcctaaaggcccctcctgccccagccctgactcttgcccctgtgccctcccaatacctctgcacaccccgccaagaccatggcttgatcgtgagtggacccagcaaggaccccgatctggccagtgggcacggtccctacagcttcacccttggtcccaaccccacggtgcaacgggattggcgcctccagactctcaatggttcccatgcctacctcaccttggccctgcattgggtggagccacgtgaacacataatccccgtggtggtcagccacaatgcccagatgtggcagctcctggttcgagtgatcgtgtgtcgctgcaacgtggaggggcagtgcatgcgcaaggtgggccgcatgaagggcatgcccacgaagctgtcggcagtgggcatccttgtaggcaccctggtagcaataggaatcttcctcatcctcattttcacccactggaccatgtcaaggaagaaggacccggatcaaccagcagacagcgtgcccctgaaggcgactgtctgaatggcccaggcagctctagctgggagcttggcctctggctccatctgagtcccctgggagagagcccagcacccaagatccagcaggggacaggacagagtagaagcccctccatctgccctggggtggaggcaccatcaccatcaccaggcatgtctgcagagcctggacaccaactttatggactgcccatgggagtgctccaaatgtcagggtgtttgcccaataataaagccccagagaactgggctgggccctatgggattggta

SEQ ID NO: 112780 - DNA, 2821 bp, Homo sapiens
  Payload ID: 2069
  Gene Symbol: CDH16
  Gene Name: cadherin 16, KSP-cadherin
  Uniprot ID: O75309
  ENST ID: ENST00000394055
  CDS Start-End: 128-2551
gctcaagtgccctgccttgccccacccagcccagcctggccagagccccctggagaaggagctctcttcttgcttggcagctggaccaagggagccagtcttgggcgctggagggcctgtcctgaccatggtccctgcctggctgtggctgctttgtgtctccgtcccccaggctctccccaaggcccagcctgcagagctgtctgtggaagttccagaaaactatggtggaaatttccctttatacctgaccaagttgccgctgccccgtgagggggctgaaggccagatcgtgctgtcaggggactcaggcaaggcaactgagggcccatttgctatggatccagattctggcttcctgctggtgaccagggccctggaccgagaggagcaggcagagtaccagctacaggtcaccctggagatgcaggatggacatgtcttgtggggtccacagcctgtgcttgtgcacgtgaaggatgagaatgaccaggtgccccatttctctcaagccatctacagagctcggctgagccggggtaccaggcctggcatccccttcctcttccttgaggcttcagaccgggatgagccaggcacagccaactcggatcttcgattccacatcctgagccaggctccagcccagccttccccagacatgttccagctggagcctcggctgggggctctggccctcagccccaaggggagcaccagccttgaccacgccctggagaggacctaccagctgttggtacaggtcaaggacatgggtgaccaggcctcaggccaccaggccactgccaccgtggaagtctccatcatagagagcacctgggtgtccctagagcctatccacctggcagagaatctcaaagtcctatacccgcaccacatggcccaggtacactggagtgggggtgatgtgcactatcacctggagagccatcccccgggaccctttgaagtgaatgcagagggaaacctctacgtgaccagagagctggacagagaagcccaggctgagtacctgctccaggtgcgggctcagaattcccatggcgaggactatgcggcccctctggagctgcacgtgctggtgatggatgagaatgacaacgtgcctatctgccctccccgtgaccccacagtcagcatccctgagctcagtccaccaggtactgaagtgactagactgtcagcagaggatgcagatgcccccggctcccccaattcccacgttgtgtatcagctcctgagccctgagcctgaggatggggtagaggggagagccttccaggtggaccccacttcaggcagtgtgacgctgggggtgctcccactccgagcaggccagaacatcctgcttctggtgctggccatggacctggcaggcgcagagggtggcttcagcagcacgtgtgaagtcgaagtcgcagtcacagatatcaatgatcacgcccctgagttcatcacttcccagattgggcctataagcctccctgaggatgtggagcccgggactctggtggccatgctaacagccattgatgctgacctcgagcccgccttccgcctcatggattttgccattgagaggggagacacagaagggacttttggcctggattgggagccagactctgggcatgttagactcagactctgcaagaacctcagttatgaggcagctccaagtcatgaggtggtggtggtggtgcagagtgtggcgaagctggtggggccaggcccaggccctggagccaccgccacggtgactgtgctagtggagagagtgatgccaccccccaagttggaccaggagagctacgaggccagtgtccccatcagtgccccagccggctctttcctgctgaccatccagccctccgaccccatcagccgaaccctcaggttctccctagtcaatgactcagagggctggctctgcattgagaaattctccggggaggtgcacaccgcccagtccctgcagggcgcccagcctggggacacctacacggtgcttgtggaggcccaggatacagccctgactcttgcccctgtgccctcccaatacctctgcacaccccgccaagaccatggcttgatcgtgagtggacccagcaaggaccccgatctggccagtgggcacggtccctacagcttcacccttggtcccaaccccacggtgcaacgggattggcgcctccagactctcaatggttcccatgcctacctcaccttggccctgcattgggtggagccacgtgaacacataatccccgtggtggtcagccacaatgcccagatgtggcagctcctggttcgagtgatcgtgtgtcgctgcaacgtggaggggcagtgcatgcgcaaggtgggccgcatgaagggcatgcccacgaagctgtcggcagtgggcatccttgtaggcaccctggtagcaataggaatcttcctcatcctcattttcacccactggaccatgtcaaggaagaaggacccggatcaaccagcagacagcgtgcccctgaaggcgactgtctgaatggcccaggcagctctagctgggagcttggcctctggctccatctgagtcccctgggagagagcccagcacccaagatccagcaggggacaggacagagtagaagcccctccatctgccctggggtggaggcaccatcaccatcaccaggcatgtctgcagagcctggacaccaactttatggactgcccatgggagtgctccaaatgtcagggtgtttgcccaataataaagccccagagaactgggctgggccctatgggattggta

SEQ ID NO: 112781 - DNA, 2694 bp, Homo sapiens
  Payload ID: 2069
  Gene Symbol: CDH16
  Gene Name: cadherin 16, KSP-cadherin
  Uniprot ID: O75309
  ENST ID: ENST00000565796
  CDS Start-End: 59-2431
ttgcttggcagctggaccaagggagccagtcttgggcgctggagggcctgtcctgaccatggtccctgcctggctgtggctgctttgtgtctccgtcccccaggctctccccaaggcccagcctgcagagctgtctgtggaagttccagaaaactatggtggaaatttccctttatacctgaccaagttgccgctgccccgtgagggggctgaaggccagatcgtgctgtcaggggactcaggcaaggcaactgagggcccatttgctatggatccagattctggcttcctgctggtgaccagggccctggaccgagaggagcaggcagagtaccagctacaggtcaccctggagatgcaggatggacatgtcttgtggggtccacagcctgtgcttgtgcacgtgaaggatgagaatgaccaggtgccccatttctctcaagccatctacagagctcggctgagccggggtaccaggcctggcatccccttcctcttccttgaggcttcagaccgggatgagccaggcacagccaactcggatcttcgattccacatcctgagccaggctccagcccagccttccccagacatgttccagctggagcctcggctgggggctctggccctcagccccaaggggagcaccagccttgaccacgccctggagaggacctaccagctgttggtacaggtcaaggacatgggtgaccaggcctcaggccaccaggccactgccaccgtggaagtctccatcatagagagcacctgggtgtccctagagcctatccacctggcagagaatctcaaagtcctatacccgcaccacatggcccaggtacactggagtgggggtgatgtgcactatcacctggagagccatcccccgggaccctttgaagtgaatgcagagggaaacctctacgtgaccagagagctggacagagaagcccaggctgagtacctgctccaggtgcgggctcagaattcccatggcgaggactatgcggcccctctggagctgcacgtgctggtgatggatgagaatgacaacgtgcctatctgccctccccgtgaccccacagtcagcatccctgagctcagtccaccaggtactgaagtgactagactgtcagcagaggatgcagatgcccccggctcccccaattcccacgttgtgtatcagctcctgagccctgagcctgaggatggggtagaggggagagccttccaggtggaccccacttcaggcagtgtgacgctgggggtgctcccactccgagcaggccagaacatcctgcttctggtgctggccatggacctggcaggcgcagagggtggcttcagcagcacgtgtgaagtcgaagtcgcagtcacagatatcaatgatcacgcccctgagttcatcacttcccagattgggcctataagcctccctgaggatgtggagcccgggactctggtggccatgctaacagccattgatgctgacctcgagcccgccttccgcctcatggattttgccattgagaggggagacacagaagggacttttggcctggattgggagccagactctgggcatgttagactcagactctgcaagaacctcagttatgaggcagctccaagtcatgaggtggtggtggtggtgcagagtgtggcgaagctggtggggccaggcccaggccctggagccaccgccacggtgactgtgctagtggagagagtgatgccaccccccaagttggaccaggagagctacgaggccagtgtccccatcagtgccccagccggctctttcctgctgaccatccagccctccgaccccatcagccgaaccctcaggttctccctagtcaatgactcagagggctggctctgcattgagaaattctccggggaggtgcacaccgcccagtccctgcagggcgcccagcctggggacacctacacggtgcttgtggaggcccaggatacagaccatggcttgatcgtgagtggacccagcaaggaccccgatctggccagtgggcacggtccctacagcttcacccttggtcccaaccccacggtgcaacgggattggcgcctccagactctcaatggttcccatgcctacctcaccttggccctgcattgggtggagccacgtgaacacataatccccgtggtggtcagccacaatgcccagatgtggcagctcctggttcgagtgatcgtgtgtcgctgcaacgtggaggggcagtgcatgcgcaaggtgggccgcatgaagggcatgcccacgaagctgtcggcagtgggcatccttgtaggcaccctggtagcaataggaatcttcctcatcctcattttcacccactggaccatgtcaaggaagaaggacccggatcaaccagcagacagcgtgcccctgaaggcgactgtctgaatggcccaggcagctctagctgggagcttggcctctggctccatctgagtcccctgggagagagcccagcacccaagatccagcaggggacaggacagagtagaagcccctccatctgccctggggtggaggcaccatcaccatcaccaggcatgtctgcagagcctggacaccaactttatggactgcccatgggagtgctccaaatgtcagggtgtttgcccaataataaagccccagagaactgggctgggccctatggg

SEQ ID NO: 112782 - DNA, 2526 bp, Homo sapiens
  Payload ID: 2069
  Gene Symbol: CDH16
  Gene Name: cadherin 16, KSP-cadherin
  Uniprot ID: O75309
  ENST ID: ENST00000568632
  CDS Start-End: 59-2257
ttgcttggcagctggaccaagggagccagtcttgggcgctggagggcctgtcctgaccatggtccctgcctggctgtggctgctttgtgtctccgtcccccaggctctccccaaggcccagcctgcagagctgtctgtggaagttccagaaaactatggtggaaatttccctttatacctgaccaagttgccgctgccccgtgagggggctgaaggccagatcgtgctgtcaggggactcaggcaaggcaactgagggcccatttgctatggatccagattctggcttcctgctggtgaccagggccctggaccgagaggagcaggcagagtaccagctacaggtcaccctggagatgcaggatggacatgtcttgtggggtccacagcctgtgcttgtgcacgtgaaggatgagaatgaccaggcctcaggccaccaggccactgccaccgtggaagtctccatcatagagagcacctgggtgtccctagagcctatccacctggcagagaatctcaaagtcctatacccgcaccacatggcccaggtacactggagtgggggtgatgtgcactatcacctggagagccatcccccgggaccctttgaagtgaatgcagagggaaacctctacgtgaccagagagctggacagagaagcccaggctgagtacctgctccaggtgcgggctcagaattcccatggcgaggactatgcggcccctctggagctgcacgtgctggtgatggatgagaatgacaacgtgcctatctgccctccccgtgaccccacagtcagcatccctgagctcagtccaccaggtactgaagtgactagactgtcagcagaggatgcagatgcccccggctcccccaattcccacgttgtgtatcagctcctgagccctgagcctgaggatggggtagaggggagagccttccaggtggaccccacttcaggcagtgtgacgctgggggtgctcccactccgagcaggccagaacatcctgcttctggtgctggccatggacctggcaggcgcagagggtggcttcagcagcacgtgtgaagtcgaagtcgcagtcacagatatcaatgatcacgcccctgagttcatcacttcccagattgggcctataagcctccctgaggatgtggagcccgggactctggtggccatgctaacagccattgatgctgacctcgagcccgccttccgcctcatggattttgccattgagaggggagacacagaagggacttttggcctggattgggagccagactctgggcatgttagactcagactctgcaagaacctcagttatgaggcagctccaagtcatgaggtggtggtggtggtgcagagtgtggcgaagctggtggggccaggcccaggccctggagccaccgccacggtgactgtgctagtggagagagtgatgccaccccccaagttggaccaggagagctacgaggccagtgtccccatcagtgccccagccggctctttcctgctgaccatccagccctccgaccccatcagccgaaccctcaggttctccctagtcaatgactcagagggctggctctgcattgagaaattctccggggaggtgcacaccgcccagtccctgcagggcgcccagcctggggacacctacacggtgcttgtggaggcccaggatacagatgagccgagactgagcgcttctgcacccctggtgatccacttcctaaaggcccctcctgccccagccctgactcttgcccctgtgccctcccaatacctctgcacaccccgccaagaccatggcttgatcgtgagtggacccagcaaggaccccgatctggccagtgggcacggtccctacagcttcacccttggtcccaaccccacggtgcaacgggattggcgcctccagactctcaatggttcccatgcctacctcaccttggccctgcattgggtggagccacgtgaacacataatccccgtggtggtcagccacaatgcccagatgtggcagctcctggttcgagtgatcgtgtgtcgctgcaacgtggaggggcagtgcatgcgcaaggtgggccgcatgaagggcatgcccacgaagctgtcggcagtgggcatccttgtaggcaccctggtagcaataggaatcttcctcatcctcattttcacccactggaccatgtcaaggaagaaggacccggatcaaccagcagacagcgtgcccctgaaggcgactgtctgaatggcccaggcagctctagctgggagcttggcctctggctccatctgagtcccctgggagagagcccagcacccaagatccagcaggggacaggacagagtagaagcccctccatctgccctggggtggaggcaccatcaccatcaccaggcatgtctgcagagcctggacaccaactttatggactgcccatgggagtgctccaaatgtcagggtgtttgcccaataataaagccccagagaactgggctgggccctatgggattggt

SEQ ID NO: 112783 - DNA, 3539 bp, Homo sapiens
  Payload ID: 2069
  Gene Symbol: CDH16
  Gene Name: cadherin 16, KSP-cadherin
  ENST ID: ENST00000567269
  CDS Start-End: 95-622
gcctggccagagccccctggagaaggagctctcttcttgcttggcagctggaccaagggagccagtcttgggcgctggagggcctgtcctgaccatggtccctgcctggctgtggctgctttgtgtctccgtcccccaggctctccccaaggcccagcctgcagagctgtctgtggaagttccagaaaactatggtggaaatttccctttatacctgaccaagttgccgctgccccgtgagggggctgaaggccagatcgtgctgtcaggggactcaggcaaggcaactgagggcccatttgctatggatccagattctggcttcctgctggtgaccagggccctggaccgagaggagcaggcagagtaccagctacaggtcaccctggagatgcaggatggacatgtcttgtggggtccacagcctgtgcttgtgcacgtgaaggatgagaatgaccaggtgccccatttctctcaagccatctacagagctcggctgagccggggtaccaggcctgtttgccctcccaccgtgaaccaggcatccccttcctcttccttgaggcttcagaccgggatgagccaggcacagccaactcggatcttcgattccacatcctgagccaggctccagcccagccttccccagacatgttccagctggagcctcggctgggggctctggccctcagccccaaggccttgaccacgccctggagaggacctaccagctgttggtacaggtcaaggacatgggtgaccaggcctcaggccaccaggccactgccaccgtggaagtctccatcatagagagcacctgggtgtccctagagcctatccacctggcagagaatctcaaagtcctatacccgcaccacatggcccaggtacactggagtgggggtgatgtgcactatcacctggagagccatcccccgggaccctttgaagtgaatgcagagggaaacctctacgtgaccagagagctggacagagaagcccaggctgagtacctgctccaggtgcgggctcagaattcccatggcgaggactatgcggcccctctggagctgcacgtgctggtgatggatgagaatgacaacgtgcctatctgccctccccgtgaccccacagtcagcatccctgagctcagtccaccaggtactgaagtgactagactgtcagcagaggatgcagatgcccccggctcccccaattcccacgttgtgtatcagctcctgagccctgagcctgaggatggggtagaggggagagccttccaggtggaccccacttcaggcagtgtgacgctgggggtgctcccactccgagcaggccagaacatcctgcttctggtgctggccatggacctggcaggcgcagagggtggcttcagcagcacgtgtgaagtcgaagtcgcagtcacagatatcaatgatcacgcccctgagttcatcacttcccagattgggcctataagcctccctgaggatgtggagcccgggactctggtggccatgctaacagccattgatgctgacctcgagcccgccttccgcctcatggattttgccattgagaggggagacacagaagggacttttggcctggattgggagccagactctgggcatgttagactcagactctgcaagaacctcagttatgaggcagctccaagtcatgaggtggtggtggtggtgcagagtgtggcgaagctggtggggccaggcccaggccctggagccaccgccacggtgactgtgctagtggagagagtgatgccaccccccaagttggaccaggagagctacgaggccagtgtccccatcagtgccccagccggctctttcctgctgaccatccagccctccgaccccatcagccgaaccctcaggttctccctagtcaatgactcagagggctggctctgcattgagaaattctccggggaggtgcacaccgcccagtccctgcagggcgcccagcctggggacacctacacggtgcttgtggaggcccaggatacaggtatggccaggcagtgatgggagcccctgggagggggtacaaacctcagacagacagacagcaggactgagcttcctcccagaggccctcactggcaacccccagccccaagcaggagaggcagatatgaagctgggttcaatgttcctctctgagaatggatctactcctccggtgggcaagtctggcatctgcctcccctctctgatcattctcctagattgacacacaaaatctcccagccctgtcctttagccactggagggcctctcagggtgtcagcttcagggactggtatagggccggggaggtggcaggaggaccaggggctgcccctggggaaggagtgctggagtgaatgggccactggagccaggtgtggaggacactgaacactgctcaggacagagagctggccctggggtggggagccccgggaggcaggtttcaactctgagctgggctgtgatacagggcagacccagcagcagtgagctccgccaaagtcagggatgtccacagtggcatggggatgatgacaggtggagagaagcatggagggagcatggcaggggagtctataaggcgaggctcatgggctgcgggagcagcccagggacctcagagctcaccctccccctggcaacacctggccagctcagcactgcctcctctgcagatgagccgagactgagcgcttctgcacccctggtgatccacttcctaaaggcccctcctgccccagccctgactcttgcccctgtgccctcccaatacctctgcacaccccgccaagaccatggcttgatcgtgagtggacccagcaaggaccccgatctggccagtgggcacggtccctacagcttcacccttggtcccaaccccacggtgcaacgggattggcgcctccagactctcaatggttcccatgcctacctcaccttggccctgcattgggtggagccacgtgaacacataatccccgtggtggtcagccacaatgcccagatgtggcagctcctggttcgagtgatcgtgtgtcgctgcaacgtggaggggcagtgcatgcgcaaggtgggccgcatgaagggcatgcccacgaagctgtcggcagtgggcatccttgtaggcaccctggtagcaataggaatcttcctcatcctcattttcacccactggaccatgtcaaggaagaaggacccggatcaaccagcagacagcgtgcccctgaaggcgactgtctgaatggcccaggcagctctagctgggagcttggcctctggctccatctgagtcccctgggagagagcccagcacccaagatccagcaggggacaggacagagtagaagcccctccatctgccctggggtggaggcaccatcaccatcaccaggcatgtctgcagagcctggacaccaactttatggactgcccatgggagtgctccaaatgtcagggtgtttgcccaataataaagccccagagaactgggctgggccctatggg

SEQ ID NO: 112784 - DNA, 2604 bp, Homo sapiens
  Payload ID: 2069
  Gene Symbol: CDH16
  Gene Name: cadherin 16, KSP-cadherin
  ENST ID: ENST00000570262
  CDS Start-End: 87-2336
agagccccctggagaaggagctctcttcttgcttggcagctggaccaagggagccagtcttgggcgctggagggcctgtcctgaccatggtccctgcctggctgtggctgctttgtgtctccgtcccccaggtcaccctggagatgcaggatggacatgtcttgtggggtccacagcctgtgcttgtgcacgtgaaggatgagaatgaccaggtgccccatttctctcaagccatctacagagctcggctgagccggggtaccaggcctggcatccccttcctcttccttgaggcttcagaccgggatgagccaggcacagccaactcggatcttcgattccacatcctgagccaggctccagcccagccttccccagacatgttccagctggagcctcggctgggggctctggccctcagccccaaggggagcaccagccttgaccacgccctggagaggacctaccagctgttggtacaggtcaaggacatgggtgaccaggcctcaggccaccaggccactgccaccgtggaagtctccatcatagagagcacctgggtgtccctagagcctatccacctggcagagaatctcaaagtcctatacccgcaccacatggcccaggtacactggagtgggggtgatgtgcactatcacctggagagccatcccccgggaccctttgaagtgaatgcagagggaaacctctacgtgaccagagagctggacagagaagcccaggctgagtacctgctccaggtgcgggctcagaattcccatggcgaggactatgcggcccctctggagctgcacgtgctggtgatggatgagaatgacaacgtgcctatctgccctccccgtgaccccacagtcagcatccctgagctcagtccaccaggtactgaagtgactagactgtcagcagaggatgcagatgcccccggctcccccaattcccacgttgtgtatcagctcctgagccctgagcctgaggatggggtagaggggagagccttccaggtggaccccacttcaggcagtgtgacgctgggggtgctcccactccgagcaggccagaacatcctgcttctggtgctggccatggacctggcaggcgcagagggtggcttcagcagcacgtgtgaagtcgaagtcgcagtcacagatatcaatgatcacgcccctgagttcatcacttcccagattgggcctataagcctccctgaggatgtggagcccgggactctggtggccatgctaacagccattgatgctgacctcgagcccgccttccgcctcatggattttgccattgagaggggagacacagaagggacttttggcctggattgggagccagactctgggcatgttagactcagactctgcaagaacctcagttatgaggcagctccaagtcatgaggtggtggtggtggtgcagagtgtggcgaagctggtggggccaggcccaggccctggagccaccgccacggtgactgtgctagtggagagagtgatgccaccccccaagttggaccaggagagctacgaggccagtgtccccatcagtgccccagccggctctttcctgctgaccatccagccctccgaccccatcagccgaaccctcaggttctccctagtcaatgactcagagggctggctctgcattgagaaattctccggggaggtgcacaccgcccagtccctgcagggcgcccagcctggggacacctacacggtgcttgtggaggcccaggatacagatgagccgagactgagcgcttctgcacccctggtgatccacttcctaaaggcccctcctgccccagccctgactcttgcccctgtgccctcccaatacctctgcacaccccgccaagaccatggcttgatcgtgagtggacccagcaaggaccccgatctggccagtgggcacggtccctacagcttcacccttggtcccaaccccacggtgcaacgggattggcgcctccagactctcaatggttcccatgcctacctcaccttggccctgcattgggtggagccacgtgaacacataatccccgtggtggtcagccacaatgcccagatgtggcagctcctggttcgagtgatcgtgtgtcgctgcaacgtggaggggcagtgcatgcgcaaggtgggccgcatgaagggcatgcccacgaagctgtcggcagtgggcatccttgtaggcaccctggtagcaataggaatcttcctcatcctcattttcacccactggaccatgtcaaggaagaaggacccggatcaaccagcagacagcgtgcccctgaaggcgactgtctgaatggcccaggcagctctagctgggagcttggcctctggctccatctgagtcccctgggagagagcccagcacccaagatccagcaggggacaggacagagtagaagcccctccatctgccctggggtggaggcaccatcaccatcaccaggcatgtctgcagagcctggacaccaactttatggactgcccatgggagtgctccaaatgtcagggtgtttgcccaataataaagccccagagaactgggctgggccctatgggattgg

SEQ ID NO: 112785 - DNA, 2026 bp, Homo sapiens
  Payload ID: 2069
  Gene Symbol: CDH16
  Gene Name: cadherin 16, KSP-cadherin
  ENST ID: ENST00000568698
  CDS Start-End: 63-809
cttcttgcttggcagctggaccaagggagccagtcttgggcgctggagggcctgtcctgaccatggtccctgcctggctgtggctgctttgtgtctccgtcccccaggctctccccaaggcccagcctgcagagctgtctgtggaagttccagaaaactatggtggaaatttccctttatacctgaccaagttgccgctgccccgtgagggggctgaaggccagatcgtgctgtcaggggactcaggcaaggcaactgagggcccatttgctatggatccagattctggcttcctgctggtgaccagggccctggaccgagaggagcaggcagagtaccagctacaggtcaccctggagatgcaggatggacatgtcttgtggggtccacagcctgtgcttgtgcacgtgaaggatgagaatgaccaggtgccccatttctctcaagccatctacagagctcggctgagccggggtaccaggcctggcatccccttcctcttccttgaggcttcagaccgggatgagccaggcacagccaactcggatcttcgattccacatcctgagccaggctccagcccagccttccccagacatgttccagctggagcctcggctgggggctctggccctcagccccaaggggagcaccagccttgaccacgccctggagaggacctaccagctgttggtacaggtcaaggacatgggtgaccaggcctcaggccaccaggccactgccaccgtggaagggagacacagaagggacttttggcctggattgggagccagactctgggcatgttagactcagactctgcaagaacctcagttatgaggcagctccaagtcatgaggtggtggtggtggtgcagagtgtggcgaagctggtggggccaggcccaggccctggagccaccgccacggtgactgtgctagtggagagagtgatgccaccccccaagttggaccaggagagctacgaggccagtgtccccatcagtgccccagccggctctttcctgctgaccatccagccctccgaccccatcagccgaaccctcaggttctccctagtcaatgactcagagggctggctctgcattgagaaattctccggggaggtgcacaccgcccagtccctgcagggcgcccagcctggggacacctacacggtgcttgtggaggcccaggatacagatgagccgagactgagcgcttctgcacccctggtgatccacttcctaaaggcccctcctgccccagccctgactcttgcccctgtgccctcccaatacctctgcacaccccgccaagaccatggcttgatcgtgagtggacccagcaaggaccccgatctggccagtgggcacggtccctacagcttcacccttggtcccaaccccacggtgcaacgggattggcgcctccagactctcaatggttcccatgcctacctcaccttggccctgcattgggtggagccacgtgaacacataatccccgtggtggtcagccacaatgcccagatgtggcagctcctggttcgagtgatcgtgtgtcgctgcaacgtggaggggcagtgcatgcgcaaggtgggccgcatgaagggcatgcccacgaagctgtcggcagtgggcatccttgtaggcaccctggtagcaataggaatcttcctcatcctcattttcacccactggaccatgtcaaggaagaaggacccggatcaaccagcagacagcgtgcccctgaaggcgactgtctgaatggcccaggcagctctagctgggagcttggcctctggctccatctgagtcccctgggagagagcccagcacccaagatccagcaggggacaggacagagtagaagcccctccatctgccctggggtggaggcaccatcaccatcaccaggcatgtctgcagagcctggacaccaactttatggactgcccatgggagtgctccaaatgtcagggtgtttgcccaataataaagccccagagaactgggctgggcccta

SEQ ID NO: 112786 - DNA, 715 bp, Homo sapiens
  Payload ID: 2069
  Gene Symbol: CDH16
  Gene Name: cadherin 16, KSP-cadherin
  ENST ID: ENST00000567009
  CDS Start-End: 1-715
atcgtgctgtcaggggactcaggcaaggcaactgagggcccatttgctatggatccagattctggcttcctgctggtgaccagggccctggaccgagaggagcaggcagagtaccagctacaggtcaccctggagatgcaggatggacatgtcttgtggggtccacagcctgtgcttgtgcacgtgaaggatgagaatgaccaggtgccccatttctctcaagccatctacagagctcggctgagccggggtaccaggcctggcatccccttcctcttccttgaggcttcagaccgggatgagccaggcacagccaactcggatcttcgattccacatcctgagccaggctccagcccagccttccccagacatgttccagctggagcctcggctgggggctctggccctcagccccaaggggagcaccagccttgaccacgccctggagaggacctaccagctgttggtacaggtcaaggacatgggtgaccaggcctcaggccaccaggccactgccaccgtggaagtctccatcatagagagcacctgggtgtccctagagcctatccacctggcagagaatctcaaagtcctatacccgcaccacatggcccagtacctgctccaggtgcgggctcagaattcccatggcgaggactatgcggcccctctggagctgcacgtgctggtgatggatgagaatgacaacgtgc

SEQ ID NO: 112787 - DNA, 582 bp, Homo sapiens
  Payload ID: 2069
  Gene Symbol: CDH16
  Gene Name: cadherin 16, KSP-cadherin
  ENST ID: ENST00000565235
  CDS Start-End: 210-582
tgcttggcagctggaccaagggagccagtcttgggcgctggagggctctccccaaggcccagcctgcagagctgtctgtggaagttccagaaaactatggtggaaatttccctttatacctgaccaagttgccgctgccccgtgagggggctgaaggccagatcgtgctgtcaggggactcaggcaaggcaactgagggcccatttgctatggatccagattctggcttcctgctggtgaccagggccctggaccgagaggagcaggcagagtaccagctacaggtcaccctggagatgcaggatggacatgtcttgtggggtccacagcctgtgcttgtgcacgtgaaggatgagaatgaccaggtgccccatttctctcaagccatctacagagctcggctgagccggggtaccaggcctggcatccccttcctcttccttgaggcttcagaccgggatgagccaggcacagccaactcggatcttcgattccacatcctgagccaggctccagcccagccttccccagacatgttccagctggagcctcggctgggggctctggccctcagccccaagg

SEQ ID NO: 112788 - DNA, 3693 bp, Homo sapiens
  Payload ID: 2070
  Gene Symbol: CDH17
  Gene Name: cadherin 17, LI cadherin (liver-intestine)
  Uniprot ID: Q12864
  ENST ID: ENST00000027335
  CDS Start-End: 126-2624
ggaagagggagtgttcccgggggagatactccagtcgtagcaagagtctcgaccactgaatggaagaaaaggacttttaaccaccattttgtgacttacagaaaggaatttgaataaagaaaactatgatacttcaggcccatcttcactccctgtgtcttcttatgctttatttggcaactggatatggccaagaggggaagtttagtggacccctgaaacccatgacattttctatttatgaaggccaagaaccgagtcaaattatattccagtttaaggccaatcctcctgctgtgacttttgaactaactggggagacagacaacatatttgtgatagaacgggagggacttctgtattacaacagagccttggacagggaaacaagatctactcacaatctccaggttgcagccctggacgctaatggaattatagtggagggtccagtccctatcaccataaaagtgaaggacatcaacgacaatcgacccacgtttctccagtcaaagtacgaaggctcagtaaggcagaactctcgcccaggaaagcccttcttgtatgtcaatgccacagacctggatgatccggccactcccaatggccagctttattaccagattgtcatccagcttcccatgatcaacaatgtcatgtactttcagatcaacaacaaaacgggagccatctctcttacccgagagggatctcaggaattgaatcctgctaagaatccttcctataatctggtgatctcagtgaaggacatgggaggccagagtgagaattccttcagtgataccacatctgtggatatcatagtgacagagaatatttggaaagcaccaaaacctgtggagatggtggaaaactcaactgatcctcaccccatcaaaatcactcaggtgcggtggaatgatcccggtgcacaatattccttagttgacaaagagaagctgccaagattcccattttcaattgaccaggaaggagatatttacgtgactcagcccttggaccgagaagaaaaggatgcatatgttttttatgcagttgcaaaggatgagtacggaaaaccactttcatatccgctggaaattcatgtaaaagttaaagatattaatgataatccacctacatgtccgtcaccagtaaccgtatttgaggtccaggagaatgaacgactgggtaacagtatcgggacccttactgcacatgacagggatgaagaaaatactgccaacagttttctaaactacaggattgtggagcaaactcccaaacttcccatggatggactcttcctaatccaaacctatgctggaatgttacagttagctaaacagtccttgaagaagcaagatactcctcagtacaacttaacgatagaggtgtctgacaaagatttcaagaccctttgttttgtgcaaatcaacgttattgatatcaatgatcagatccccatctttgaaaaatcagattatggaaacctgactcttgctgaagacacaaacattgggtccaccatcttaaccatccaggccactgatgctgatgagccatttactgggagttctaaaattctgtatcatatcataaagggagacagtgagggacgcctgggggttgacacagatccccataccaacaccggatatgtcataattaaaaagcctcttgattttgaaacagcagctgtttccaacattgtgttcaaagcagaaaatcctgagcctctagtgtttggtgtgaagtacaatgcaagttcttttgccaagttcacgcttattgtgacagatgtgaatgaagcacctcaattttcccaacacgtattccaagcgaaagtcagtgaggatgtagctataggcactaaagtgggcaatgtgactgccaaggatccagaaggtctggacataagctattcactgaggggagacacaagaggttggcttaaaattgaccacgtgactggtgagatctttagtgtggctccattggacagagaagccggaagtccatatcgggtacaagtggtggccacagaagtaggggggtcttccttgagctctgtgtcagagttccacctgatccttatggatgtgaatgacaaccctcccaggctagccaaggactacacgggcttgttcttctgccatcccctcagtgcacctggaagtctcattttcgaggctactgatgatgatcagcacttatttcggggtccccattttacattttccctcggcagtggaagcttacaaaacgactgggaagtttccaaaatcaatggtactcatgcccgactgtctaccaggcacacagagtttgaggagagggagtatgtcgtcttgatccgcatcaatgatgggggtcggccacccttggaaggcattgtttctttaccagttacattctgcagttgtgtggaaggaagttgtttccggccagcaggtcaccagactgggatacccactgtgggcatggcagttggtatactgctgaccacccttctggtgattggtataattttagcagttgtgtttatccgcataaagaaggataaaggcaaagataatgttgaaagtgctcaagcatctgaagtcaaacctctgagaagctgaatttgaaaaggaatgtttgaatttatatagcaagtgctatttcagcaacaaccatctcatcctattacttttcatctaacgtgcattataattttttaaacagatattccctcttgtcctttaatatttgctaaatatttcttttttgaggtggagtcttgctctgtcgcccaggctggagtacagtggtgtgatcccagctcactgcaacctccgcctcctgggttcacatgattctcctgcctcagcttcctaagtagctgggtttacaggcacccaccaccatgcccagctaatttttgtatttttaatagagacggggtttcgccatttggccaggctggtcttgaactcctgacgtcaagtgatctgcctgccttggtctcccaatacaggcatgaaccactgcacccacctacttagatatttcatgtgctatagacattagagagatttttcatttttccatgacatttttcctctctgcaaatggcttagctacttgtgtttttcccttttggggcaagacagactcattaaatattctgtacattttttctttatcaaggagatatatcagtgttgtctcatagaactgcctggattccatttatgttttttctgattccatcctgtgtccccttcatccttgactcctttggtatttcactgaatttcaaacatttgtcagagaagaaaaacgtgaggactcaggaaaaataaataaataaaagaacagccttttcccttagtattaacagaaatgtttctgtgtcattaaccatctttaatcaatgtgacatgttgctctttggctgaaattcttcaacttggaaatgacacagacccacagaaggtgttcaaacacaacctactctgcaaaccttggtaaaggaaccagtcagctggccagatttcctcactacctgccatgcatacatgctgcgcatgttttcttcattcgtatgttagtaaagttttggttattatatatttaacatgtggaagaaaacaagacatgaaaagagtggtgacaaatcaagaataaacactggttgtagtcagtttt

SEQ ID NO: 112789 - DNA, 2204 bp, Homo sapiens
  Payload ID: 2070
  Gene Symbol: CDH17
  Gene Name: cadherin 17, LI cadherin (liver-intestine)
  ENST ID: ENST00000441892
  CDS Start-End: 94-1836
agtcgtagcaagagtctcgaccactgaatggaagaaaaggacttttaaccaccattttgtgacttacagaaaggaatttgaataaagaaaactatgatacttcaggcccatcttcactccctgtgtcttcttatgctttatttggcaactggatatggccaagaggggaagtttagtggacccctgaaacccatgacattttctatttatgaaggccaagaaccgagtcaaattatattccagtttaaggccaatcctcctgctgtgacttttgaactaactggggagacagacaacatatttgtgatagaacgggagggacttctgtattacaacagagccttggacagggaaacaagatctactcacaatctccaggttgcagccctggacgctaatggaattatagtggagggtccagtccctatcaccataaaagtgaaggacatcaacgacaatcgacccacgtttctccagtcaaagtacgaaggctcagtaaggcagaactctcgcccaggtaacagtatcgggacccttactgcacatgacagggatgaagaaaatactgccaacagttttctaaactacaggattgtggagcaaactcccaaacttcccatggatggactcttcctaatccaaacctatgctggaatgttacagttagctaaacagtccttgaagaagcaagatactcctcagtacaacttaacgatagaggtgtctgacaaagatttcaagaccctttgttttgtgcaaatcaacgttattgatatcaatgatcagatccccatctttgaaaaatcagattatggaaacctgactcttgctgaagacacaaacattgggtccaccatcttaaccatccaggccactgatgctgatgagccatttactgggagttctaaaattctgtatcatatcataaagggagacagtgagggacgcctgggggttgacacagatccccataccaacaccggatatgtcataattaaaaagcctcttgattttgaaacagcagctgtttccaacattgtgttcaaagcagaaaatcctgagcctctagtgtttggtgtgaagtacaatgcaagttcttttgccaagttcacgcttattgtgacagatgtgaatgaagcacctcaattttcccaacacgtattccaagcgaaagtcagtgaggatgtagctataggcactaaagtgggcaatgtgactgccaaggatccagaaggtctggacataagctattcactgaggggagacacaagaggttggcttaaaattgaccacgtgactggtgagatctttagtgtggctccattggacagagaagccggaagtccatatcgggtacaagtggtggccacagaagtaggggggtcttccttgagctctgtgtcagagttccacctgatccttatggatgtgaatgacaaccctcccaggctagccaaggactacacgggcttgttcttctgccatcccctcagtgcacctggaagtctcattttcgaggctactgatgatgatcagcacttatttcggggtccccattttacattttccctcggcagtggaagcttacaaaacgactgggaagtttccaaaatcaatggtactcatgcccgactgtctaccaggcacacagagtttgaggagagggagtatgtcgtcttgatccgcatcaatgatgggggtcggccacccttggaaggcattgtttctttaccaggtataattttagcagttgtgtttatccgcataaagaaggataaaggcaaagataatgttgaaagtgctcaagcatctgaagtcaaacctctgagaagctgaatttgaaaaggaatgtttgaatttatatagcaagtgctatttcagcaacaaccatctcatcctattacttttcatctaacgtgcattataattttttaaacagatattccctcttgtcctttaatatttgctaaatatttcttttttgaggtggagtcttgctctgtcgcccaggctggagtacagtggtgtgatcccagctcactgcaacctccgcctcctgggttcacatgattctcctgcctcagcttcctaagtagctgggtttacaggcacccaccaccatgcccagctaatttttgtatttttaatagagacggggtttcgccatttggccaggctggtcttgaactcctgacgtcaagtga

SEQ ID NO: 112790 - DNA, 2625 bp, Homo sapiens
  Payload ID: 2070
  Gene Symbol: CDH17
  Gene Name: cadherin 17, LI cadherin (liver-intestine)
  Uniprot ID: Q12864
  ENST ID: ENST00000450165
  CDS Start-End: 127-2625
aatcacggtggaagtatgatattttggctgtggatctgagttgatcaatctgcttagtggacttgagtccccccacccccgcttgtctgattggggctcctgggaggaatttgaataaagaaaactatgatacttcaggcccatcttcactccctgtgtcttcttatgctttatttggcaactggatatggccaagaggggaagtttagtggacccctgaaacccatgacattttctatttatgaaggccaagaaccgagtcaaattatattccagtttaaggccaatcctcctgctgtgacttttgaactaactggggagacagacaacatatttgtgatagaacgggagggacttctgtattacaacagagccttggacagggaaacaagatctactcacaatctccaggttgcagccctggacgctaatggaattatagtggagggtccagtccctatcaccataaaagtgaaggacatcaacgacaatcgacccacgtttctccagtcaaagtacgaaggctcagtaaggcagaactctcgcccaggaaagcccttcttgtatgtcaatgccacagacctggatgatccggccactcccaatggccagctttattaccagattgtcatccagcttcccatgatcaacaatgtcatgtactttcagatcaacaacaaaacgggagccatctctcttacccgagagggatctcaggaattgaatcctgctaagaatccttcctataatctggtgatctcagtgaaggacatgggaggccagagtgagaattccttcagtgataccacatctgtggatatcatagtgacagagaatatttggaaagcaccaaaacctgtggagatggtggaaaactcaactgatcctcaccccatcaaaatcactcaggtgcggtggaatgatcccggtgcacaatattccttagttgacaaagagaagctgccaagattcccattttcaattgaccaggaaggagatatttacgtgactcagcccttggaccgagaagaaaaggatgcatatgttttttatgcagttgcaaaggatgagtacggaaaaccactttcatatccgctggaaattcatgtaaaagttaaagatattaatgataatccacctacatgtccgtcaccagtaaccgtatttgaggtccaggagaatgaacgactgggtaacagtatcgggacccttactgcacatgacagggatgaagaaaatactgccaacagttttctaaactacaggattgtggagcaaactcccaaacttcccatggatggactcttcctaatccaaacctatgctggaatgttacagttagctaaacagtccttgaagaagcaagatactcctcagtacaacttaacgatagaggtgtctgacaaagatttcaagaccctttgttttgtgcaaatcaacgttattgatatcaatgatcagatccccatctttgaaaaatcagattatggaaacctgactcttgctgaagacacaaacattgggtccaccatcttaaccatccaggccactgatgctgatgagccatttactgggagttctaaaattctgtatcatatcataaagggagacagtgagggacgcctgggggttgacacagatccccataccaacaccggatatgtcataattaaaaagcctcttgattttgaaacagcagctgtttccaacattgtgttcaaagcagaaaatcctgagcctctagtgtttggtgtgaagtacaatgcaagttcttttgccaagttcacgcttattgtgacagatgtgaatgaagcacctcaattttcccaacacgtattccaagcgaaagtcagtgaggatgtagctataggcactaaagtgggcaatgtgactgccaaggatccagaaggtctggacataagctattcactgaggggagacacaagaggttggcttaaaattgaccacgtgactggtgagatctttagtgtggctccattggacagagaagccggaagtccatatcgggtacaagtggtggccacagaagtaggggggtcttccttgagctctgtgtcagagttccacctgatccttatggatgtgaatgacaaccctcccaggctagccaaggactacacgggcttgttcttctgccatcccctcagtgcacctggaagtctcattttcgaggctactgatgatgatcagcacttatttcggggtccccattttacattttccctcggcagtggaagcttacaaaacgactgggaagtttccaaaatcaatggtactcatgcccgactgtctaccaggcacacagagtttgaggagagggagtatgtcgtcttgatccgcatcaatgatgggggtcggccacccttggaaggcattgtttctttaccagttacattctgcagttgtgtggaaggaagttgtttccggccagcaggtcaccagactgggatacccactgtgggcatggcagttggtatactgctgaccacccttctggtgattggtataattttagcagttgtgtttatccgcataaagaaggataaaggcaaagataatgttgaaagtgctcaagcatctgaagtcaaacctctgagaagctga

SEQ ID NO: 112791 - DNA, 637 bp, Homo sapiens
  Payload ID: 2070
  Gene Symbol: CDH17
  Gene Name: cadherin 17, LI cadherin (liver-intestine)
  ENST ID: ENST00000521491
  CDS Start-End: 196-637
agtcgtagcaagagtctcgaccactgaatggaagaaaaggacttttaaccaccattttgtgacttacagaaagggtctcgctctgtcacccaggctgcagtgcagtggcgcaatcatggctggctgcaacctctgcctcctgggctcaagtgatcctcccacctcagcctcccaggaatttgaataaagaaaactatgatacttcaggcccatcttcactccctgtgtcttcttatgctttatttggcaactggatatggccaagaggggaagtttagtggacccctgaaacccatgacattttctatttatgaaggccaagaaccgagtcaaattatattccagtttaaggccaatcctcctgctgtgacttttgaactaactggggagacagacaacatatttgtgatagaacgggagggacttctgtattacaacagagccttggacagggaaacaagatctactcacaatctccaggttgcagccctggacgctaatggaattatagtggagggtccagtccctatcaccataaaagtgaaggacatcaacgacaatcgacccacgtttctccagtcaaagtacgaaggctcagtaaggcagaactctcgcccaggaaagcccttcttgtatg

SEQ ID NO: 112792 - DNA, 565 bp, Homo sapiens
  Payload ID: 2070
  Gene Symbol: CDH17
  Gene Name: cadherin 17, LI cadherin (liver-intestine)
  ENST ID: ENST00000520952
  CDS Start-End: 1-271
tattgatatcaatgatcagatccccatctttgaaaaatcagattatggaaacctgactcttgctgaagacacaaacattgggtccaccatcttaaccatccaggccactgatgctgatgagccatttactgggagttctaaaattctgtatcatatcataaagggagacagtgagggacgcctgggggttgacacagatccccataccaacaccggatatgtcataattaaaaagctattcactgaggggagacacaagaggttggcttaaaattgaccacgtgactggtgagatctttagtgtggctccattggacagagaagccggaagtccatatcgggtacaagtggtggccacagaagtaggggggtcttccttgagctctgtgtcagagttccacctgatccttatggatgtgaatgacaaccctcccaggctagccaaggactacacgggcttgttcttctgccatcccctcagtgcacctggaagtctcattttcgaggctactgatgatgatcagcacttatttcggggtccccattttacattttccctcggcag

SEQ ID NO: 112793 - DNA, 2809 bp, Homo sapiens
  Payload ID: 2071
  Gene Symbol: CDH18
  Gene Name: cadherin 18, type 2
  Uniprot ID: Q13634
  ENST ID: ENST00000274170
  CDS Start-End: 259-2631
aggttgaaaatggttgcttgtgttcaactactgtgaagagttggaatcagacaactacggctttgattttccaagtggttcagaatgtaaatatgatctgacctttccctgatggacagttaaatcatggacacgctaaacaatttactttggactgtccttcctaaagatgctctggcttctctcttgaatgctcactaagctttcgtagctgacaaggaaaggaaggaaaactgtgaactggaaagttatcttacaatgaaaattactagcacatcttgcatctgtccagtcctagtgtgtctctgttttgtgcagaggtgttatggaactgctcaccacagctccatcaaggtgatgagaaaccaaaccaaacacattgaaggtgaaaccgaagtccatcatcgtcccaaaaggggatgggtatggaatcagttctttgttttagaagaacatatgggaccagatcctcagtatgttggaaagctgcactccaattctgacaaaggtgatggatctgtcaagtacatccttactggagagggtgctgggactatatttatcattgacgataccacgggtgatatccactcaacaaaaagcctagacagagagcagaagacccactatgtgcttcatgctcaagctattgatagacgtacaaacaaacctcttgagcctgaatccgagttcatcatcaaagtgcaagacatcaatgacaacgctccaaaattcacagatggaccatacattgttactgtgcctgaaatgtcagatatgggtacctctgttctacaggtgacagctactgatgcagatgaccctacctatggaaacagcgctcgggtggtttacagcattctccaaggacaaccctacttctccgtcgaccctaaaacaggagttattagaacggccttacataacatggacagagaagccagagaacattactccgtagtcattcaagccaaagacatggctgggcaagttggagggctttcaggatctacaacagtcaacatcaccttaaccgatgtcaatgacaacccaccacgctttcctcaaaaacactatcagctatatgttcctgagtcagctcaagttggttcagctgttgggaaaatcaaggcaaatgatgctgacactggctcaaatgctgacatgacctactccatcataaatggtgatggcatgggaatattctcaatctccactgacaaagagaccagagaaggaatcctttctttaaagaagccactgaactatgagaaaaagaagtcatataccctcaacatagaaggagcaaatacacatcttgattttcgcttttctcacttgggtccttttaaagatgctactatgctgaagatcattgttggggatgtagatgaaccaccactattttccatgccttcctacctcatggaagtctacgaaaatgccaagattgggaccgtcgttggtacagttttggcacaagatcctgacagtactaacagcttagtaagatacttcatcaactacaatgttgaagacgacagatttttcaacattgatgccaatactgggaccattaggactacaaaggttctcgacagagaagaaactccatggtacaacatcacagtcactgcttcagaaattgataatcctgatttgctgagccatgtcacagtgggtattagagttctggatgtcaatgacaatccacccgaacttgccagggaatatgatattattgtatgtgaaaattctaagcctggccaggttattcataccatcagtgccactgataaagatgattttgccaatggaccaaggtttaacttctttcttgatgaacgcctgcctgtaaatccaaacttcactctgaaggacaatgaagataacacagccagcattctgacaaggcggaggagatttagtcgaactgttcaggatgtgtattatctgcccattatgatctctgatggtggaatcccctctctcagcagcagcagcaccctcaccatcagggtttgtgcatgcgagagagatgggcgtgtgcggacctgccatgcagaagccttcctgtcctcggctggtttgagtacaggagccttaatcgctattcttctctgtgttctcattctcctggcaattgtggtactttttatcaccctgaggcgcagcaaaaaagagcccttgatcatttcagaagaggatgtacgggagaacgtggtcacctatgatgatgaaggaggcggagaggaagacacagaggcctttgacatcacagccttgaggaatccttctgctgctgaggagctcaagtaccggagggatatcagacctgaagtgaagctcactcccagacaccagacatcatccaccctggaaagcatagatgttcaggaatttattaagcaaagactggcagaagcagacctagaccctagcgttcccccttatgactctcttcagacttatgcctatgagggtcagagatcagaagctgggtctatcagctcgctggattcagcaacgacacaatcagaccaggattatcactaccttggagactggggacccgagtttaaaaagttagctgaactctatggagaaatagaatctgaaagaacaacttagggggtcagttcttgcaaccttgtggaatttgcttcctgagtaagtggatatacaacctcagcaatgacaaggaagaagtgtggaaacagtacttggaactgaggaagctggacacagctcctgtagaaacaagtgcccttttcatgatcgaaactgggttatttaattggaagaaagt

SEQ ID NO: 112794 - DNA, 3087 bp, Homo sapiens
  Payload ID: 2071
  Gene Symbol: CDH18
  Gene Name: cadherin 18, type 2
  Uniprot ID: Q13634
  ENST ID: ENST00000382275
  CDS Start-End: 521-2893
ggagcccagggctcgaggtgcgcggagcctgagtctgggctttccgaggacggcgagcagctgtgcccagagctctgggaaagtcccctctctttgcttcttataaattaagttcctttccaccagttagggcaagtccgccaagatagactgaagaggagcaagaacagaaacagggagccagttacagatctatcccaagaattctggggagagatgatggtgtctgcagcagagtgacagcagtggagattgagagaaaaggttgaaaatggttgcttgtgttcaactactgtgaagagttggaatcagacaactacggctttgattttccaagtggttcagaatgtaaatatgatctgacctttccctgatggacagttaaatcatggacacgctaaacaatttactttggactgtccttcctaaagatgctctggcttctctcttgaatgctcactaagctttcgtagctgacaaggaaaggaaggaaaactgtgaactggaaagttatcttacaatgaaaattactagcacatcttgcatctgtccagtcctagtgtgtctctgttttgtgcagaggtgttatggaactgctcaccacagctccatcaaggtgatgagaaaccaaaccaaacacattgaaggtgaaaccgaagtccatcatcgtcccaaaaggggatgggtatggaatcagttctttgttttagaagaacatatgggaccagatcctcagtatgttggaaagctgcactccaattctgacaaaggtgatggatctgtcaagtacatccttactggagagggtgctgggactatatttatcattgacgataccacgggtgatatccactcaacaaaaagcctagacagagagcagaagacccactatgtgcttcatgctcaagctattgatagacgtacaaacaaacctcttgagcctgaatccgagttcatcatcaaagtgcaagacatcaatgacaacgctccaaaattcacagatggaccatacattgttactgtgcctgaaatgtcagatatgggtacctctgttctacaggtgacagctactgatgcagatgaccctacctatggaaacagcgctcgggtggtttacagcattctccaaggacaaccctacttctccgtcgaccctaaaacaggagttattagaacggccttacataacatggacagagaagccagagaacattactccgtagtcattcaagccaaagacatggctgggcaagttggagggctttcaggatctacaacagtcaacatcaccttaaccgatgtcaatgacaacccaccacgctttcctcaaaaacactatcagctatatgttcctgagtcagctcaagttggttcagctgttgggaaaatcaaggcaaatgatgctgacactggctcaaatgctgacatgacctactccatcataaatggtgatggcatgggaatattctcaatctccactgacaaagagaccagagaaggaatcctttctttaaagaagccactgaactatgagaaaaagaagtcatataccctcaacatagaaggagcaaatacacatcttgattttcgcttttctcacttgggtccttttaaagatgctactatgctgaagatcattgttggggatgtagatgaaccaccactattttccatgccttcctacctcatggaagtctacgaaaatgccaagattgggaccgtcgttggtacagttttggcacaagatcctgacagtactaacagcttagtaagatacttcatcaactacaatgttgaagacgacagatttttcaacattgatgccaatactgggaccattaggactacaaaggttctcgacagagaagaaactccatggtacaacatcacagtcactgcttcagaaattgataatcctgatttgctgagccatgtcacagtgggtattagagttctggatgtcaatgacaatccacccgaacttgccagggaatatgatattattgtatgtgaaaattctaagcctggccaggttattcataccatcagtgccactgataaagatgattttgccaatggaccaaggtttaacttctttcttgatgaacgcctgcctgtaaatccaaacttcactctgaaggacaatgaagataacacagccagcattctgacaaggcggaggagatttagtcgaactgttcaggatgtgtattatctgcccattatgatctctgatggtggaatcccctctctcagcagcagcagcaccctcaccatcagggtttgtgcatgcgagagagatgggcgtgtgcggacctgccatgcagaagccttcctgtcctcggctggtttgagtacaggagccttaatcgctattcttctctgtgttctcattctcctggcaattgtggtactttttatcaccctgaggcgcagcaaaaaagagcccttgatcatttcagaagaggatgtacgggagaacgtggtcacctatgatgatgaaggaggcggagaggaagacacagaggcctttgacatcacagccttgaggaatccttctgctgctgaggagctcaagtaccggagggatatcagacctgaagtgaagctcactcccagacaccagacatcatccaccctggaaagcatagatgttcaggaatttattaagcaaagactggcagaagcagacctagaccctagcgttcccccttatgactctcttcagacttatgcctatgagggtcagagatcagaagctgggtctatcagctcgctggattcagcaacgacacaatcagaccaggattatcactaccttggagactggggacccgagtttaaaaagttagctgaactctatggagaaatagaatctgaaagaacaacttagggggtcagttcttgcaaccttgtggaatttgcttcctgagtaagtggatatacaacctcagcaatgacaaggaagaagtgtggaaacagtacttggaactgaggaagctggacacagctcctgtagaaacaagtgcccttttcatgatcgaaactgggttatttaattggaagaaagtaaaaaaaaaaaaaaaa

SEQ ID NO: 112795 - DNA, 2386 bp, Homo sapiens
  Payload ID: 2071
  Gene Symbol: CDH18
  Gene Name: cadherin 18, type 2
  Uniprot ID: Q13634
  ENST ID: ENST00000502796
  CDS Start-End: 476-2200
gaggacggcgagcagctgtgcccagagctctgggaaagtcccctctctttgcttcttataaattaagttcctttccaccagttagggcaagtccgccaagatagactgaagaggagcaagaacagaaacagggagccagttacagatctatcccaagaattctggggagagatgatggtgtctgcagcagagtgacagcagtggagattgagagaaaaggttgaaaatggttgcttgtgttcaactactgtgaagagttggaatcagacaactacggctttgattttccaagtggttcagaatgtaaatatgatctgacctttccctgatggacagttaaatcatggacacgctaaacaatttactttggactgtccttcctaaagatgctctggcttctctcttgaatgctcactaagctttcgtagctgacaaggaaaggaaggaaaactgtgaactggaaagttatcttacaatgaaaattactagcacatcttgcatctgtccagtcctagtgtgtctctgttttgtgcagaggtgttatggaactgctcaccacagctccatcaaggtgatgagaaaccaaaccaaacacattgaaggtgaaaccgaagtccatcatcgtcccaaaaggggatgggtatggaatcagttctttgttttagaagaacatatgggaccagatcctcagtatgttggaaagctgcactccaattctgacaaaggtgatggatctgtcaagtacatccttactggagagggtgctgggactatatttatcattgacgataccacgggtgatatccactcaacaaaaagcctagacagagagcagaagacccactatgtgcttcatgctcaagctattgatagacgtacaaacaaacctcttgagcctgaatccgagttcatcatcaaagtgcaagacatcaatgacaacgctccaaaattcacagatggaccatacattgttactgtgcctgaaatgtcagatatgggtacctctgttctacaggtgacagctactgatgcagatgaccctacctatggaaacagcgctcgggtggtttacagcattctccaaggacaaccctacttctccgtcgaccctaaaacaggagttattagaacggccttacataacatggacagagaagccagagaacattactccgtagtcattcaagccaaagacatggctgggcaagttggagggctttcaggatctacaacagtcaacatcaccttaaccgatgtcaatgacaacccaccacgctttcctcaaaaacactatcagctatatgttcctgagtcagctcaagttggttcagctgttgggaaaatcaaggcaaatgatgctgacactggctcaaatgctgacatgacctactccatcataaatggtgatggcatgggaatattctcaatctccactgacaaagagaccagagaaggaatcctttctttaaagaagccactgaactatgagaaaaagaagtcatataccctcaacatagaaggagcaaatacacatcttgattttcgcttttctcacttgggtccttttaaagatgctactatgctgaagatcattgttggggatgtagatgaaccaccactattttccatgccttcctacctcatggaagtctacgaaaatgccaagattgggaccgtcgttggtacagttttggcacaagatcctgacagtactaacagcttagtaagatacttcatcaactacaatgttgaagacgacagatttttcaacattgatgccaatactgggaccattaggactacaaaggttctcgacagagaagaaactccatggtacaacatcacagtcactgcttcagaaattgataatcctgatttgctgagccatgtcacagtgggtattagagttctggatgtcaatgacaatccacccgaacttgccagggaatatgatattattgtatgtgaaaattctaagcctggccaggttattcataccatcagtgccactgataaagatgattttgccaatggaccaaggtttaacttctttcttgatgaacgcctgcctgtaaatccaaacttcactctgaaggacaatgaagcagcagcaccctcaccatcagggtttgtgcatgcgagagagatgggcgtgtgcggacctgccatgcagaagccttcctgtcctcggctggtttgagtacaggagccttaatcgctattcttctctgtgttctcattctcctggcaattgtggtactttttatcaccctgaggcgcagcaaaaaagagcccttgatcatttcagaagaggatgtacgggagaacgtggtcacctatgatgatgaaggaggcggagaggaagacacagaggcctttgacatca

SEQ ID NO: 112796 - DNA, 2432 bp, Homo sapiens
  Payload ID: 2071
  Gene Symbol: CDH18
  Gene Name: cadherin 18, type 2
  ENST ID: ENST00000506372
  CDS Start-End: 513-2240
tttaagtactgcagtcatctaatgtacttcaccagcagaatctaaattctagatccaagaaagattattgtcagctggctttattcagggtccaattctgagcccagtatcaagtaataaagattgagtggtgtgataattagagatgcttcaaccaaagttttcaaaaatgggaacatattgaacccttggttctacaactaccttcttacaacgaagttagtatgcagtgctctccaagtcaataaggaaagtggttgaaaatggttgcttgtgttcaactactgtgaagagttggaatcagacaactacggctttgattttccaagtggttcagaatgtaaatatgatctgacctttccctgatggacagttaaatcatggacacgctaaacaatttactttggactgtccttcctaaagatgctctggcttctctcttgaatgctcactaagctttcgtagctgacaaggaaaggaaggaaaactgtgaactggaaagttatcttacaatgaaaattactagcacatcttgcatctgtccagtcctagtgtgtctctgttttgtgcagaggtgttatggaactgctcaccacagctccatcaaggtgatgagaaaccaaaccaaacacattgaaggtgaaaccgaagtccatcatcgtcccaaaaggggatgggtatggaatcagttctttgttttagaagaacatatgggaccagatcctcagtatgttggaaagctgcactccaattctgacaaaggtgatggatctgtcaagtacatccttactggagagggtgctgggactatatttatcattgacgataccacgggtgatatccactcaacaaaaagcctagacagagagcagaagacccactatgtgcttcatgctcaagctattgatagacgtacaaacaaacctcttgagcctgaatccgagttcatcatcaaagtgcaagacatcaatgacaacgctccaaaattcacagatggaccatacattgttactgtgcctgaaatgtcagatatgggtacctctgttctacaggtgacagctactgatgcagatgaccctacctatggaaacagcgctcgggtggtttacagcattctccaaggacaaccctacttctccgtcgaccctaaaacaggagttattagaacggccttacataacatggacagagaagccagagaacattactccgtagtcattcaagccaaagacatggctgggcaagttggagggctttcaggatctacaacagtcaacatcaccttaaccgatgtcaatgacaacccaccacgctttcctcaaaaacactatcagctatatgttcctgagtcagctcaagttggttcagctgttgggaaaatcaaggcaaatgatgctgacactggctcaaatgctgacatgacctactccatcataaatggtgatggcatgggaatattctcaatctccactgacaaagagaccagagaaggaatcctttctttaaagaagccactgaactatgagaaaaagaagtcatataccctcaacatagaaggagcaaatacacatcttgattttcgcttttctcacttgggtccttttaaagatgctactatgctgaagatcattgttggggatgtagatgaaccaccactattttccatgccttcctacctcatggaagtctacgaaaatgccaagattgggaccgtcgttggtacagttttggcacaagatcctgacagtactaacagcttagtaagatacttcatcaactacaatgttgaagacgacagatttttcaacattgatgccaatactgggaccattaggactacaaaggttctcgacagagaagaaactccatggtacaacatcacagtcactgcttcagaaattgataatcctgatttgctgagccatgtcacagtgggtattagagttctggatgtcaatgacaatccacccgaacttgccagggaatatgatattattgtatgtgaaaattctaagcctggccaggttattcataccatcagtgccactgataaagatgattttgccaatggaccaaggtttaacttctttcttgatgaacgcctgcctgtaaatccaaacttcactctgaaggacaatgaagcagcagcagcaccctcaccatcagggtttgtgcatgcgagagagatgggcgtgtgcggacctgccatgcagaagccttcctgtcctcggctggtttgagtacaggagccttaatcgctattcttctctgtgttctcattctcctggcaattgtggtactttttatcaccctgaggcgcagcaaaaaagagcccttgatcatttcagaagaggatgtacgggagaacgtggtcacctatgatgatgaaggaggcggagaggaagacacagaggcctttgacatcacagcct

SEQ ID NO: 112797 - DNA, 3542 bp, Homo sapiens
  Payload ID: 2071
  Gene Symbol: CDH18
  Gene Name: cadherin 18, type 2
  Uniprot ID: Q13634
  ENST ID: ENST00000507958
  CDS Start-End: 992-3364
tagattgattatacagcagcagcatgagctgagtctcagagctgagcgagcgtcagggtgaaaaggaaagagagaaagagagagagagagaaaaaaaagcggggagagagagagagagaggaacacaaggtggggaggaagccagtgcacgttccatagcatcactactgtgactgcttgtacccgataatcttgctctgcagctccctcagtgaacaacttactgaggtgcctttctttttacaagaggatgtcagctctgagctccagcaagaaataacagacttcaccttggaatagctcatcttactcctgcatcattaaagcggattttcaaaagaaaacaaaaatcaagtcccctttccagttccactttcttccagcattgaacaggaacagtttcacgctccaggactcaaccacagcaatatgtaagaagaacacacaccaaacattcctgaagtgatttaaaagatggaatctcgctctgtctcccaggctggagtgcagtggcgcaatctcagctcattgcaacctccacctcctgggttcacgccattctcctgcctcagcctcctgagtagctgggactacaggcgcccgccaccacgccaggatagactgaagaggagcaagaacagaaacagggagccagttacagatctatcccaagaattctggggagagatgatggtgtctgcagcagagtgacagcagtggagattgagagaaaaggttgaaaatggttgcttgtgttcaactactgtgaagagttggaatcagacaactacggctttgattttccaagtggttcagaatgtaaatatgatctgacctttccctgatggacagttaaatcatggacacgctaaacaatttactttggactgtccttcctaaagatgctctggcttctctcttgaatgctcactaagctttcgtagctgacaaggaaaggaaggaaaactgtgaactggaaagttatcttacaatgaaaattactagcacatcttgcatctgtccagtcctagtgtgtctctgttttgtgcagaggtgttatggaactgctcaccacagctccatcaaggtgatgagaaaccaaaccaaacacattgaaggtgaaaccgaagtccatcatcgtcccaaaaggggatgggtatggaatcagttctttgttttagaagaacatatgggaccagatcctcagtatgttggaaagctgcactccaattctgacaaaggtgatggatctgtcaagtacatccttactggagagggtgctgggactatatttatcattgacgataccacgggtgatatccactcaacaaaaagcctagacagagagcagaagacccactatgtgcttcatgctcaagctattgatagacgtacaaacaaacctcttgagcctgaatccgagttcatcatcaaagtgcaagacatcaatgacaacgctccaaaattcacagatggaccatacattgttactgtgcctgaaatgtcagatatgggtacctctgttctacaggtgacagctactgatgcagatgaccctacctatggaaacagcgctcgggtggtttacagcattctccaaggacaaccctacttctccgtcgaccctaaaacaggagttattagaacggccttacataacatggacagagaagccagagaacattactccgtagtcattcaagccaaagacatggctgggcaagttggagggctttcaggatctacaacagtcaacatcaccttaaccgatgtcaatgacaacccaccacgctttcctcaaaaacactatcagctatatgttcctgagtcagctcaagttggttcagctgttgggaaaatcaaggcaaatgatgctgacactggctcaaatgctgacatgacctactccatcataaatggtgatggcatgggaatattctcaatctccactgacaaagagaccagagaaggaatcctttctttaaagaagccactgaactatgagaaaaagaagtcatataccctcaacatagaaggagcaaatacacatcttgattttcgcttttctcacttgggtccttttaaagatgctactatgctgaagatcattgttggggatgtagatgaaccaccactattttccatgccttcctacctcatggaagtctacgaaaatgccaagattgggaccgtcgttggtacagttttggcacaagatcctgacagtactaacagcttagtaagatacttcatcaactacaatgttgaagacgacagatttttcaacattgatgccaatactgggaccattaggactacaaaggttctcgacagagaagaaactccatggtacaacatcacagtcactgcttcagaaattgataatcctgatttgctgagccatgtcacagtgggtattagagttctggatgtcaatgacaatccacccgaacttgccagggaatatgatattattgtatgtgaaaattctaagcctggccaggttattcataccatcagtgccactgataaagatgattttgccaatggaccaaggtttaacttctttcttgatgaacgcctgcctgtaaatccaaacttcactctgaaggacaatgaagataacacagccagcattctgacaaggcggaggagatttagtcgaactgttcaggatgtgtattatctgcccattatgatctctgatggtggaatcccctctctcagcagcagcagcaccctcaccatcagggtttgtgcatgcgagagagatgggcgtgtgcggacctgccatgcagaagccttcctgtcctcggctggtttgagtacaggagccttaatcgctattcttctctgtgttctcattctcctggcaattgtggtactttttatcaccctgaggcgcagcaaaaaagagcccttgatcatttcagaagaggatgtacgggagaacgtggtcacctatgatgatgaaggaggcggagaggaagacacagaggcctttgacatcacagccttgaggaatccttctgctgctgaggagctcaagtaccggagggatatcagacctgaagtgaagctcactcccagacaccagacatcatccaccctggaaagcatagatgttcaggaatttattaagcaaagactggcagaagcagacctagaccctagcgttcccccttatgactctcttcagacttatgcctatgagggtcagagatcagaagctgggtctatcagctcgctggattcagcaacgacacaatcagaccaggattatcactaccttggagactggggacccgagtttaaaaagttagctgaactctatggagaaatagaatctgaaagaacaacttagggggtcagttcttgcaaccttgtggaatttgcttcctgagtaagtggatatacaacctcagcaatgacaaggaagaagtgtggaaacagtacttggaactgaggaagctggacacagctcctgtagaaacaagtgcccttttcatgatcgaaactgggttatttaattggaagaaagt

SEQ ID NO: 112798 - DNA, 2318 bp, Homo sapiens
  Payload ID: 2071
  Gene Symbol: CDH18
  Gene Name: cadherin 18, type 2
  ENST ID: ENST00000511273
  CDS Start-End: 379-2151
ggagcctgagtctgggctttccgaggacggcgagcagctgtgcccagagctctgggaaagtcccctctctttgcttcttataaattaagttcctttccaccagttagggcaagtccgccaaggttgaaaatggttgcttgtgttcaactactgtgaagagttggaatcagacaactacggctttgattttccaagtggttcagaatgtaaatatgatctgacctttccctgatggacagttaaatcatggacacgctaaacaatttactttggactgtccttcctaaagatgctctggcttctctcttgaatgctcactaagctttcgtagctgacaaggaaaggaaggaaaactgtgaactggaaagttatcttacaatgaaaattactagcacatcttgcatctgtccagtcctagtgtgtctctgttttgtgcagaggtgttatggaactgctcaccacagctccatcaaggtgatgagaaaccaaaccaaacacattgaaggtgaaaccgaagtccatcatcgtcccaaaaggggatgggtatggaatcagttctttgttttagaagaacatatgggaccagatcctcagtatgttggaaagctgcactccaattctgacaaaggtgatggatctgtcaagtacatccttactggagagggtgctgggactatatttatcattgacgataccacgggtgatatccactcaacaaaaagcctagacagagagcagaagacccactatgtgcttcatgctcaagctattgatagacgtacaaacaaacctcttgagcctgaatccgagttcatcatcaaagtgcaagacatcaatgacaacgctccaaaattcacagatggaccatacattgttactgtgcctgaaatgtcagatatgggtacctctgttctacaggtgacagctactgatgcagatgaccctacctatggaaacagcgctcgggtggtttacagcattctccaaggacaaccctacttctccgtcgaccctaaaacaggagttattagaacggccttacataacatggacagagaagccagagaacattactccgtagtcattcaagccaaagacatggctgggcaagttggagggctttcaggatctacaacagtcaacatcaccttaaccgatgtcaatgacaacccaccacgctttcctcaaaaacactatcagctatatgttcctgagtcagctcaagttggttcagctgttgggaaaatcaaggcaaatgatgctgacactggctcaaatgctgacatgacctactccatcataaatggtgatggcatgggaatattctcaatctccactgacaaagagaccagagaaggaatcctttctttaaagaagccactgaactatgagaaaaagaagtcatataccctcaacatagaaggagcaaatacacatcttgattttcgcttttctcacttgggtccttttaaagatgctactatgctgaagatcattgttggggatgtagatgaaccaccactattttccatgccttcctacctcatggaagtctacgaaaatgccaagattgggaccgtcgttggtacagttttggcacaagatcctgacagtactaacagcttagtaagatacttcatcaactacaatgttgaagacgacagatttttcaacattgatgccaatactgggaccattaggactacaaaggttctcgacagagaagaaactccatggtacaacatcacagtcactgcttcagaaattgataatcctgatttgctgagccatgtcacagtgggtattagagttctggatgtcaatgacaatccacccgaacttgccagggaatatgatattattgtatgtgaaaattctaagcctggccaggttattcataccatcagtgccactgataaagatgattttgccaatggaccaaggtttaacttctttcttgatgaacgcctgcctgtaaatccaaacttcactctgaaggacaatgaaggtgaacatatatacacatatttgtttatctatgtggtatctgctttgaccttatatgtaataggctttattcttatatacacacaaacatcttgcaaatcagcattcaaagtcagtttgatgctactgtgttatgatctgtgaatagcttgtgtttaaaattgagccatatgtacaaataactttcattgaatttattcagaagcatctctttaaacaagaaatgtacatgtaatatgctcttgggcaaattttaagagaaatcttagctgacaaacttgtttatgagagctgctgccactgcttggagg

SEQ ID NO: 112799 - DNA, 1476 bp, Homo sapiens
  Payload ID: 2071
  Gene Symbol: CDH18
  Gene Name: cadherin 18, type 2
  ENST ID: ENST00000515257
  CDS Start-End: 1-1326
tgggtatggaatcagttctttgttttagaagaacatatgggaccagatcctcagtatgttggaaagctgcactccaattctgacaaaggtgatggatctgtcaagtacatccttactggagagggtgctgggactatatttatcattgacgataccacgggtgatatccactcaacaaaaagcctagacagagagcagaagacccactatgtgcttcatgctcaagctattgatagacgtacaaacaaacctcttgagcctgaatccgagttcatcatcaaagtgcaagacatcaatgacaacgctccaaaattcacagatggaccatacattgttactgtgcctgaaatgtcagatatgggtacctctgttctacaggtgacagctactgatgcagatgaccctacctatggaaacagcgctcgggtggtttacagcattctccaaggacaaccctacttctccgtcgaccctaaaacaggagttattagaacggccttacataacatggacagagaagccagagaacattactccgtagtcattcaagccaaagacatggctgggcaagttggagggctttcaggatctacaacagtcaacatcaccttaaccgatgtcaatgacaacccaccacgctttcctcaaaaacactatcagctatatgttcctgagtcagctcaagttggttcagctgttgggaaaatcaaggcaaatgatgctgacactggctcaaatgctgacatgacctactccatcataaatggtgatggcatgggaatattctcaatctccactgacaaagagaccagagaaggaatcctttctttaaagaagccactgaactatgagaaaaagaagtcatataccctcaacatagaaggagcaaatacacatcttgattttcgcttttctcacttgggtccttttaaagatgctactatgctgaagatcattgttggggatgtagatgaaccaccactattttccatgccttcctacctcatggaagtctacgaaaatgccaagattgggaccgtcgttggtacagttttggcacaagatcctgacagtactaacagcttagtaagatacttcatcaactacaatgttgaagacgacagatttttcaacattgatgccaatactgggaccattaggactacaaaggttctcgacagagaagaaactccatggtacaacatcacagtcactgcttcagaaattgcagcagcagcaccctcaccatcagggtttgtgcatgcgagagagatgggcgtgtgcggacctgccatgcagaagccttcctgtcctcggctggtttgagtacaggagccttaatcgctattcttctctgtgttctcattctcctggcaattgtggtactttttatcaccctgaggcgcagcaaaaaagagcccttgatcatttcagaagaggatgtacgggagaacgtggtcacctatgatgatgaag

SEQ ID NO: 112800 - DNA, 6341 bp, Homo sapiens
  Payload ID: 2072
  Gene Symbol: CDH19
  Gene Name: cadherin 19, type 2
  Uniprot ID: Q9H159
  ENST ID: ENST00000262150
  CDS Start-End: 294-2612
tgacagtgttgtggtactaaaagcacaagcgtctgtaactctgggcaatggggcacatcgagagtttgctgagaagactgtgaagcaaaaagaagaaagtttttcctactcttccttatgtgtccaacacgaagtttgctgttcagttttcacagaacttctagaagttgaagttacaaaggtatatagaaggtacacagaatcagaaaagattataaaagaaagcaagatttttgttagtgacgtcctgtttcctctgaagagtaatagttggaatcaaaagagtcaacgcaatgaactgttatttactgctgcgttttatgttgggaattcctctcctatggccttgtcttggagcaacagaaaactctcaaacaaagaaagtcaagcagccagtgcgatctcatttgagagtgaagcgtggctgggtgtggaaccaattttttgtaccagaggaaatgaatacgactagtcatcacatcggccagctaagatctgatttagacaatggaaacaattctttccagtacaagcttttgggagctggagctggaagtacttttatcattgatgaaagaacaggtgacatatatgccatacagaagcttgatagagaggagcgatccctctacatcttaagagcccaggtaatagacatcgctactggaagggctgtggaacctgagtctgagtttgtcatcaaagtttcggatatcaatgacaatgaaccaaaattcctagatgaaccttatgaggccattgtaccagagatgtctccagaaggaacattagttatccaggtgacagcaagtgatgctgacgatccctcaagtggtaataatgctcgtctcctctacagcttacttcaaggccagccatatttttctgttgaaccaacaacaggagtcataagaatatcttctaaaatggatagagaactgcaagatgagtattgggtaatcattcaagccaaggacatgattggtcagccaggagcgttgtctggaacaacaagtgtattaattaaactttcagatgttaatgacaataagcctatatttaaagaaagtttataccgcttgactgtctctgaatctgcacccactgggacttctataggaacaatcatggcatatgataatgacataggagagaatgcagaaatggattacagcattgaagaggatgattcgcaaacatttgacattattactaatcatgaaactcaagaaggaatagttatattaaaaaagaaagtggattttgagcaccagaaccactacggtattagagcaaaagttaaaaaccatcatgttcctgagcagctcatgaagtaccacactgaggcttccaccactttcattaagatccaggtggaagatgttgatgagcctcctcttttcctccttccatattatgtatttgaagtttttgaagaaaccccacagggatcatttgtaggcgtggtgtctgccacagacccagacaataggaaatctcctatcaggtattctattactaggagcaaagtgttcaatatcaatgataatggtacaatcactacaagtaactcactggatcgtgaaatcagtgcttggtacaacctaagtattacagccacagaaaaatacaatatagaacagatctcttcgatcccactgtatgtgcaagttcttaacatcaatgatcatgctcctgagttctctcaatactatgagacttatgtttgtgaaaatgcaggctctggtcaggtaattcagactatcagtgcagtggatagagatgaatccatagaagagcaccatttttactttaatctatctgtagaagacactaacaattcaagttttacaatcatagataatcaagataacacagctgtcattttgactaatagaactggttttaaccttcaagaagaacctgtcttctacatctccatcttaattgccgacaatggaatcccgtcacttacaagtacaaacacccttaccatccatgtctgtgactgtggtgacagtgggagcacacagacctgccagtaccaggagcttgtgctttccatgggattcaagacagaagtcatcattgctattctcatttgcattatgatcatatttgggtttatttttttgactttgggtttaaaacaacggagaaaacagattctatttcctgagaaaagtgaagatttcagagagaatatattccaatatgatgatgaagggggtggagaagaagatacagaggcctttgatatagcagagctgaggagtagtaccataatgcgggaacgcaagactcggaaaaccacaagcgctgagatcaggagcctatacaggcagtctttgcaagttggccccgacagtgccatattcaggaaattcattctggaaaagctcgaagaagctaatactgatccgtgtgcccctccttttgattccctccagacctacgcttttgagggaacagggtcattagctggatccctgagctccttagaatcagcagtctctgatcaggatgaaagctatgattaccttaatgagttgggacctcgctttaaaagattagcatgcatgtttggttctgcagtgcagtcaaataattagggctttttaccatcaaaatttttaaaagtgctaatgtgtattcgaacccaatggtagtcttaaagagttttgtgccctggctctatggcggggaaagccctagtctatggagttttctgatttccctggagtaaatactccatggttattttaagctacctacatgctgtcattgaacagagatgtggggagaaatgtaaacaatcagctcacaggcatcaatacaaccagatttgaagtaaaataatttaggaagatattaaaagtagatgagaggacacaagatgtagtcgatccttatgcgattatatcattatttacttaggaaagagtaaaaataccaaacgagaaaatttaaaggagcaaaaatttgcaagtcaaatagaaatgtacaaatcgagataacatttacatttctatcatattgacatgaaaattgaaaatgtatagtcagagaaattttcatgaattattccatgaagtattgtttcctttatttaaaaaaaaaaaaaaaaaaaaagaatgctaggtaatcttcgtagaaaactagaaagtatgataaacaacagttggaggaatccatggaaaatagacgagaaaatgtaaataaggctttctggggatcacagaacttttgtatgaataaaagccttataaaaccagctctggcatatgactaaaatattcctctactatttttcaatgtcatctaatgcaaacgctcaacctttttaaatggttaatgtgagaaaggcactgaattaagatatcttagtgttattttatttactcaattttcatctttcacactgtaagaataaaatgtttttgtggttaagttcctgatactatatagagataaactttaaaactttaacacctaggataatgtgggtgattacataaatgtttaaaaacatttaccttatatggaaagcagatttctgactaagatgccatgattcattctagtttgatattttaaaactttgccaagagcactctttaaaactgatttcaaatttgaacagatacttggtgtatacaaattaatcagagttatatagtataaatttgtattatttttgatattacaactttgtattaaaaaggaaaatatatttaggtgtttgtcatagattttttttcatatgcaactcaaaacacattcttatgtcaaaatacaatagcaaaatacaagtcaatatttactcataattaaatgcaaactttatgaaactggtggaaagtgtggaaaaatttaagtaaatttttacctctactaaaaattatttagacaacttaaaggaatactggattcaaacttcagttactattcactgtaaatattatgatcaactgaactgacttaccattcatgggataaaacatgatacaattctcagtatttgcttttctgttaagagcttggaatatgactgatgcttcagtgtcatttttttattattgaatataaaattaggtgcaatagatacatttattgtagccttaagaaggaaatcaatgctaagctgttgggcataaaactttacagtaacattagataacaagataataaaacactttaattttaatcgaccttttaagaatgatctttattattctatccaaatcaaggtagacttcaaaatttatggtttgaacaggaagaaagtagtgaatacaaaattcttaaaattggttcatatgatcatttttttattaatagcatgtgagactaagctgaaccaaactggccatatatgttaaatcaaataatttgagtaattttgaaatattgatgaagtagttaaatggttataatatattttattggtactttgaaatttaaacatctatatcacataataaagaaagtttttcatcaatctgaaacaggcaccattaaattggtgacacaaatattatcatttcacaaaagcttgagaaaaccagatttgaagtgaaataatttaggaagatattaaaagtggatgagaggacataagatgtagtcaatccttaacgcaatgataccattattaggaaagaggaaaaataccaaacaagagaaaatttaaaggagcaaaaatttgcaagtcaaatagaaatgcacaaatcgagagaacatttacatttctatcacattgacatgaaaattgaaaatgtatagtcagagaaattttcatgaattattccatgaagtgttgtttcctttatttaaaaagaatgctaggtaatcttagtagaaaactaaaaagtatgataaacaacagatggaagaattcatggaaaatagacgagaaaaagtaaataaggctttctggagatgacggaaattttgtatgaataaaagccttataaacaatgaatacatttggataaacaactcattaaaatgcacattaatggaatacctgtacaaatagttttaatacttgtgtccagtggcactaaagagatatattaaaatagattctggttgagttgattataagattgtcaatcataggatacacagggaaagcacagacacgattgctcatctctttggtagtctaaaatatgttccttttaaccacatcaaaagatactatctgattctaatacagaaggtgcaacttcctaggaattatactttgtattatattcaataattattttatgttttgcatcacatgggtgttgcaagaacacagctcttaaactaaaaaggcattacattaagaatttatttttgtaaattttaataaactctaaattaatgcaaaatatttatgaaaatagcacagcttcacattaatacccacagtacttaaatatctcccttagttgactcacagctttgtatgtaagcttcaaatttttaatggtaaaaataagaaaattaggactagcgaactgctagttgttccctcagtgcatgtgcttgagcctaacagatctttgtttgaattagttactttcaattaagcgaacatataatatttgttaaactgcttaatctttccagatctcactttgtaaaatgacgtccaatcaacctatttcacatggttgttatgaagaattaataataagatatgtaaaaccagcagcaccaatagtgcctgacaaaatataactgctcaataaataacagtgaattattataacaacagctaatggtattctattggaacacatggtctgtttcttttccaattctgagtgatctcaacagcctcacggcacattgaaaataaaagtcaacttcctcaccttccccataggccatggactttcccatctctacccacttgtgcagtttctcctctttcctctctcctcctcagttactaaagcaatcttccttcaaacacttctattttccattacatcacttcattcaggttggtgatcagctgcaacttcctcagaaagaccactgctgcttccagtgaccctggctttgtcttgctttgtattagattactcagctccctggtattattgttgtctttatcgcttattagaatgtaacccttaatgggcaagaaattgtcagtcttgttcatttatcatcgtataaaaaatgtttctagcacacagaaagtgaccaataaatatttctggaattaatgtagtaatgaatccaatctattttacttagtgacttgtagaaattcttttggtttccattgactatttttatagaatattaatatggaattaaagtatttttcaaaa

SEQ ID NO: 112801 - DNA, 1677 bp, Homo sapiens
  Payload ID: 2072
  Gene Symbol: CDH19
  Gene Name: cadherin 19, type 2
  ENST ID: ENST00000454642
  CDS Start-End: 1-1305
ggaattcctctcctatggccttgtcttggagcaacagaaaactctcaaacaaagaaagtcaagcagccagtgcgatctcatttgagagtgaagcgtggctgggtgtggaaccaattttttgtaccagaggaaatgaatacgactagtcatcacatcggccagctaagatctgatttagacaatggaaacaattctttccagtacaagcttttgggagctggagctggaagtacttttatcattgatgaaagaacaggtgacatatatgccatacagaagcttgatagagaggagcgatccctctacatcttaagagcccaggtaatagacatcgctactggaagggctgtggaacctgagtctgagtttgtcatcaaagtttcggatatcaatgacaatgaaccaaaattcctagatgaaccttatgaggccattgtaccagagatgtctccagaaggaacattagttatccaggtgacagcaagtgatgctgacgatccctcaagtggtaataatgctcgtctcctctacagcttacttcaaggccagccatatttttctgttgaaccaacaacaggagtcataagaatatcttctaaaatggatagagaactgcaagatgagtattgggtaatcattcaagccaaggacatgattggtcagccaggagcgttgtctggaacaacaagtgtattaattaaactttcagatgttaatgacaataagcctatatttaaagaaagtttataccgcttgactgtctctgaatctgcacccactgggacttctataggaacaatcatggcatatgataatgacataggagagaatgcagaaatggattacagcattgaagaggatgattcgcaaacatttgacattattactaatcatgaaactcaagaaggaatagttatattaaaaaagaaagtggattttgagcaccagaaccactacggtattagagcaaaagttaaaaaccatcatgttcctgagcagctcatgaagtaccacactgaggcttccaccactttcattaagatccaggtggaagatgttgatgagcctcctcttttcctccttccatattatgtatttgaagtttttgaagaaaccccacagggatcatttgtaggcgtggtgtctgccacagacccagacaataggaaatctcctatcaggtattctattactaggagcaaagtgttcaatatcaatgataatggtacaatcactacaagtaactcactggatcgtgaaatcagtgcttggtacaacctaagtattacagccacagaaaaatgatatagggatgctgtattccttgaagattacatttcaaagagatggtcaccattacttgataaatacaatcctggatcctaaagcttccaagaaacttgttgaacttttgaaagatttccatacgcttcaaagggacaaagaaaaaacttacatacaaagctttttttttccctctctctctctctttctctgtgtgtgtgtgtgtgtgtgtgtgtgtgtgtatgaatgctctgagaaaaggaaggaaagaaaaaatattttcccttgctttcaacaagtacaaggcctctaatttttaatttgttttgttctttcaaattatcattgcaaatagtacatatattttaaataaaaacactaaaacaaactaaa

SEQ ID NO: 112802 - DNA, 1963 bp, Homo sapiens
  Payload ID: 2072
  Gene Symbol: CDH19
  Gene Name: cadherin 19, type 2
  Uniprot ID: Q9H159
  ENST ID: ENST00000540086
  CDS Start-End: 248-1720
aatggggcacatcgagagtttgctgagaagactgtgaagcaaaaagaagaaagtttttcctactcttccttatgtgtccaacacgaagtttgctgttcagttttcacagaacttctagaagttgaagttacaaaggtatatagaaggtacacagaatcagaaaagattataaaagaaagcaagatttttgttagtgacgtcctgtttcctctgaagagtaatagttggaatcaaaagagtcaacgcaatgaactgttatttactgctgcgttttatgttgggaattcctctcctatggccttgtcttggagcaacagaaaactctcaaacaaagaaagtcaagcagccagtgcgatctcatttgagagtgaagcgtggctgggtgtggaaccaattttttgtaccagaggaaatgaatacgactagtcatcacatcggccagctaagatctgatttagacaatggaaacaattctttccagtacaagcttttgggagctggagctggaagtacttttatcattgatgaaagaacaggtgacatatatgccatacagaagcttgatagagaggagcgatccctctacatcttaagagcccaggtaatagacatcgctactggaagggctgtggaacctgagtctgagtttgtcatcaaagtttcggatatcaatgacaatgaaccaaaattcctagatgaaccttatgaggccattgtaccagagatgtctccagaaggaacattagttatccaggtgacagcaagtgatgctgacgatccctcaagtggtaataatgctcgtctcctctacagcttacttcaaggccagccatatttttctgttgaaccaacaacaggagtcataagaatatcttctaaaatggatagagaactgcaagatgagtattgggtaatcattcaagccaaggacatgattggtcagccaggagcgttgtctggaacaacaagtgtattaattaaactttcagatgttaatgacaataagcctatatttaaagaaagtttataccgcttgactgtctctgaatctgcacccactgggacttctataggaacaatcatggcatatgataatgacataggagagaatgcagaaatggattacagcattgaagaggatgattcgcaaacatttgacattattactaatcatgaaactcaagaaggaatagttatattaaaaaagaaagtggattttgagcaccagaaccactacggtattagagcaaaagttaaaaaccatcatgttcctgagcagctcatgaagtaccacactgaggcttccaccactttcattaagatccaggtggaagatgttgatgagcctcctcttttcctccttccatattatgtatttgaagtttttgaagaaaccccacagggatcatttgtaggcgtggtgtctgccacagacccagacaataggaaatctcctatcaggtattctattactaggagcaaagtgttcaatatcaatgataatggtacaatcactacaagtaactcactggatcgtgaaatcagtgcttggtacaacctaagtattacagccacagaaaaatacaatatagaacagatctcttcgatcccactgtatgtgcaagttcttaacatcaatgatcatgctcctgagttctctcaatactatgagacttatgtttgtgaaaatgcaggctctggtcagggtttatttttttgactttgggtttaaaacaacggagaaaacagattctatttcctgagaaaagtgaagatttcagagagaatatattccaatatgatgatgaagggggtggagaagaagatacagaggcctttgatatagcagagctgaggagtagtaccataatgcgggaacgcaagactcggaaaaccacaagcgctgagatcaggagcctatacaggcagtctttgcaagttggccccgacagtgccatattca

SEQ ID NO: 112803 - DNA, 2588 bp, Homo sapiens
  Payload ID: 2072
  Gene Symbol: CDH19
  Gene Name: cadherin 19, type 2
  ENST ID: ENST00000579658
  CDS Start-End: 298-1923
atactgacagtgttgtggtactaaaagcacaagcgtctgtaactctgggcaatggggcacatcgagagtttgctgagaagactgtgaagcaaaaagaagaaagtttttcctactcttccttatgtgtccaacacgaagtttgctgttcagttttcacagaacttctagaagttgaagttacaaaggtatatagaaggtacacagaatcagaaaagattataaaagaaagcaagatttttgttagtgacgtcctgtttcctctgaagagtaatagttggaatcaaaagagtcaacgcaatgaactgttatttactgctgcgttttatgttgggaattcctctcctatggccttgtcttggagcaacagaaaactctcaaacaaagaaagtcaagcagccagtgcgatctcatttgagagtgaagcgtggctgggtgtggaaccaattttttgtaccagaggaaatgaatacgactagtcatcacatcggccagctaagatctgatttagacaatggaaacaattctttccagtacaagcttttgggagctggagctggaagtacttttatcattgatgaaagaacaggtgacatatatgccatacagaagcttgatagagaggagcgatccctctacatcttaagagcccaggtaatagacatcgctactggaagggctgtggaacctgagtctgagtttgtcatcaaagtttcggatatcaatgacaatgaaccaaaattcctagatgaaccttatgaggccattgtaccagagatgtctccagaaggaacattagttatccaggtgacagcaagtgatgctgacgatccctcaagtggtaataatgctcgtctcctctacagcttacttcaaggccagccatatttttctgttgaaccaacaacaggagtcataagaatatcttctaaaatggatagagaactgcaagatgagtattgggtaatcattcaagccaaggacatgattggtcagccaggagcgttgtctggaacaacaagtgtattaattaaactttcagatgttaatgacaataagcctatatttaaagaaagtttataccgcttgactgtctctgaatctgcacccactgggacttctataggaacaatcatggcatatgataatgacataggagagaatgcagaaatggattacagcattgaagaggatgattcgcaaacatttgacattattactaatcatgaaactcaagaaggaatagttatattaaaaaagaaagtggattttgagcaccagaaccactacggtattagagcaaaagttaaaaaccatcatgttcctgagcagctcatgaagtaccacactgaggcttccaccactttcattaagatccaggtggaagatgttgatgagcctcctcttttcctccttccatattatgtatttgaagtttttgaagaaaccccacagggatcatttgtaggcgtggtgtctgccacagacccagacaataggaaatctcctatcaggtattctattactaggagcaaagtgttcaatatcaatgataatggtacaatcactacaagtaactcactggatcgtgaaatcagtgcttggtacaacctaagtattacagccacagaaaaatacaatatagaacagatctcttcgatcccactgtatgtgcaagttcttaacatcaatgatcatgctcctgagttctctcaatactatgagacttatgtttgtgaaaatgcaggctctggtcaggtaattcagactatcagtgcagtggatagagatgaatccatagaagagcaccatttttactttaatctatctgtagaagacactaacaattcaagttttacaatcatagataatcaagaactggttttaaccttcaagaagaacctgtcttctacatctccatcttaattgccgacaatggaatcccgtcacttacaagtacaaacacccttaccatccatgtctgtgactgtggtgacagtgggagcacacagacctgccagtaccaggagcttgtgctttccatgggattcaagacagaagtcatcattgctattctcatttgcattatgatcatatttgggtttatttttttgactttgggtttaaaacaacggagaaaacagattctatttcctgagaaaagtgaagatttcagagagaatatattccaatatgatgatgaagggggtggagaagaagatacagaggcctttgatatagcagagctgaggagtagtaccataatgcgggaacgcaagactcggaaaaccacaagcgctgagatcaggagcctatacaggcagtctttgcaagttggccccgacagtgccatattcaggaaattcattctggaaaagctcgaagaagctaatactgatccgtgtgcccctccttttgattccctccagacctacgcttttgagggaacagggtcattagctggatccctgagctccttagaatcagcagtctctgatcaggatgaaagctatgattaccttaatgagttgggacctcgctttaaaagattagcatgcatgtttggttctgcagtgcagtcaaataattag

SEQ ID NO: 112804 - DNA, 587 bp, Homo sapiens
  Payload ID: 2072
  Gene Symbol: CDH19
  Gene Name: cadherin 19, type 2
  ENST ID: ENST00000580157
  CDS Start-End: 393-587
aatggggcacatcgagagtttgctgagaagactgtgaagcaaaaagaagaaagtttttcctactcttccttatgtgtccaacacgaagtttgctgttcagttttcacagaacttctagaagttgaagttacaaaggacttccacagctatattaaataggagtggtgagagtcagcatccttgtcttgttccagttctcaagggaaatgtttccagcgcttgcccattcagtatcatgtttgctgtgaatttgtcatagatggctcttattatatttcaggtatatagaaggtacacagaatcagaaaagattataaaagaaagcaagatttttgttagtgacgtcctgtttcctctgaagagtaatagttggaatcaaaagagtcaacgcaatgaactgttatttactgctgcgttttatgttgggaattcctctcctatggccttgtcttggagcaacagaaaactctcaaacaaagaaagtcaagcagccagtgcgatctcatttgagagtgaagcgtggctgggtgtggaaccaattttttgtaccagaggaaatgaatacgactagtcatcacatcggccag

SEQ ID NO: 112805 - DNA, 4332 bp, Homo sapiens
  Payload ID: 2073
  Gene Symbol: CDH2
  Gene Name: cadherin 2, type 1, N-cadherin (neuronal)
  Uniprot ID: P19022
  ENST ID: ENST00000269141
  CDS Start-End: 425-3145
cctccaccggccaaggtccccgccgctgcatccctcgcggcttccgctgcgctccgggccggagccgagccgcctgcgctgccacagcagccgcctccacacactcgcagacgctcacacgctctccctccctgttcccccgccccctccccagctccttgatctctgggtctgttttattactcctggtgcgagtcccgcggactccgcggcccgctatttgtcatcagctcgctctccattggcggggagcggagagcagcgaagaagggggtggggaggggaggggaagggaagggggtggaaactgcctggagccgtttctccgcgccgctgttggtgctgccgctgcctcctcctcctccgccgccgccgccgccgccgccgcctcctccggctcttcgctcggcccctctccgcctccatgtgccggatagcgggagcgctgcggaccctgctgccgctgctggcggccctgcttcaggcgtctgtagaggcttctggtgaaatcgcattatgcaagactggatttcctgaagatgtttacagtgcagtcttatcgaaggatgtgcatgaaggacagcctcttctcaatgtgaagtttagcaactgcaatggaaaaagaaaagtacaatatgagagcagtgagcctgcagattttaaggtggatgaagatggcatggtgtatgccgtgagaagctttccactctcttctgagcatgccaagttcctgatatatgcccaagacaaagagacccaggaaaagtggcaagtggcagtaaaattgagcctgaagccaaccttaactgaggagtcagtgaaggagtcagcagaagttgaagaaatagtgttcccaagacaattcagtaagcacagtggccacctacaaaggcagaagagagactgggtcatccctccaatcaacttgccagaaaactccaggggaccttttcctcaagagcttgtcaggatcaggtctgatagagataaaaacctttcactgcggtacagtgtaactgggccaggagctgaccagcctccaactggtatcttcattatcaaccccatctcgggtcagctgtcggtgacaaagcccctggatcgcgagcagatagcccggtttcatttgagggcacatgcagtagatattaatggaaatcaagtggagaaccccattgacattgtcatcaatgttattgacatgaatgacaacagacctgagttcttacaccaggtttggaatgggacagttcctgagggatcaaagcctggaacatatgtgatgaccgtaacagcaattgatgctgacgatcccaatgccctcaatgggatgttgaggtacagaatcgtgtctcaggctccaagcaccccttcacccaacatgtttacaatcaacaatgagactggtgacatcatcacagtggcagctggacttgatcgagaaaaagtgcaacagtatacgttaataattcaagctacagacatggaaggcaatcccacatatggcctttcaaacacagccacggccgtcatcacagtgacagatgtcaatgacaatcctccagagtttactgccatgacgttttatggtgaagttcctgagaacagggtagacatcatagtagctaatctaactgtgaccgataaggatcaaccccatacaccagcctggaacgcagtgtacagaatcagtggcggagatcctactggacggttcgccatccagaccgacccaaacagcaacgacgggttagtcaccgtggtcaaaccaatcgactttgaaacaaataggatgtttgtccttactgttgctgcagaaaatcaagtgccattagccaagggaattcagcacccccctcagtcaactgcaaccgtgtctgttacagttattgacgtaaatgaaaacccttattttgcccccaatcctaagatcattcgccaagaagaagggcttcatgccggtaccatgttgacaacattcactgctcaggacccagatcgatatatgcagcaaaatattagatacactaaattatctgatcctgccaattggctaaaaatagatcctgtgaatggacaaataactacaattgctgttttggaccgagaatcaccaaatgtgaaaaacaatatatataatgctactttccttgcttctgacaatggaattcctcctatgagtggaacaggaacgctgcagatctatttacttgatattaatgacaatgcccctcaagtgttacctcaagaggcagagacttgcgaaactccagaccccaattcaattaatattacagcacttgattatgacattgatccaaatgctggaccatttgcttttgatcttcctttatctccagtgactattaagagaaattggaccatcactcggcttaatggtgattttgctcagcttaatttaaagataaaatttcttgaagctggtatctatgaagttcccatcataatcacagattcgggtaatcctcccaaatcaaatatttccatcctgcgtgtgaaggtttgccagtgtgactccaacggggactgcacagatgtggacaggattgtgggtgcggggcttggcaccggtgccatcattgccatcctgctctgcatcatcatcctgcttatccttgtgctgatgtttgtggtatggatgaaacgccgggataaagaacgccaggccaaacaacttttaattgatccagaagatgatgtaagagataatattttaaaatatgatgaagaaggtggaggagaagaagaccaggactatgacttgagccagctgcagcagcctgacactgtggagcctgatgccatcaagcctgtgggaatccgacgaatggatgaaagacccatccacgccgagccccagtatccggtccgatctgcagccccacaccctggagacattggggacttcattaatgagggccttaaagcggctgacaatgaccccacagctccaccatatgactccctgttagtgtttgactatgaaggcagtggctccactgctgggtccttgagctcccttaattcctcaagtagtggtggtgagcaggactatgattacctgaacgactgggggccacggttcaagaaacttgctgacatgtatggtggaggtgatgactgaacttcagggtgaacttggtttttggacaagtacaaacaatttcaactgatattcccaaaaagcattcagaagctaggctttaactttgtagtctactagcacagtgcttgctggaggctttggcataggctgcaaaccaatttgggctcagagggaatatcagtgatccatactgtttggaaaaacactgagctcagttacacttgaattttacagtacagaagcactgggattttatgtgcctttttgtacctttttcagattggaattagttttctgtttaaggctttaatggtactgatttctgaaacgataagtaaaagacaaaatattttgtggtgggagcagtaagttaaaccatgatatgcttcaacacgcttttgttacattgcatttgcttttattaaaatacaaaattaaacaaacaaaaaaactcatggagcgattttattatcttgggggatgagaccatgagattggaaaatgtacattacttctagttttagactttagtttgtttttttttttttcactaaaatcttaaaacttactcagctggttgcaaataaagggagttttcatatcaccaatttgtagcaaaattgaattttttcataaactagaatgttagacacattttggtcttaatccatgtacacttttttatttctgtatttttccacttcactgtaaaaatagtatgtgtacataatgttttattggcatagtctatggagaagtgcagaaacttcagaacatgtgtatgtattatttggactatggattcaggttttttgcatgtttatatctttcgttatggataaagtatttacaaaacagtgacatttgattcaattgttgagctgtagttagaatactcaatttttaatttttttaatttttttattttttattttctttttggtttggggagggagaaaagttcttagcacaaatgttttacataatttgtaccaaaaaaaaaaaaaaaggaaaggaaagaaaggggtggcctgacactggtggcactactaagtgtgtgtttttttaaaaaaaaaatggaaaaaaaaaagcttttaaactggagagacttctgacaacagctttgcctctgtattgtgtaccagaatataaatgatacacctctgaccccagcgttctgaataaaatgctaattttggatctgg

SEQ ID NO: 112806 - DNA, 3737 bp, Homo sapiens
  Payload ID: 2073
  Gene Symbol: CDH2
  Gene Name: cadherin 2, type 1, N-cadherin (neuronal)
  Uniprot ID: P19022
  ENST ID: ENST00000399380
  CDS Start-End: 38-2665
aagcagaaggaattatgggaaatggaaacttgatggcatgtttttattaaggcgttatgtgtgtatcttcactgagaaattaaagaaccaagcagaattgtatgttttcctttcagtgaagtttagcaactgcaatggaaaaagaaaagtacaatatgagagcagtgagcctgcagattttaaggtggatgaagatggcatggtgtatgccgtgagaagctttccactctcttctgagcatgccaagttcctgatatatgcccaagacaaagagacccaggaaaagtggcaagtggcagtaaaattgagcctgaagccaaccttaactgaggagtcagtgaaggagtcagcagaagttgaagaaatagtgttcccaagacaattcagtaagcacagtggccacctacaaaggcagaagagagactgggtcatccctccaatcaacttgccagaaaactccaggggaccttttcctcaagagcttgtcaggatcaggtctgatagagataaaaacctttcactgcggtacagtgtaactgggccaggagctgaccagcctccaactggtatcttcattatcaaccccatctcgggtcagctgtcggtgacaaagcccctggatcgcgagcagatagcccggtttcatttgagggcacatgcagtagatattaatggaaatcaagtggagaaccccattgacattgtcatcaatgttattgacatgaatgacaacagacctgagttcttacaccaggtttggaatgggacagttcctgagggatcaaagcctggaacatatgtgatgaccgtaacagcaattgatgctgacgatcccaatgccctcaatgggatgttgaggtacagaatcgtgtctcaggctccaagcaccccttcacccaacatgtttacaatcaacaatgagactggtgacatcatcacagtggcagctggacttgatcgagaaaaagtgcaacagtatacgttaataattcaagctacagacatggaaggcaatcccacatatggcctttcaaacacagccacggccgtcatcacagtgacagatgtcaatgacaatcctccagagtttactgccatgacgttttatggtgaagttcctgagaacagggtagacatcatagtagctaatctaactgtgaccgataaggatcaaccccatacaccagcctggaacgcagtgtacagaatcagtggcggagatcctactggacggttcgccatccagaccgacccaaacagcaacgacgggttagtcaccgtggtcaaaccaatcgactttgaaacaaataggatgtttgtccttactgttgctgcagaaaatcaagtgccattagccaagggaattcagcacccccctcagtcaactgcaaccgtgtctgttacagttattgacgtaaatgaaaacccttattttgcccccaatcctaagatcattcgccaagaagaagggcttcatgccggtaccatgttgacaacattcactgctcaggacccagatcgatatatgcagcaaaatattagatacactaaattatctgatcctgccaattggctaaaaatagatcctgtgaatggacaaataactacaattgctgttttggaccgagaatcaccaaatgtgaaaaacaatatatataatgctactttccttgcttctgacaatggaattcctcctatgagtggaacaggaacgctgcagatctatttacttgatattaatgacaatgcccctcaagtgttacctcaagaggcagagacttgcgaaactccagaccccaattcaattaatattacagcacttgattatgacattgatccaaatgctggaccatttgcttttgatcttcctttatctccagtgactattaagagaaattggaccatcactcggcttaatggtgattttgctcagcttaatttaaagataaaatttcttgaagctggtatctatgaagttcccatcataatcacagattcgggtaatcctcccaaatcaaatatttccatcctgcgtgtgaaggtttgccagtgtgactccaacggggactgcacagatgtggacaggattgtgggtgcggggcttggcaccggtgccatcattgccatcctgctctgcatcatcatcctgcttatccttgtgctgatgtttgtggtatggatgaaacgccgggataaagaacgccaggccaaacaacttttaattgatccagaagatgatgtaagagataatattttaaaatatgatgaagaaggtggaggagaagaagaccaggactatgacttgagccagctgcagcagcctgacactgtggagcctgatgccatcaagcctgtgggaatccgacgaatggatgaaagacccatccacgccgagccccagtatccggtccgatctgcagccccacaccctggagacattggggacttcattaatgagggccttaaagcggctgacaatgaccccacagctccaccatatgactccctgttagtgtttgactatgaaggcagtggctccactgctgggtccttgagctcccttaattcctcaagtagtggtggtgagcaggactatgattacctgaacgactgggggccacggttcaagaaacttgctgacatgtatggtggaggtgatgactgaacttcagggtgaacttggtttttggacaagtacaaacaatttcaactgatattcccaaaaagcattcagaagctaggctttaactttgtagtctactagcacagtgcttgctggaggctttggcataggctgcaaaccaatttgggctcagagggaatatcagtgatccatactgtttggaaaaacactgagctcagttacacttgaattttacagtacagaagcactgggattttatgtgcctttttgtacctttttcagattggaattagttttctgtttaaggctttaatggtactgatttctgaaacgataagtaaaagacaaaatattttgtggtgggagcagtaagttaaaccatgatatgcttcaacacgcttttgttacattgcatttgcttttattaaaatacaaaattaaacaaacaaaaaaactcatggagcgattttattatcttgggggatgagaccatgagattggaaaatgtacattacttctagttttagactttagtttgtttttttttttttcactaaaatcttaaaacttactcagctggttgcaaataaagggagttttcatatcaccaatttgtagcaaaattgaattttttcataaactagaatgttagacacattttggtcttaatccatgtacacttttttatttctgtatttttccacttcactgtaaaaatagtatgtgtacataatgttttattggcatagtctatggagaagtgcagaaacttcagaacatgtgtatgtattatttggactatggattcaggttttttgcatgtttatatctttcgttatggataaagtatttacaaaacagtgacatttgattcaattgttgagctgtagttagaatactcaatttttaatttttttaatttttttattttttattttctttttggtttggggagggagaaaagttcttagcacaaatgttttacataatttgtaccaaaaaaaaaaaaaaaggaaaggaaagaaaggggtggcctgacactggtggcactactaagtgtgtgtttttttaaaaaaaaaatggaaaaaaaaaa

SEQ ID NO: 112807 - DNA, 740 bp, Homo sapiens
  Payload ID: 2073
  Gene Symbol: CDH2
  Gene Name: cadherin 2, type 1, N-cadherin (neuronal)
  ENST ID: ENST00000418492
  CDS Start-End: 168-740
agtaagagtgttccactcagataggctagcatgagcaaggcagaagcctgaaacagttggatgtgttccagaaactgtaagcaattgaatacaatggaaatgaagttcatttacaagaccatgatgagagaattgacttttaggctgtggccacattgttgaaggacatgtgtaacactcaaaggatgaagtttagcaactgcaatggaaaaagaaaagtacaatatgagagcagtgagcctgcagattttaaggtggatgaagatggcatggtgtatgccgtgagaagctttccactctcttctgagcatgccaagttcctgatatatgcccaagacaaagagacccaggaaaagtggcaagtggcagtaaaattgagcctgaagccaaccttaactgaggagtcagtgaaggagtcagcagaagttgaagaaatagtgttcccaagacaattcagtaagcacagtggccacctacaaaggcagaagagagactgggtcatccctccaatcaacttgccagaaaactccaggggaccttttcctcaagagcttgtcaggatcaggtctgatagagataaaaacctttcactgcggtacagtgtaactgggccaggagctgaccagcctccaactggtatcttcattatcaaccccatctcgggtcagctgtcggtgacaaagcccctggatcgcgagcagatagcccggtttcatttgagggcacatgcagtagatatt

SEQ ID NO: 112808 - DNA, 610 bp, Homo sapiens
  Payload ID: 2073
  Gene Symbol: CDH2
  Gene Name: cadherin 2, type 1, N-cadherin (neuronal)
  ENST ID: ENST00000430882
  CDS Start-End: 251-610
aagaaacacaaatacacattgattccttgtagacacagatgcagaagtgaagaaaggatactactttcttttatcctgcacatcagagcgggtacaccgtcagctacaagggagaccctgataatgcctcagggggactctaagcagagtgtactggaaatacagagtgaagtttagcaactgcaatggaaaaagaaaagtacaatatgagagcagtgagcctgcagattttaaggtggatgaagatggcatggtgtatgccgtgagaagctttccactctcttctgagcatgccaagttcctgatatatgcccaagacaaagagacccaggaaaagtggcaagtggcagtaaaattgagcctgaagccaaccttaactgaggagtcagtgaaggagtcagcagaagttgaagaaatagtgttcccaagacaattcagtaagcacagtggccacctacaaaggcagaagagagactgggtcatccctccaatcaacttgccagaaaactccaggggaccttttcctcaagagcttgtcaggatcaggtctgatagagataaaaacctttcactgcggtacagtgtaactgggccaggagctgaccagcct

SEQ ID NO: 112809 - DNA, 563 bp, Homo sapiens
  Payload ID: 2073
  Gene Symbol: CDH2
  Gene Name: cadherin 2, type 1, N-cadherin (neuronal)
  ENST ID: ENST00000413878
  CDS Start-End: 345-563
agattgctgcagggaatctgtgagctcccagcatggaaaatgagatcaccaagcttcttttctgtggacctgtgactcccagatgggcggagtaggggacagggttgggcaccagctgctcagattattctttcaaatgcaggcttcaggcgtctgtagaggcttctggtgaaatcgcattatgcaagactggatttcctgaagatgtttacagtgcagtcttatcgaaggatgtgcatgaaggacagcctcttctcaatgtgaagtttagcaactgcaatggaaaaagaaaagtacaatatgagagcagtgagcctgcagattttaaggtggatgaagatggcatggtgtatgccgtgagaagctttccactctcttctgagcatgccaagttcctgatatatgcccaagacaaagagacccaggaaaagtggcaagtggcagtaaaattgagcctgaagccaaccttaactgaggagtcagtgaaggagtcagcagaagttgaagaaatagtgttcccaagacaattcagtaagcacagtggccacctacaaaggcagaag

SEQ ID NO: 112810 - DNA, 3882 bp, Homo sapiens
  Payload ID: 2074
  Gene Symbol: CDH20
  Gene Name: cadherin 20, type 2
  Uniprot ID: Q9HBT6
  ENST ID: ENST00000262717
  CDS Start-End: 399-2804
acttggcagtaccccccaactcctggcaaccgcacggagactttgcgaaacatccgaaggcagaaaagctgtgacacttctgacagagggggtaggggggtggggggcggggacagcgccgcgagcaggggtgaagagacccagcggggcaccagccgcccagtgggggaggcagctacgtgagcagaacgcccgccctggagcagttaggaccgaaggtctccggagagtcgccggcggtgccaggaagtcaacttcaagcagattgacttgaaacgggatctcatttaggaagcataagtgtccaatcaaaaactgtgtatttttttaaatttggaaaatactcaagttccagttgcttatcattctccttcattttctgaaaacctggcaatcccatgtggacttctggtagaatgagcaatgcaaagaactggcttggacttggcatgtccttgtacttctgggggctgatggaccttacgaccaccgttctctcggacaccccaacaccacaaggtgaattagaagcactcctgtcagacaagccacagtcacatcagcggaccaagaggagctgggtttggaaccagtttttcgttctggaagagtacactgggaccgaccctttgtatgtcggcaagcttcattcagatatggacaggggagacggatccatcaaatacatcctctcgggagaaggtgctggcatcgtgtttaccatcgacgacaccactggagacatccacgccattcagaggctcgaccgagaggaaagagcccagtatactctaagggctcaagccctagacaggcggacgggcaggccaatggagcccgagtcagagttcatcatcaaaattcaagacatcaatgacaatgagcccaagttcctggacggaccttatgtggccactgtgccagaaatgtcccctgtgggtacctccgtcatccaagtgacagccacagatgcagatgacccgacctacggcaacagtgccagggtggtgtacagcattcttcagggccagccatatttttctgtggactctaaaacaggtgtaattaggacagcgctcatgaacatggacagagaagccaaagaatactacgaagtgattatccaagccaaggacatgggagggcagcttggaggattagctgggaccacaacagtcaacatcaccctctcagatgtcaatgataacccaccccgctttccccagaaacattaccagatgagtgtgttggaatcagctccaattagctccactgtcgggagagtgtttgccaaggacttggatgaaggcatcaatgcagagatgaaatatactattgtggatggagatggtgcagatgcctttgacattagcacagatcccaatttccaagttggtatcataactgtgaagaagcccctgagttttgaaagcaagaaaagctacaccttaaaggtggagggagccaatcctcacctagagatgcgttttctgaacttgggcccatttcaggacacaacaacagtgcacatcagtgtggaagacgtggacgagccccctgtgtttgaacctggcttttactttgtggaggtgcctgaggatgtggcgattggaacaaccatacagatcatttctgccaaggacccagatgtgaccaacaactcaatcagatactccattgatagaagcagtgaccctggaagatttttctatgttgacattacaacaggtgccctaatgacagcaagacccctagaccgggaagaattttcttggcataatatcactgtccttgctatggaaatgaacaatccctcccaggttggaagtgttcctgtcacaatcaaagtcttagatgtgaatgacaatgctccagagttccccagattctatgaagcttttgtctgtgagaacgccaaggcaggacagctgatccagacagtgagtgcggtggaccaagatgacccacgcaatggtcagcatttctactacagcttggctcctgaggctgctaacaaccccaactttaccataagggacaaccaagataacacagcacggattctaaccaggaggtctggtttccggcagcaggagcagagtgtctttcacctgcctatcctgatagcagatagcgggcagcccgtgctgagcagcacaggcacactgaccatccaagtgtgcagctgtgatgacgacggccacgtcatgtcctgcagcccagaggcctacatgctcccagtcagtttgagccggggcgccctcattgccatcctcgcctgcatctttgtcctcttagtgctggtgttgctcattttgtccatgaggcggcaccggaaacaaccatacatcatcgacgacgaggaaaacatccacgagaacatcgtccgctacgacgacgagggcggcggcgaggaggacaccgaggccttcgacatcgcggccatgtggaacccccgggaggcgcaggcgggggccgcccccaagacgcggcaggacatgctgcccgagatcgagagcctctcccgctacgtgcctcagacgtgcgcagtgaacagcactgtccacagctacgtgctggccaagctctacgaggccgacatggacctgtgggcaccgcccttcgactccctccagacgtatatgttcgagggggacggctctgtggcggggtcgctgagctccctgcagtcggccacgtcggactcggaacagagcttcgacttcctgacggactgggggccccgcttccggaagctggccgagctctacggggcgtcggagggacccgcgccgctgtggtgacggaagccaggaggcaggcgcgcgtccaaatccagacgttctccgcgggtgcttcgcggacaaggtgcagccaaccacacgagcaatactgtgctggagagtgagaatgggggtgagcaggcgaacagagctctctctggatcagctttacttgggtagattaagttaaataagcaaaaggaaacccagaaggaagagggcagaatctttaattacctttttttcttttctttttgatttttctgacactgtgtgcgaaggcttggagtccaaggtgttctgacaagggtggcttttctctgccattcgctaaggcctttgtcacttttccaccacagaaaggctctggccttggatacagagatgccaattgaaagcagaaagttctactctcgtatctgttttttatcttatcttattctccatttaagagttttgctggctcaaaccacagaaaccaacccacaagaaagaacaaaaaacttgttactcagtgaaattaacctacttgttctgggatggatggaatttcccgtaacccttttgagacaaggttaagactgaatcagccttgcatgggggtggatgggtgggagggtgggtgaaggaagagacattgactttatgctcaagtttagtggctgaaccaagagatgttggcattacagctcatccaacgccatcaagttagagtgctcgtgtctcctctcagctatttaactgtgcccctgcaaaattgttcagaatgaaaccagaaaaatctgcctcttttgcactgtagatgtctcttccatgtgccaaatgtggagattagatgctacaaatgaaagccaaataaaaaagaagtatctgacaaaagcatgggttagagggctttcctaatctgtgtgaggtcaatccaagggatgtttacatactgtagataacctacttgaacaaaaatcagtattatagagaataaatggatgtaagaaaattacatgtacaagttttgtatatttgttaataattttggtaataaatatgatgtactgcatctcagtaccttagcacttcttttaataaaagttaaatagaa

SEQ ID NO: 112811 - DNA, 2683 bp, Homo sapiens
  Payload ID: 2074
  Gene Symbol: CDH20
  Gene Name: cadherin 20, type 2
  Uniprot ID: Q9HBT6
  ENST ID: ENST00000538374
  CDS Start-End: 278-2683
gatgtgcgccgggaaggggaccagagagccaggctccggggaggcgcaggcacctacggggccgatccctggtccgtgcctcgcgccgcgcccccgccggagctcggctgtgggaggagaatgtggaagtcaacttcaagcagattgacttgaaacgggatctcatttaggaagcataagtgtccaatcaaaaactgtgtatttttttaaatttggaaaatactcaagttccagttgcttatcattctccttcattttctgaaaacctggcaatcccatgtggacttctggtagaatgagcaatgcaaagaactggcttggacttggcatgtccttgtacttctgggggctgatggaccttacgaccaccgttctctcggacaccccaacaccacaaggtgaattagaagcactcctgtcagacaagccacagtcacatcagcggaccaagaggagctgggtttggaaccagtttttcgttctggaagagtacactgggaccgaccctttgtatgtcggcaagcttcattcagatatggacaggggagacggatccatcaaatacatcctctcgggagaaggtgctggcatcgtgtttaccatcgacgacaccactggagacatccacgccattcagaggctcgaccgagaggaaagagcccagtatactctaagggctcaagccctagacaggcggacgggcaggccaatggagcccgagtcagagttcatcatcaaaattcaagacatcaatgacaatgagcccaagttcctggacggaccttatgtggccactgtgccagaaatgtcccctgtgggtacctccgtcatccaagtgacagccacagatgcagatgacccgacctacggcaacagtgccagggtggtgtacagcattcttcagggccagccatatttttctgtggactctaaaacaggtgtaattaggacagcgctcatgaacatggacagagaagccaaagaatactacgaagtgattatccaagccaaggacatgggagggcagcttggaggattagctgggaccacaacagtcaacatcaccctctcagatgtcaatgataacccaccccgctttccccagaaacattaccagatgagtgtgttggaatcagctccaattagctccactgtcgggagagtgtttgccaaggacttggatgaaggcatcaatgcagagatgaaatatactattgtggatggagatggtgcagatgcctttgacattagcacagatcccaatttccaagttggtatcataactgtgaagaagcccctgagttttgaaagcaagaaaagctacaccttaaaggtggagggagccaatcctcacctagagatgcgttttctgaacttgggcccatttcaggacacaacaacagtgcacatcagtgtggaagacgtggacgagccccctgtgtttgaacctggcttttactttgtggaggtgcctgaggatgtggcgattggaacaaccatacagatcatttctgccaaggacccagatgtgaccaacaactcaatcagatactccattgatagaagcagtgaccctggaagatttttctatgttgacattacaacaggtgccctaatgacagcaagacccctagaccgggaagaattttcttggcataatatcactgtccttgctatggaaatgaacaatccctcccaggttggaagtgttcctgtcacaatcaaagtcttagatgtgaatgacaatgctccagagttccccagattctatgaagcttttgtctgtgagaacgccaaggcaggacagctgatccagacagtgagtgcggtggaccaagatgacccacgcaatggtcagcatttctactacagcttggctcctgaggctgctaacaaccccaactttaccataagggacaaccaagataacacagcacggattctaaccaggaggtctggtttccggcagcaggagcagagtgtctttcacctgcctatcctgatagcagatagcgggcagcccgtgctgagcagcacaggcacactgaccatccaagtgtgcagctgtgatgacgacggccacgtcatgtcctgcagcccagaggcctacatgctcccagtcagtttgagccggggcgccctcattgccatcctcgcctgcatctttgtcctcttagtgctggtgttgctcattttgtccatgaggcggcaccggaaacaaccatacatcatcgacgacgaggaaaacatccacgagaacatcgtccgctacgacgacgagggcggcggcgaggaggacaccgaggccttcgacatcgcggccatgtggaacccccgggaggcgcaggcgggggccgcccccaagacgcggcaggacatgctgcccgagatcgagagcctctcccgctacgtgcctcagacgtgcgcagtgaacagcactgtccacagctacgtgctggccaagctctacgaggccgacatggacctgtgggcaccgcccttcgactccctccagacgtatatgttcgagggggacggctctgtggcggggtcgctgagctccctgcagtcggccacgtcggactcggaacagagcttcgacttcctgacggactgggggccccgcttccggaagctggccgagctctacggggcgtcggagggacccgcgccgctgtggtga

SEQ ID NO: 112812 - DNA, 2855 bp, Homo sapiens
  Payload ID: 2074
  Gene Symbol: CDH20
  Gene Name: cadherin 20, type 2
  Uniprot ID: Q9HBT6
  ENST ID: ENST00000536675
  CDS Start-End: 13-2418
cctggcaatcccatgtggacttctggtagaatgagcaatgcaaagaactggcttggacttggcatgtccttgtacttctgggggctgatggaccttacgaccaccgttctctcggacaccccaacaccacaaggtgaattagaagcactcctgtcagacaagccacagtcacatcagcggaccaagaggagctgggtttggaaccagtttttcgttctggaagagtacactgggaccgaccctttgtatgtcggcaagcttcattcagatatggacaggggagacggatccatcaaatacatcctctcgggagaaggtgctggcatcgtgtttaccatcgacgacaccactggagacatccacgccattcagaggctcgaccgagaggaaagagcccagtatactctaagggctcaagccctagacaggcggacgggcaggccaatggagcccgagtcagagttcatcatcaaaattcaagacatcaatgacaatgagcccaagttcctggacggaccttatgtggccactgtgccagaaatgtcccctgtgggtacctccgtcatccaagtgacagccacagatgcagatgacccgacctacggcaacagtgccagggtggtgtacagcattcttcagggccagccatatttttctgtggactctaaaacaggtgtaattaggacagcgctcatgaacatggacagagaagccaaagaatactacgaagtgattatccaagccaaggacatgggagggcagcttggaggattagctgggaccacaacagtcaacatcaccctctcagatgtcaatgataacccaccccgctttccccagaaacattaccagatgagtgtgttggaatcagctccaattagctccactgtcgggagagtgtttgccaaggacttggatgaaggcatcaatgcagagatgaaatatactattgtggatggagatggtgcagatgcctttgacattagcacagatcccaatttccaagttggtatcataactgtgaagaagcccctgagttttgaaagcaagaaaagctacaccttaaaggtggagggagccaatcctcacctagagatgcgttttctgaacttgggcccatttcaggacacaacaacagtgcacatcagtgtggaagacgtggacgagccccctgtgtttgaacctggcttttactttgtggaggtgcctgaggatgtggcgattggaacaaccatacagatcatttctgccaaggacccagatgtgaccaacaactcaatcagatactccattgatagaagcagtgaccctggaagatttttctatgttgacattacaacaggtgccctaatgacagcaagacccctagaccgggaagaattttcttggcataatatcactgtccttgctatggaaatgaacaatccctcccaggttggaagtgttcctgtcacaatcaaagtcttagatgtgaatgacaatgctccagagttccccagattctatgaagcttttgtctgtgagaacgccaaggcaggacagctgatccagacagtgagtgcggtggaccaagatgacccacgcaatggtcagcatttctactacagcttggctcctgaggctgctaacaaccccaactttaccataagggacaaccaagataacacagcacggattctaaccaggaggtctggtttccggcagcaggagcagagtgtctttcacctgcctatcctgatagcagatagcgggcagcccgtgctgagcagcacaggcacactgaccatccaagtgtgcagctgtgatgacgacggccacgtcatgtcctgcagcccagaggcctacatgctcccagtcagtttgagccggggcgccctcattgccatcctcgcctgcatctttgtcctcttagtgctggtgttgctcattttgtccatgaggcggcaccggaaacaaccatacatcatcgacgacgaggaaaacatccacgagaacatcgtccgctacgacgacgagggcggcggcgaggaggacaccgaggccttcgacatcgcggccatgtggaacccccgggaggcgcaggcgggggccgcccccaagacgcggcaggacatgctgcccgagatcgagagcctctcccgctacgtgcctcagacgtgcgcagtgaacagcactgtccacagctacgtgctggccaagctctacgaggccgacatggacctgtgggcaccgcccttcgactccctccagacgtatatgttcgagggggacggctctgtggcggggtcgctgagctccctgcagtcggccacgtcggactcggaacagagcttcgacttcctgacggactgggggccccgcttccggaagctggccgagctctacggggcgtcggagggacccgcgccgctgtggtgacggaagccaggaggcaggcgcgcgtccaaatccagacgttctccgcgggtgcttcgcggacaaggtgcagccaaccacacgagcaatactgtgctggagagtgagaatgggggtgagcaggcgaacagagctctctctggatcagctttacttgggtagattaagttaaataagcaaaaggaaacccagaaggaagagggcagaatctttaattacctttttttcttttctttttgatttttctgacactgtgtgcgaaggcttggagtccaaggtgttctgacaagggtggcttttctctgccattcgctaaggcctttgtcacttttccaccacagaaaggctctggccttggatacagagatgccaattgaaagcagaaagttctactctcgtatctgttttttatcttatcttattctccatttaagagtttt

SEQ ID NO: 112813 - DNA, 3661 bp, Homo sapiens
  Payload ID: 2075
  Gene Symbol: CDH22
  Gene Name: cadherin 22, type 2
  Uniprot ID: Q9UJ99
  ENST ID: ENST00000372262
  CDS Start-End: 402-2888
aggctcctgatggaaagggaaggcccctagtcctggcaggatctgccggccccaacccgcatcctttctgcgcaggaaccatggcgcttccccgactctggagctgtccaggtgctgcctggtgatccgcacgcgacgcggcgacgggggcgcgggcgggcaccccgggggctgtccatgccccggatgcggccgcgccccctccccctccagccgggtacccccgcggctgggcggcgttcagggccgcgggcccgtccgggtgccccgtcgggggcgacatcccggcggccgcgctgaggccaccatgtgacacggcgccgcatcgttgtgcgaccaagcagcggcgccctggtgcctctcgtccatgctcctgggccccagccccgcgcaggccaaggatgaggccgaggcccgaaggtagggggctccgggcgggagtcgcgctgtcccccgcgctactgctgctgctgctgctgccgccgccgccgacgctgctggggcgcctgtgggcagcgggcacaccctcgccgtcggcgcccggagctcggcaggacggcgcgctgggagccggccgcgtcaaacgcggctgggtgtggaaccagttcttcgtggtagaggagtacacgggcacggagcccctgtatgtgggcaagatccactccgactcagacgagggtgacggggccatcaagtacaccatctcaggcgagggtgctgggaccatcttcctgatcgacgagctgacaggcgacattcatgccatggagcgcctggaccgcgagcagaaaaccttctacacgctgcgggcccaggctcgggatcgcgccaccaaccgcctactggagcccgagtcggagttcatcatcaaggtgcaggacatcaatgacagtgagccccgcttcctgcacggcccctatattggcagcgtggccgagctctcacctacaggcacgtcggtgatgcaggtgatggcctcggatgcggatgaccccacgtacggcagcagcgctcggctggtgtacagcgtgctggacggcgagcaccacttcaccgtggaccccaagaccggcgtaatccggacggctgtgcctgaccttgaccgcgagagccaggagcgctacgaggtggtgatccaggccacagacatggcgggtcagctgggtggcctctcgggctccactaccgtcaccatcgtagtcaccgacgtcaatgacaacccgccccgtttcccgcagaagatgtaccagttcagcatccaggagtcagcccccattggaacggctgtgggacgtgtgaaggctgaggactcagacgtgggagagaacacagacatgacttaccaccttaaggacgagagcagcagcggcggcgatgtgttcaaggtcaccacagacagcgacactcaggaggccatcatcgtagtgcagaagcgcctggacttcgaatcccagcccgtgcacaccgtgatcctggaggccctcaacaagttcgtggacccccgcttcgccgacctgggcacgttccgcgaccaggcgatcgtgcgcgtggccgtgaccgacgtggacgagccccccgagttccggccgccctccggcctcctggaggtgcaggaggacgcgcaggtgggctccctggtcggcgtggtgacggcgcgggaccccgacgccgccaaccggcccgtccggtacgccattgaccgcgaatcagatttggaccagatcttcgatatcgatgcggacacaggcgccatcgtgactggcaaggggctggaccgcgagacggccggctggcacaacatcacagtgctggccatggaggcggacaatcatgcacagctatcccgggcatccctaaggatccgaatcctggatgtgaacgacaatcccccagaactggccacaccctacgaggcagctgtatgcgaggatgccaagccaggccagctcatccagaccatcagcgtggtggacagagacgagccccaaggcgggcaccgcttctatttccgcctggtgcctgaagctcccagcaaccctcatttctctctgcttgacatccaagacaacaccgctgcagtgcacacgcagcacgtgggcttcaaccggcaggagcaggacgtgttcttcctgcccatcctggtggtagacagtgggccgcccacactgagcagcacaggcacgctcaccatccgcatctgtggctgcgacagctccggcaccatccagtcctgcaacaccacggcctttgtcatggccgcctccctcagccccggcgccctcatcgccctcttggtctgcgttctcatcctggttgtgctggtgctgctgatcctcaccctcaggcgccaccacaagagccacctgagctcggacgaggatgaagacatgcgggacaacgtcatcaaatacaacgacgaaggcggcggcgagcaggacaccgaagcctacgacatgtcggcgctgcggagcctctacgacttcggcgagctcaagggcggcgacgggggcggcagcgcgggcgggggagcgggcgggggctcgggcgggggcgcgggcagccccccgcaggcccacctgccctccgagcgccactcgctgccgcaggggccgccgagccccgagccagacttctcagtgttcagggacttcatcagccgcaaggtggcactggcggacggggacctgtcggtgccgccctacgacgccttccagacctacgccttcgagggcgcggactcgccggccgcctcgctcagctccctgcacagcggctcgtcgggctccgagcaggacttcgcctatctcagcagctggggtccgcgcttccggcccctggccgcgctctacgccggccaccgcggggacgacgaggcccaggcctcctagcccctcgccctgccgtcggggcgcggctgctcacccgcccagcacacgccggggccccaggacaacgcgtttcccccgcggaccccctttcctgccctcccccaaccctcccttggcggctggacggaggggggacttgctaggagcggactcttccattcctcctcctctaggggtgcagctttggagcccagaggtgcgggattctgaccaacggcattaaaactgaggcgagaccgggcacggtgtggctctggggttagaatgggagatgggggtggcgttgcagagtcgggaaggggcgggtcactcaatcctggcctgggggagaatgctggagggagcacgccgctgagatgcccccaccccaggtttcccccatcagagttaagaggaaagaaggctgttcacttactaagcacctactgtgtgctgggacgctgtacagagaccagctcagtcgtcagagaaaccatgaggtggtgtcctgcacggaatagaaggggaaaggaccccagagaagtggctgtgacccgtccaagggcacctggccagtgaatggcagagcctctggcactgaccagctgcctggcctcgggcaagtcacttcacttctctggtcctcagtttcctcatctgtcaaatggggttaataacagaacctacctcgaagagttgtgaggctaaaaagggttcatatgtgtcaagtggttaggacagtgcctggcacatagtaggtgttcaataaatgctagcctttgttactattctta

SEQ ID NO: 112814 - DNA, 3902 bp, Homo sapiens
  Payload ID: 2075
  Gene Symbol: CDH22
  Gene Name: cadherin 22, type 2
  Uniprot ID: Q9UJ99
  ENST ID: ENST00000537909
  CDS Start-End: 644-3130
agacacgcacactccctcgctcccgctcgctcgctcactccctcgctctctcgctctctcgctctctcgctcacacacacgcgcgcacacgccgccgcggctccccctctcgctcccgctctccctccggctcctgcgggcggccgcggggctccggactcgcccgctgcccgcgccggggctcccgccccacgcagcgtcccgaggcggcaggactagggggagccccgggccgctccccgaggctcctgatggaaagggaaggcccctagtcctggcaggatctgccggccccaacccgcatcctttctgcgcaggaaccatggcgcttccccgactctggagctgtccaggtgctgcctggtgatccgcacgcgacgcggcgacgggggcgcgggcgggcaccccgggggctgtccatgccccggatgcggccgcgccccctccccctccagccgggtacccccgcggctgggcggcgttcagggccgcgggcccgtccgggtgccccgtcgggggcgacatcccggcggccgcgctgaggccaccatgtgacacggcgccgcatcgttgtgcgaccaagcagcggcgccctggtgcctctcgtccatgctcctgggccccagccccgcgcaggccaaggatgaggccgaggcccgaaggtagggggctccgggcgggagtcgcgctgtcccccgcgctactgctgctgctgctgctgccgccgccgccgacgctgctggggcgcctgtgggcagcgggcacaccctcgccgtcggcgcccggagctcggcaggacggcgcgctgggagccggccgcgtcaaacgcggctgggtgtggaaccagttcttcgtggtagaggagtacacgggcacggagcccctgtatgtgggcaagatccactccgactcagacgagggtgacggggccatcaagtacaccatctcaggcgagggtgctgggaccatcttcctgatcgacgagctgacaggcgacattcatgccatggagcgcctggaccgcgagcagaaaaccttctacacgctgcgggcccaggctcgggatcgcgccaccaaccgcctactggagcccgagtcggagttcatcatcaaggtgcaggacatcaatgacagtgagccccgcttcctgcacggcccctatattggcagcgtggccgagctctcacctacaggcacgtcggtgatgcaggtgatggcctcggatgcggatgaccccacgtacggcagcagcgctcggctggtgtacagcgtgctggacggcgagcaccacttcaccgtggaccccaagaccggcgtaatccggacggctgtgcctgaccttgaccgcgagagccaggagcgctacgaggtggtgatccaggccacagacatggcgggtcagctgggtggcctctcgggctccactaccgtcaccatcgtagtcaccgacgtcaatgacaacccgccccgtttcccgcagaagatgtaccagttcagcatccaggagtcagcccccattggaacggctgtgggacgtgtgaaggctgaggactcagacgtgggagagaacacagacatgacttaccaccttaaggacgagagcagcagcggcggcgatgtgttcaaggtcaccacagacagcgacactcaggaggccatcatcgtagtgcagaagcgcctggacttcgaatcccagcccgtgcacaccgtgatcctggaggccctcaacaagttcgtggacccccgcttcgccgacctgggcacgttccgcgaccaggcgatcgtgcgcgtggccgtgaccgacgtggacgagccccccgagttccggccgccctccggcctcctggaggtgcaggaggacgcgcaggtgggctccctggtcggcgtggtgacggcgcgggaccccgacgccgccaaccggcccgtccggtacgccattgaccgcgaatcagatttggaccagatcttcgatatcgatgcggacacaggcgccatcgtgactggcaaggggctggaccgcgagacggccggctggcacaacatcacagtgctggccatggaggcggacaatcatgcacagctatcccgggcatccctaaggatccgaatcctggatgtgaacgacaatcccccagaactggccacaccctacgaggcagctgtatgcgaggatgccaagccaggccagctcatccagaccatcagcgtggtggacagagacgagccccaaggcgggcaccgcttctatttccgcctggtgcctgaagctcccagcaaccctcatttctctctgcttgacatccaagacaacaccgctgcagtgcacacgcagcacgtgggcttcaaccggcaggagcaggacgtgttcttcctgcccatcctggtggtagacagtgggccgcccacactgagcagcacaggcacgctcaccatccgcatctgtggctgcgacagctccggcaccatccagtcctgcaacaccacggcctttgtcatggccgcctccctcagccccggcgccctcatcgccctcttggtctgcgttctcatcctggttgtgctggtgctgctgatcctcaccctcaggcgccaccacaagagccacctgagctcggacgaggatgaagacatgcgggacaacgtcatcaaatacaacgacgaaggcggcggcgagcaggacaccgaagcctacgacatgtcggcgctgcggagcctctacgacttcggcgagctcaagggcggcgacgggggcggcagcgcgggcgggggagcgggcgggggctcgggcgggggcgcgggcagccccccgcaggcccacctgccctccgagcgccactcgctgccgcaggggccgccgagccccgagccagacttctcagtgttcagggacttcatcagccgcaaggtggcactggcggacggggacctgtcggtgccgccctacgacgccttccagacctacgccttcgagggcgcggactcgccggccgcctcgctcagctccctgcacagcggctcgtcgggctccgagcaggacttcgcctatctcagcagctggggtccgcgcttccggcccctggccgcgctctacgccggccaccgcggggacgacgaggcccaggcctcctagcccctcgccctgccgtcggggcgcggctgctcacccgcccagcacacgccggggccccaggacaacgcgtttcccccgcggaccccctttcctgccctcccccaaccctcccttggcggctggacggaggggggacttgctaggagcggactcttccattcctcctcctctaggggtgcagctttggagcccagaggtgcgggattctgaccaacggcattaaaactgaggcgagaccgggcacggtgtggctctggggttagaatgggagatgggggtggcgttgcagagtcgggaaggggcgggtcactcaatcctggcctgggggagaatgctggagggagcacgccgctgagatgcccccaccccaggtttcccccatcagagttaagaggaaagaaggctgttcacttactaagcacctactgtgtgctgggacgctgtacagagaccagctcagtcgtcagagaaaccatgaggtggtgtcctgcacggaatagaaggggaaaggaccccagagaagtggctgtgacccgtccaagggcacctggccagtgaatggcagagcctctggcactgaccagctgcctggcctcgggcaagtcacttcacttctctggtcctcagtttcctcatctgtcaaatggggttaataacagaacctacctcgaagagttgtgaggctaaaaagggttcatatgtgtcaagtggttaggacagtgcctggcacatagtaggtgttcaataaatgctagcctttgttactattctt

SEQ ID NO: 112815 - DNA, 2873 bp, Homo sapiens
  Payload ID: 2076
  Gene Symbol: CDH24
  Gene Name: cadherin 24, type 2
  Uniprot ID: Q86UP0
  ENST ID: ENST00000267383
  CDS Start-End: 94-2553
tgcccctccaccccagccagctcatgggccacgtggcctggcccagcctcagcacccagggccagtgaacagagccctggctggagtccaaacatgtggggcctggtgaggctcctgctggcctggctgggtggctggggctgcatggggcgtctggcagccccagcccgggcctgggcagggtcccgggaacacccagggcctgctctgctgcggactcgaaggagctgggtctggaaccagttctttgtcattgaggaatatgctggtccagagcctgttctcattggcaagctgcactcggatgttgaccggggagagggccgcaccaagtacctgttgaccggggagggggcaggcaccgtatttgtgattgatgaggccacaggcaatattcatgttaccaagagccttgaccgggaggaaaaggcgcaatatgtgctactggcccaagccgtggaccgagcctccaaccggcccctggagcccccatcagagttcatcatcaaagtgcaagacatcaacgacaatccacccatttttccccttgggccctaccatgccaccgtgcccgagatgtccaatgtcgggacatcagtgatccaggtgactgctcacgatgctgatgaccccagctatgggaacagtgccaagctggtgtacactgttctggatggactgcctttcttctctgtggacccccagactggagtggtgcgtacagccatccccaacatggaccgggagacacaggaggagttcttggtggtgatccaggccaaggacatgggcggccacatgggggggctgtcaggcagcactacggtgactgtcacgctcagcgatgtcaacgacaacccccccaagttcccacagagcctataccagttctccgtggtggagacagctggacctggcacactggtgggccggctccgggcccaggacccagacctgggggacaacgccctgatggcatacagcatcctggatggggaggggtctgaggccttcagcatcagcacagacttgcagggtcgagacgggctcctcactgtccgcaagcccctagactttgagagccagcgctcctactccttccgtgtcgaggccaccaacacgctcattgacccagcctatctgcggcgagggcccttcaaggatgtggcctctgtgcgtgtggcagtgcaagatgccccagagccacctgccttcacccaggctgcctaccacctgacagtgcctgagaacaaggccccggggaccctggtaggccagatctccgcggctgacctggactcccctgccagcccaatcagatactccatcctcccccactcagatccggagcgttgcttctctatccagcccgaggaaggcaccatccatacagcagcacccctggatcgcgaggctcgcgcctggcacaacctcactgtgctggctacagagctcggctggagctgggggccagaaaggggctgggtacctcttctggttgctgagtggagtgcaccagcagccccaccccagagaagccctgttggaagcgctgtgggaatcccccaagacagttctgcacaggcctcgcgcgtgcaagtggccatccagaccctggatgagaatgacaatgctccccagctggctgagccctacgatacttttgtgtgtgactctgcagctcctggccagctgattcaggtcatccgggccctggacagagatgaagttggcaacagtagccatgtctcctttcaaggtcctctgggccctgatgccaactttactgtccaggacaaccgagatggctccgccagcctgctgctgccctcccgccctgctccaccccgccatgccccctacttggttcccatagaactgtgggactgggggcagccggcgctgagcagcactgccacagtgactgttagtgtgtgccgctgccagcctgacggctctgtggcatcctgctggcctgaggctcacctctcagctgctgggctcagcaccggcgccctgcttgccatcatcacctgtgtgggtgccctgcttgccctggtggtgctcttcgtggccctgcggcggcagaagcaagaagcactgatggtactggaggaggaggacgtccgagagaacatcatcacctacgacgacgagggcggcggcgaggaggacaccgaggccttcgacatcacggccttgcagaacccggacggggcggcccccccggcgcccggccctcccgcgcgccgagacgtgttgccccgggcccgggtgtcgcgccagcccagaccccccggccccgccgacgtggcgcagctcctggcgctgcggctccgcgaggcggacgaggaccccggcgtacccccgtacgactcggtgcaggtgtacggctacgagggccgcggctcctcttgcggctccctcagctccctgggctccggcagcgaagccggcggcgcccccggccccgcggagccgctggacgactggggtccgctcttccgcaccctggccgagctgtatggggccaaggagcccccggccccctgagcgcccgggctggcccggcccaccgcggggggggggcagcgggcacaggccctctgagtgagccccacggggtccaggcgggcggcagcagcccaggggccccaggcctcctccctgtccttgtgtccctccttgcttccccggggcaccctcgctctcacctccctcctcctgagtcggtgtgtgtgtctctctccaggaatctttgtctctatctgtgacacgctcctctgtccgggcctgggtttcctgccctggccctggccctgcgatctctcactgtgattcctctccttcctccgtggcgttttgtctctgca

SEQ ID NO: 112816 - DNA, 3552 bp, Homo sapiens
  Payload ID: 2076
  Gene Symbol: CDH24
  Gene Name: cadherin 24, type 2
  Uniprot ID: Q86UP0
  ENST ID: ENST00000397359
  CDS Start-End: 261-2720
ttctcgccggggccgctcagacctgcagcggagccgcggcgcccgctccaatcggctcggggctgtgcccccgggacccggcgacgggggcgggcgggggcgcttcccgccggcctgggcccctcggcagtgccaggtgtggatccatggggtagcctcaacgcatctgcccctccaccccagccagctcatgggccacgtggcctggcccagcctcagcacccagggccagtgaacagagccctggctggagtccaaacatgtggggcctggtgaggctcctgctggcctggctgggtggctggggctgcatggggcgtctggcagccccagcccgggcctgggcagggtcccgggaacacccagggcctgctctgctgcggactcgaaggagctgggtctggaaccagttctttgtcattgaggaatatgctggtccagagcctgttctcattggcaagctgcactcggatgttgaccggggagagggccgcaccaagtacctgttgaccggggagggggcaggcaccgtatttgtgattgatgaggccacaggcaatattcatgttaccaagagccttgaccgggaggaaaaggcgcaatatgtgctactggcccaagccgtggaccgagcctccaaccggcccctggagcccccatcagagttcatcatcaaagtgcaagacatcaacgacaatccacccatttttccccttgggccctaccatgccaccgtgcccgagatgtccaatgtcgggacatcagtgatccaggtgactgctcacgatgctgatgaccccagctatgggaacagtgccaagctggtgtacactgttctggatggactgcctttcttctctgtggacccccagactggagtggtgcgtacagccatccccaacatggaccgggagacacaggaggagttcttggtggtgatccaggccaaggacatgggcggccacatgggggggctgtcaggcagcactacggtgactgtcacgctcagcgatgtcaacgacaacccccccaagttcccacagagcctataccagttctccgtggtggagacagctggacctggcacactggtgggccggctccgggcccaggacccagacctgggggacaacgccctgatggcatacagcatcctggatggggaggggtctgaggccttcagcatcagcacagacttgcagggtcgagacgggctcctcactgtccgcaagcccctagactttgagagccagcgctcctactccttccgtgtcgaggccaccaacacgctcattgacccagcctatctgcggcgagggcccttcaaggatgtggcctctgtgcgtgtggcagtgcaagatgccccagagccacctgccttcacccaggctgcctaccacctgacagtgcctgagaacaaggccccggggaccctggtaggccagatctccgcggctgacctggactcccctgccagcccaatcagatactccatcctcccccactcagatccggagcgttgcttctctatccagcccgaggaaggcaccatccatacagcagcacccctggatcgcgaggctcgcgcctggcacaacctcactgtgctggctacagagctcggctggagctgggggccagaaaggggctgggtacctcttctggttgctgagtggagtgcaccagcagccccaccccagagaagccctgttggaagcgctgtgggaatcccccaagacagttctgcacaggcctcgcgcgtgcaagtggccatccagaccctggatgagaatgacaatgctccccagctggctgagccctacgatacttttgtgtgtgactctgcagctcctggccagctgattcaggtcatccgggccctggacagagatgaagttggcaacagtagccatgtctcctttcaaggtcctctgggccctgatgccaactttactgtccaggacaaccgagatggctccgccagcctgctgctgccctcccgccctgctccaccccgccatgccccctacttggttcccatagaactgtgggactgggggcagccggcgctgagcagcactgccacagtgactgttagtgtgtgccgctgccagcctgacggctctgtggcatcctgctggcctgaggctcacctctcagctgctgggctcagcaccggcgccctgcttgccatcatcacctgtgtgggtgccctgcttgccctggtggtgctcttcgtggccctgcggcggcagaagcaagaagcactgatggtactggaggaggaggacgtccgagagaacatcatcacctacgacgacgagggcggcggcgaggaggacaccgaggccttcgacatcacggccttgcagaacccggacggggcggcccccccggcgcccggccctcccgcgcgccgagacgtgttgccccgggcccgggtgtcgcgccagcccagaccccccggccccgccgacgtggcgcagctcctggcgctgcggctccgcgaggcggacgaggaccccggcgtacccccgtacgactcggtgcaggtgtacggctacgagggccgcggctcctcttgcggctccctcagctccctgggctccggcagcgaagccggcggcgcccccggccccgcggagccgctggacgactggggtccgctcttccgcaccctggccgagctgtatggggccaaggagcccccggccccctgagcgcccgggctggcccggcccaccgcggggggggggcagcgggcacaggccctctgagtgagccccacggggtccaggcgggcggcagcagcccaggggccccaggcctcctccctgtccttgtgtccctccttgcttccccggggcaccctcgctctcacctccctcctcctgagtcggtgtgtgtgtctctctccaggaatctttgtctctatctgtgacacgctcctctgtccgggcctgggtttcctgccctggccctggccctgcgatctctcactgtgattcctctccttcctccgtggcgttttgtctctgcagttctgaagctcacacatagtctccctgcgtcttccttgcccatacacatgctctgtgtctgtctcctgcccacatctcccttccttctctctgggtccctgtgactggctttttgtttttttctgttgtccatcccaaaatcaagagaaacttccagccactgctgcccaccctcctgcaggggatgttgtgccccagacctgcctgcatggttccatccattactcatggcctcagcctcatcctggctccactggcctccagctgagagagggaaccagcctgcctcccagggcaagagctccagcctcccgtgtggccgcctccctggagctctgcccagctgtcagcttcccctgggcatcccagccctgggcattgtcttgtgtgcttcctgagggagtagggaaaggaaagggggaggcggctggggaaggggaaagagggaggaaggggaggggcctccatctctaatttcataataaacaaacactttattttgtaaagctgg

SEQ ID NO: 112817 - DNA, 3438 bp, Homo sapiens
  Payload ID: 2076
  Gene Symbol: CDH24
  Gene Name: cadherin 24, type 2
  Uniprot ID: Q86UP0
  ENST ID: ENST00000487137
  CDS Start-End: 261-2606
ttctcgccggggccgctcagacctgcagcggagccgcggcgcccgctccaatcggctcggggctgtgcccccgggacccggcgacgggggcgggcgggggcgcttcccgccggcctgggcccctcggcagtgccaggtgtggatccatggggtagcctcaacgcatctgcccctccaccccagccagctcatgggccacgtggcctggcccagcctcagcacccagggccagtgaacagagccctggctggagtccaaacatgtggggcctggtgaggctcctgctggcctggctgggtggctggggctgcatggggcgtctggcagccccagcccgggcctgggcagggtcccgggaacacccagggcctgctctgctgcggactcgaaggagctgggtctggaaccagttctttgtcattgaggaatatgctggtccagagcctgttctcattggcaagctgcactcggatgttgaccggggagagggccgcaccaagtacctgttgaccggggagggggcaggcaccgtatttgtgattgatgaggccacaggcaatattcatgttaccaagagccttgaccgggaggaaaaggcgcaatatgtgctactggcccaagccgtggaccgagcctccaaccggcccctggagcccccatcagagttcatcatcaaagtgcaagacatcaacgacaatccacccatttttccccttgggccctaccatgccaccgtgcccgagatgtccaatgtcgggacatcagtgatccaggtgactgctcacgatgctgatgaccccagctatgggaacagtgccaagctggtgtacactgttctggatggactgcctttcttctctgtggacccccagactggagtggtgcgtacagccatccccaacatggaccgggagacacaggaggagttcttggtggtgatccaggccaaggacatgggcggccacatgggggggctgtcaggcagcactacggtgactgtcacgctcagcgatgtcaacgacaacccccccaagttcccacagagcctataccagttctccgtggtggagacagctggacctggcacactggtgggccggctccgggcccaggacccagacctgggggacaacgccctgatggcatacagcatcctggatggggaggggtctgaggccttcagcatcagcacagacttgcagggtcgagacgggctcctcactgtccgcaagcccctagactttgagagccagcgctcctactccttccgtgtcgaggccaccaacacgctcattgacccagcctatctgcggcgagggcccttcaaggatgtggcctctgtgcgtgtggcagtgcaagatgccccagagccacctgccttcacccaggctgcctaccacctgacagtgcctgagaacaaggccccggggaccctggtaggccagatctccgcggctgacctggactcccctgccagcccaatcagatactccatcctcccccactcagatccggagcgttgcttctctatccagcccgaggaaggcaccatccatacagcagcacccctggatcgcgaggctcgcgcctggcacaacctcactgtgctggctacagagctcgacagttctgcacaggcctcgcgcgtgcaagtggccatccagaccctggatgagaatgacaatgctccccagctggctgagccctacgatacttttgtgtgtgactctgcagctcctggccagctgattcaggtcatccgggccctggacagagatgaagttggcaacagtagccatgtctcctttcaaggtcctctgggccctgatgccaactttactgtccaggacaaccgagatggctccgccagcctgctgctgccctcccgccctgctccaccccgccatgccccctacttggttcccatagaactgtgggactgggggcagccggcgctgagcagcactgccacagtgactgttagtgtgtgccgctgccagcctgacggctctgtggcatcctgctggcctgaggctcacctctcagctgctgggctcagcaccggcgccctgcttgccatcatcacctgtgtgggtgccctgcttgccctggtggtgctcttcgtggccctgcggcggcagaagcaagaagcactgatggtactggaggaggaggacgtccgagagaacatcatcacctacgacgacgagggcggcggcgaggaggacaccgaggccttcgacatcacggccttgcagaacccggacggggcggcccccccggcgcccggccctcccgcgcgccgagacgtgttgccccgggcccgggtgtcgcgccagcccagaccccccggccccgccgacgtggcgcagctcctggcgctgcggctccgcgaggcggacgaggaccccggcgtacccccgtacgactcggtgcaggtgtacggctacgagggccgcggctcctcttgcggctccctcagctccctgggctccggcagcgaagccggcggcgcccccggccccgcggagccgctggacgactggggtccgctcttccgcaccctggccgagctgtatggggccaaggagcccccggccccctgagcgcccgggctggcccggcccaccgcggggggggggcagcgggcacaggccctctgagtgagccccacggggtccaggcgggcggcagcagcccaggggccccaggcctcctccctgtccttgtgtccctccttgcttccccggggcaccctcgctctcacctccctcctcctgagtcggtgtgtgtgtctctctccaggaatctttgtctctatctgtgacacgctcctctgtccgggcctgggtttcctgccctggccctggccctgcgatctctcactgtgattcctctccttcctccgtggcgttttgtctctgcagttctgaagctcacacatagtctccctgcgtcttccttgcccatacacatgctctgtgtctgtctcctgcccacatctcccttccttctctctgggtccctgtgactggctttttgtttttttctgttgtccatcccaaaatcaagagaaacttccagccactgctgcccaccctcctgcaggggatgttgtgccccagacctgcctgcatggttccatccattactcatggcctcagcctcatcctggctccactggcctccagctgagagagggaaccagcctgcctcccagggcaagagctccagcctcccgtgtggccgcctccctggagctctgcccagctgtcagcttcccctgggcatcccagccctgggcattgtcttgtgtgcttcctgagggagtagggaaaggaaagggggaggcggctggggaaggggaaagagggaggaaggggaggggcctccatctctaatttcataataaacaaacactttattttgtaaagctgg

SEQ ID NO: 112818 - DNA, 2759 bp, Homo sapiens
  Payload ID: 2076
  Gene Symbol: CDH24
  Gene Name: cadherin 24, type 2
  Uniprot ID: Q86UP0
  ENST ID: ENST00000554034
  CDS Start-End: 94-2439
tgcccctccaccccagccagctcatgggccacgtggcctggcccagcctcagcacccagggccagtgaacagagccctggctggagtccaaacatgtggggcctggtgaggctcctgctggcctggctgggtggctggggctgcatggggcgtctggcagccccagcccgggcctgggcagggtcccgggaacacccagggcctgctctgctgcggactcgaaggagctgggtctggaaccagttctttgtcattgaggaatatgctggtccagagcctgttctcattggcaagctgcactcggatgttgaccggggagagggccgcaccaagtacctgttgaccggggagggggcaggcaccgtatttgtgattgatgaggccacaggcaatattcatgttaccaagagccttgaccgggaggaaaaggcgcaatatgtgctactggcccaagccgtggaccgagcctccaaccggcccctggagcccccatcagagttcatcatcaaagtgcaagacatcaacgacaatccacccatttttccccttgggccctaccatgccaccgtgcccgagatgtccaatgtcgggacatcagtgatccaggtgactgctcacgatgctgatgaccccagctatgggaacagtgccaagctggtgtacactgttctggatggactgcctttcttctctgtggacccccagactggagtggtgcgtacagccatccccaacatggaccgggagacacaggaggagttcttggtggtgatccaggccaaggacatgggcggccacatgggggggctgtcaggcagcactacggtgactgtcacgctcagcgatgtcaacgacaacccccccaagttcccacagagcctataccagttctccgtggtggagacagctggacctggcacactggtgggccggctccgggcccaggacccagacctgggggacaacgccctgatggcatacagcatcctggatggggaggggtctgaggccttcagcatcagcacagacttgcagggtcgagacgggctcctcactgtccgcaagcccctagactttgagagccagcgctcctactccttccgtgtcgaggccaccaacacgctcattgacccagcctatctgcggcgagggcccttcaaggatgtggcctctgtgcgtgtggcagtgcaagatgccccagagccacctgccttcacccaggctgcctaccacctgacagtgcctgagaacaaggccccggggaccctggtaggccagatctccgcggctgacctggactcccctgccagcccaatcagatactccatcctcccccactcagatccggagcgttgcttctctatccagcccgaggaaggcaccatccatacagcagcacccctggatcgcgaggctcgcgcctggcacaacctcactgtgctggctacagagctcgacagttctgcacaggcctcgcgcgtgcaagtggccatccagaccctggatgagaatgacaatgctccccagctggctgagccctacgatacttttgtgtgtgactctgcagctcctggccagctgattcaggtcatccgggccctggacagagatgaagttggcaacagtagccatgtctcctttcaaggtcctctgggccctgatgccaactttactgtccaggacaaccgagatggctccgccagcctgctgctgccctcccgccctgctccaccccgccatgccccctacttggttcccatagaactgtgggactgggggcagccggcgctgagcagcactgccacagtgactgttagtgtgtgccgctgccagcctgacggctctgtggcatcctgctggcctgaggctcacctctcagctgctgggctcagcaccggcgccctgcttgccatcatcacctgtgtgggtgccctgcttgccctggtggtgctcttcgtggccctgcggcggcagaagcaagaagcactgatggtactggaggaggaggacgtccgagagaacatcatcacctacgacgacgagggcggcggcgaggaggacaccgaggccttcgacatcacggccttgcagaacccggacggggcggcccccccggcgcccggccctcccgcgcgccgagacgtgttgccccgggcccgggtgtcgcgccagcccagaccccccggccccgccgacgtggcgcagctcctggcgctgcggctccgcgaggcggacgaggaccccggcgtacccccgtacgactcggtgcaggtgtacggctacgagggccgcggctcctcttgcggctccctcagctccctgggctccggcagcgaagccggcggcgcccccggccccgcggagccgctggacgactggggtccgctcttccgcaccctggccgagctgtatggggccaaggagcccccggccccctgagcgcccgggctggcccggcccaccgcggggggggggcagcgggcacaggccctctgagtgagccccacggggtccaggcgggcggcagcagcccaggggccccaggcctcctccctgtccttgtgtccctccttgcttccccggggcaccctcgctctcacctccctcctcctgagtcggtgtgtgtgtctctctccaggaatctttgtctctatctgtgacacgctcctctgtccgggcctgggtttcctgccctggccctggccctgcgatctctcactgtgattcctctccttcctccgtggcgttttgtctctgca

SEQ ID NO: 112819 - DNA, 2037 bp, Homo sapiens
  Payload ID: 2076
  Gene Symbol: CDH24
  Gene Name: cadherin 24, type 2
  ENST ID: ENST00000610348
  CDS Start-End: 261-1205
ttctcgccggggccgctcagacctgcagcggagccgcggcgcccgctccaatcggctcggggctgtgcccccgggacccggcgacgggggcgggcgggggcgcttcccgccggcctgggcccctcggcagtgccaggtgtggatccatggggtagcctcaacgcatctgcccctccaccccagccagctcatgggccacgtggcctggcccagcctcagcacccagggccagtgaacagagccctggctggagtccaaacatgtggggcctggtgaggctcctgctggcctggctgggtggctggggctgcatggggcgtctggcagccccagcccgggcctgggcagggtcccgggaacacccagggcctgctctgctgcggactcgaaggagctgggtctggaaccagttctttgtcattgaggaatatgctggtccagagcctgttctcattggcaagctgcactcggatgttgaccggggagagggccgcaccaagtacctgttgaccggggagggggcaggcaccgtatttgtgattgatgaggccacaggcaatattcatgttaccaagagccttgaccgggaggaaaaggcgcaatatgtgctactggcccaagccgtggaccgagcctccaaccggcccctggagcccccatcagagttcatcatcaaaatcatcacctgtgtgggtgccctgcttgccctggtggtgctcttcgtggccctgcggcggcagaagcaagaagcactgatggtactggaggaggaggacgtccgagagaacatcatcacctacgacgacgagggcggcggcgaggaggacaccgaggccttcgacatcacggccttgcagaacccggacggggcggcccccccggcgcccggccctcccgcgcgccgagacgtgttgccccgggcccgggtgtcgcgccagcccagaccccccggccccgccgacgtggcgcagctcctggcgctgcggctccgcgaggcggacgaggaccccggcgtacccccgtacgactcggtgcaggtgtacggctacgagggccgcggctcctcttgcggctccctcagctccctgggctccggcagcgaagccggcggcgcccccggccccgcggagccgctggacgactggggtccgctcttccgcaccctggccgagctgtatggggccaaggagcccccggccccctgagcgcccgggctggcccggcccaccgcggggggggggcagcgggcacaggccctctgagtgagccccacggggtccaggcgggcggcagcagcccaggggccccaggcctcctccctgtccttgtgtccctccttgcttccccggggcaccctcgctctcacctccctcctcctgagtcggtgtgtgtgtctctctccaggaatctttgtctctatctgtgacacgctcctctgtccgggcctgggtttcctgccctggccctggccctgcgatctctcactgtgattcctctccttcctccgtggcgttttgtctctgcagttctgaagctcacacatagtctccctgcgtcttccttgcccatacacatgctctgtgtctgtctcctgcccacatctcccttccttctctctgggtccctgtgactggctttttgtttttttctgttgtccatcccaaaatcaagagaaacttccagccactgctgcccaccctcctgcaggggatgttgtgccccagacctgcctgcatggttccatccattactcatggcctcagcctcatcctggctccactggcctccagctgagagagggaaccagcctgcctcccagggcaagagctccagcctcccgtgtggccgcctccctggagctctgcccagctgtcagcttcccctgggcatcccagccctgggcattgtcttgtgtgcttcctgagggagtagggaaaggaaagggggaggcggctggggaaggggaaagagggaggaaggggaggggcctccatctctaatttcataataaacaaacactttattttgtaaagctgg

SEQ ID NO: 112820 - DNA, 1931 bp, Homo sapiens
  Payload ID: 2077
  Gene Symbol: CDH26
  Gene Name: cadherin 26
  Uniprot ID: Q8IXH8
  ENST ID: ENST00000244049
  CDS Start-End: 208-582
tggcaaggctaataagaaagcagcttttccaagaaacaatacaatattactggccagatagtattattgattaattcaacaaacagttatgtagcatctactggtaccctggaactgtgctgaactttatagctacacagatgactaagacgcaatttggccttgccagttcatgactgagttatacatgaacagaacaagatcctcatgaaacctctgatatggacatggtcagatgttgaaggccagaggccggctctgctcatctgcacagctgcagcaggacccacgcagggagttaaggcttacccagatgccacaatgcacagacaactcctggctccggtggaaggaaggatggcagagacattgaatcagaaactccatgttgccaatgtgctggaagatgaccccggctacctacctcacgtctacagcgaggaaggggagtgtggaggggccccatccctcagctctctggccagcttggaacaggagttgcaacctgatttgctggactctttgggttcaaaagcgactccgtttgaggaaatatattcagagtcaggtgttccttcctaaaaaaaaaagtctattttggagaattgaaataattcatggaagggaatcactattcagggatttttcccctttgctcttcttttccctccttaaaagaaaaattaccttctagtcctaggatgaggacacactattagtttgaattaaatgctttgatattctcagatcagccatcttgaaccaaagcaaaaccacaagttacactttcttaaaatttgatttgtcatattttctagagaaacttgaatttaattgtgttattcttagcttccactggcagcctagctttgagggtaaatgaaaatataacccatagattacccagccacttgggaacagcaggtaatactgaagaaaaataaaaatagattttgaaaacgttacttacatttctatgattatgattctgcttccatttaagggaaaacttaggtaaatagagaaattttttctataacatttgtagtcagtatttgaagtgattttttaaaaaataagtattggtccctgttcactttttgattagataaatagataaaatatgttatcttgagaaaaatgattatgctgaaagctttataaacagtatactctttaaaaaatgaagagctgacataatttaacttgtatgtattatgtaagtaaaagagttaggagcctttgaatgagtaagttctgattagattttatctttaaacaaaaccacaaaatttaattggtttttacttgtccacttactgctagtgtcagtttcaggggaagaaatggtttcttttaaaaatcttaataggggacatatgccctaaaaatagtcagttttctagtctgagtaatagataagagactgactaagcaaagtttaaaatgctatttggacactttaatgcacatattggatatctaaaagtctacagccatataaaaattttatataattaatgagcaaatgccgtctctcatgccctaaaataaatcagtagaaacatgtttgctggtgaatcagtgaagcattatgttaaacagtgagttacagctcagagttaaaactttctccttctttttgaagaagctgtgcaaatacttctttttaaggagatctggccttttcctacctggttacctcagtcttcctctgctttgggaagctgaaaaagaagaaaaatcacatttaaagcactggaatgtctgaatgggacgcttgaatgtgtagaacagctgtactgatcctagcatgactcagaggacagtctagggcattttctgggtaattcaggataaaagtatttttttttttaagaaaaatacatgtttttggacaacaaaacaaagtaaacattagtttattcgat

SEQ ID NO: 112821 - DNA, 2494 bp, Homo sapiens
  Payload ID: 2077
  Gene Symbol: CDH26
  Gene Name: cadherin 26
  Uniprot ID: Q8IXH8
  ENST ID: ENST00000350849
  CDS Start-End: 198-695
aataagaaagcagcttttccaagaaacaatacaatattactggccagatagtattattgattaattcaacaaacagttatgtagcatctactggtaccctggaactgtgctgaactttatagctacacagatgactaagacgcaatttggccttgccagttcatgactgagttatacatgaacagaacaagatcctcatgaaacctctgatatggacatggtcagatgttgaaggccagaggccggctctgctcatctgcacagctgcagcaggacccacgcagggagttaaggatctcgaggaagtgcctccatctgcagcgagtcagtcagcccaagcacgctgtgctctggggagctggggttatggcaagccctttgagccaagaagtgtgaaaaacatacactctactcctgcttacccagatgccacaatgcacagacaactcctggctccggtggaaggaaggatggcagagacattgaatcagaaactccatgttgccaatgtgctggaagatgaccccggctacctacctcacgtctacagcgaggaaggggagtgtggaggggccccatccctcagctctctggccagcttggaacaggagttgcaacctgatttgctggactctttgggttcaaaagcgactccgtttgaggaaatatattcagagtcaggtgttccttcctaaaaaaaaaagtctattttggagaattgaaataattcatggaagggaatcactattcagggatttttcccctttgctcttcttttccctccttaaaagaaaaattaccttctagtcctaggatgaggacacactattagtttgaattaaatgctttgatattctcagatcagccatcttgaaccaaagcaaaaccacaagttacactttcttaaaatttgatttgtcatattttctagagaaacttgaatttaattgtgttattcttagcttccactggcagcctagctttgagggtaaatgaaaatataacccatagattacccagccacttgggaacagcaggtaatactgaagaaaaataaaaatagattttgaaaacgttacttacatttctatgattatgattctgcttccatttaagggaaaacttaggtaaatagagaaattttttctataacatttgtagtcagtatttgaagtgattttttaaaaaataagtattggtccctgttcactttttgattagataaatagataaaatatgttatcttgagaaaaatgattatgctgaaagctttataaacagtatactctttaaaaaatgaagagctgacataatttaacttgtatgtattatgtaagtaaaagagttaggagcctttgaatgagtaagttctgattagattttatctttaaacaaaaccacaaaatttaattggtttttacttgtccacttactgctagtgtcagtttcaggggaagaaatggtttcttttaaaaatcttaataggggacatatgccctaaaaatagtcagttttctagtctgagtaatagataagagactgactaagcaaagtttaaaatgctatttggacactttaatgcacatattggatatctaaaagtctacagccatataaaaattttatataattaatgagcaaatgccgtctctcatgccctaaaataaatcagtagaaacatgtttgctggtgaatcagtgaagcattatgttaaacagtgagttacagctcagagttaaaactttctccttctttttgaagaagctgtgcaaatacttctttttaaggagatctggccttttcctacctggttacctcagtcttcctctgctttgggaagctgaaaaagaagaaaaatcacatttaaagcactggaatgtctgaatgggacgcttgaatgtgtagaacagctgtactgatcctagcatgactcagaggacagtctagggcattttctgggtaattcaggataaaagtatttttttttttaagaaaaatacatgtttttggacaacaaaacaaagtaaacattagtttattcgattgcctccttatacttgcctctttcattctgtcccctgtagatttttaaaaaattatctcattttaaaactttattatttcattttaaataattgacatataataattgtacatatttagggggtacatagtcatgtttcaatacatttacagtgatcagatcagggtggttaacgtaatcattggctcaaacatttttcatttctttgtattggtacggagcattcaatatccatcccccttctagctatctaaaactatgtattattgttaactataggcaacatataatggtatagagtgctagaacgtattcctcctaggaataatttgctgtaattttgtatcctttaataaatctctccctatccctctttccccccacccttcccagctgctgtgtcctctgttctaccttctacttccgagataaacttggttttagcttcca

SEQ ID NO: 112822 - DNA, 3182 bp, Homo sapiens
  Payload ID: 2077
  Gene Symbol: CDH26
  Gene Name: cadherin 26
  Uniprot ID: Q8IXH8
  ENST ID: ENST00000348616
  CDS Start-End: 301-2799
agtcttttgtgtacgtgcaggaccatggtggctttagtttctaccccacccttcctaggaactctacttgtggcaaacgtatgttcaagcttacaagtcagcccaccccactctgataaatgcaagaaaagctgaaaagggaggagcaagatgggatgaaagcatctgggccaaagtgacctgaaaacctttagagaagaagctgctggctgagaaggaggtgtgtggctccggtgagaccaccagcttggaggactggtcatcagctgcacgttctgggtctgtcttgggtattcccatatggccatgagatccgggaggcacccctcgctgctgctgcttctagtgctgctgctgtggctgctgcaggtcagtatcattgacagtgttcaacaggaaacagatgatcttactaagcaaacaaaggaaaagatctaccagcctctacggcgatccaagagaagatgggttatcaccaccttggagctggaggaggaagacccgggaccctttcccaaactcattggtgagctgttcaataatatgtcttataacatgtcactaatgtatctaatcagtggacctggtgtggatgaatatccagagattggtttgttttctctagaagatcatgagaacggaaggatatatgttcaccgccctgtcgatcgagaaatgacaccatctttcacggtttattttgatgttgtggagcgctcaacaggaaaaattgtggatacatccttgattttcaacattaggatcagtgatgtgaatgatcatgcaccccagtttccagagaaggaatttaacatcactgtgcaagaaaaccaatctgcagggcaacctatttttcagatgttagcagtcgatttggatgaagaaaacactccaaattctcaagtcctttacttcctcatttctcaaacaccattactgaaagaaagtggtttccgggttgatcgccttagtggagaaatacgactctctggctgcttagattatgagaccgctcctcagtttacactgctaatcagagccagggactgtggagaaccgtcactgtcatccacgaccaccgttcacgtggatgtgcaagaaggcaacaaccacaggcctgcatttacccaggagaactataaggttcagattcctgaaggccgagccagccagggcgtgttgcgtctcctggttcaagatcgagattctccatttacatcagcttggagagcaaaattcaacatattgcatggcaatgaagaggggcattttgacatttcgactgaccctgagaccaacgaagggatattaaatgttatcaagcctttggattatgagactcgcccagcgcaaagcctcatcattgtcgtggagaatgaggagaggctcgtcttctgtgagagaggaaagcttcagccgccaaggaaggcagcagccagcgccactgtgagtgtgcaggtgacagacgccaacgacccaccagcctttcacccccagagcttcattgtcaataaagaggagggcgccaggcctgggaccctgttgggaacttttaatgccatggatccagacagccagataagatatgaactggttcatgacccagcaaattgggtcagcgtcgacaaaaactccggagtggtcatcaccgtggagccaattgaccgagaatcccctcatgtaaataacagtttttatgtaatcatcattcacgctgttgatgatggcttcccaccgcagactgctacagggaccctaatgctcttcctgtctgacatcaatgacaacgtcccgactctccggccacgttcccgctacatggaggtctgtgagtctgctgtgcatgagcccctccacatcgaggcagaggatccggacctggagccgttctctgacccatttacatttgaattggacaatacctggggaaatgcggaggacacatggaagttggggagaaattggggtcaatcagttgaacttttaaccttgagaagcctgccacgtggtaattacttggtgccactcttcattggagacaaacagggactttcccagaagcaaactgtccatgtaaggatctgcccctgtgccagtgggctcacatgtgtggagcttgcagatgcagaagtggggcttcatgtgggggccctgttccctgtctgtgcagcatttgtggctctggcagtggctctgctttttctgttgcgatgctattttgtgcttgaacctaagaggcatggatgctctgtatccaatgatgaaggccaccaaacactggtcatgtataatgcggagagcaaaggcacttcagcccagacatggtcagatgttgaaggccagaggccggctctgctcatctgcacagctgcagcaggacccacgcagggagttaaggatctcgaggaagtgcctccatctgcagcgagtcagtcagcccaagcacgctgtgctctggggagctggggttatggcaagccctttgagccaagaagtgtgaaaaacatacactctactcctgcttacccagatgccacaatgcacagacaactcctggctccggtggaaggaaggatggcagagacattgaatcagaaactccatgttgccaatgtgctggaagatgaccccggctacctacctcacgtctacagcgaggaaggggagtgtggaggggccccatccctcagctctctggccagcttggaacaggagttgcaacctgatttgctggactctttgggttcaaaagcgactccgtttgaggaaatatattcagagtcaggtgttccttcctaaaaaaaaaagtctattttggagaattgaaataattcatggaagggaatcactattcagggatttttcccctttgctcttcttttccctccttaaaagaaaaattaccttctagtcctaggatgaggacacactattagtttgaattaaatgctttgatattctcagatcagccatcttgaaccaaagcaaaaccacaagttacactttcttaaaatttgatttgtcatattttctagagaaacttgaatttaattgtgttattcttagcttccactggcagcctagctttgagggtaaatgaaaatataacccatagattacccagccacttgggaacagcaggtaatactgaagaaaaataaaaatagattttgaaaacgtta

SEQ ID NO: 112823 - DNA, 1669 bp, Homo sapiens
  Payload ID: 2077
  Gene Symbol: CDH26
  Gene Name: cadherin 26
  ENST ID: ENST00000370991
  CDS Start-End: 1-1334
ccaggcctgggaccctgttgggaacttttaatgccatggatccagacagccagataagatatgaactggttcatgacccagcaaattgggtcagcgtcgacaaaaactccggagtggtcatcaccgtggagccaattgaccgagaatcccctcatgtaaataacagtttttatgtaatcatcattcacgctgttgatgatggcttcccaccgcagactgctacagggaccctaatgctcttcctgtctgacatcaatgacaacgtcccgactctccggccacgttcccgctacatggaggtctgtgagtctgctgtgcatgagcccctccacatcgaggcagaggatccggacctggagccgttctctgacccatttacatttgaattggacaatacctggggaaatgcggaggacacatggaagttggggagaaattggggtcaatcagttgaacttttaaccttgagaagcctgccacgtggtaattacttggtgccactcttcattggagacaaacagggactttcccagaagcaaactgtccatgtaaggatctgcccctgtgccagtgggctcacatgtgtggagcttgcagatgcagaagtggggcttcatgtgggggccctgttccctgtctgtgcagcatttgtggctctggcagtggctctgctttttctgttgcgatgctattttgtgcttgaacctaagaggcatggatgctctgtatccaatgatgaaggccaccaaacactggtcatgtataatgcggagagcaaaggcacttcagcccagacatggtcagatgttgaaggccagaggccggctctgctcatctgcacagctgcagcaggacccacgcagggagttaaggcttacccagatgccacaatgcacagacaactcctggctccggtggaaggaaggatggcagagacattgaatcagtctaaagagagaaatcgcttcagcctcagcaggggctgcatcatcccccagggaagagccacagctgggcgaggattgccacaagacatttacaaggagatgatgccacggagactaacgcagactggtaaacggaaacacggggctttggctcgaacaccctctttcaagaaagttgtttatgaccacaaggaagatgaggagaacaaggctgggagaaagcaaaggagccacttgtttaaggttatgcagctgagaaatgaacaaggtggggttcgagtccagagtgcgcattccccatcaccccttaacaaaaaggcatgtttcccaggagactacagaggagaatcggcaggtggtcacaattgcagggctgtctcaggctgagcagagagtacggtggaggggcatgggcctgctgttggcggtgagggccttggaaatggcttcctggaggagatggcaattatccaggtagacaagatgtgtgtgtgtgtgtgtgtgtgtgtgtgtgtgatcatgaagaagaaataatgtgcaaagccctggtcataaataacttttcctctgcaaactgtggatggcagttcaccatgtttctcaccactggcctggtcactgcttatccaatatgcatgtaagaattactttttctcttttttcccttctataaattctcatagaacttcctttaatgcattaaaaaagcaactagcatgttc

SEQ ID NO: 112824 - DNA, 418 bp, Homo sapiens
  Payload ID: 2077
  Gene Symbol: CDH26
  Gene Name: cadherin 26
  ENST ID: ENST00000456106
  CDS Start-End: 178-418
aagaaacaatacaatattactggccagatagtattattgattaattcaacaaacagttatgtagcatctactggtaccctggaactgtgctgaactttatagctacacagatgactaagacgcaatttggccttgccagttcatgactgagttatacatgaacagaacaagatcctcatgaaacctctgatatggacatggtcagatgttgaaggccagaggccggctctgctcatctgcacagctgcagcaggacccacgcagggagttaagggttatggcaagccctttgagccaagaagtgtgaaaaacatacactctactcctgcttacccagatgccacaatgcacagacaactcctggctccggtggaaggaaggatggcagagacattgaatcagaaactccatgttgcca

SEQ ID NO: 112825 - DNA, 4929 bp, Homo sapiens
  Payload ID: 2078
  Gene Symbol: CDH3
  Gene Name: cadherin 3, type 1, P-cadherin (placental)
  Uniprot ID: P22223
  ENST ID: ENST00000264012
  CDS Start-End: 545-3034
ggctggcacgggaggtggagaaagaggcttgggcggccccgctgtagccgcgtgtgggaggacgcacgggcctgcttcaaagctttgggataacagcgcctccgggggataatgaatgcggagcctccgttttcagtcgacttcagatgtgtctccacttttttccgctgtagccgcaaggcaaggaaacatttctcttcccgtactgaggaggctgaggagtgcactgggtgttcttttctcctctaacccagaactgcgagacagaggctgagtccctgtaaagaacagctccagaaaagccaggagagcgcaggagggcatccgggaggccaggaggggttcgctggggcctcaaccgcacccacatcggtcccacctgcgagggggcgggacctcgtggcgctggaccaatcagcacccacctgcgctcacctggcctcctcccgctggctcccgggggctgcggtgctcaaaggggcaagagctgagcggaacaccggcccgccgtcgcggcagctgcttcacccctctctctgcagccatggggctccctcgtggacctctcgcgtctctcctccttctccaggtttgctggctgcagtgcgcggcctccgagccgtgccgggcggtcttcagggaggctgaagtgaccttggaggcgggaggcgcggagcaggagcccggccaggcgctggggaaagtattcatgggctgccctgggcaagagccagctctgtttagcactgataatgatgacttcactgtgcggaatggcgagacagtccaggaaagaaggtcactgaaggaaaggaatccattgaagatcttcccatccaaacgtatcttacgaagacacaagagagattgggtggttgctccaatatctgtccctgaaaatggcaagggtcccttcccccagagactgaatcagctcaagtctaataaagatagagacaccaagattttctacagcatcacggggccgggggcagacagcccccctgagggtgtcttcgctgtagagaaggagacaggctggttgttgttgaataagccactggaccgggaggagattgccaagtatgagctctttggccacgctgtgtcagagaatggtgcctcagtggaggaccccatgaacatctccatcatcgtgaccgaccagaatgaccacaagcccaagtttacccaggacaccttccgagggagtgtcttagagggagtcctaccaggtacttctgtgatgcaggtgacagccacggatgaggatgatgccatctacacctacaatggggtggttgcttactccatccatagccaagaaccaaaggacccacacgacctcatgttcaccattcaccggagcacaggcaccatcagcgtcatctccagtggcctggaccgggaaaaagtccctgagtacacactgaccatccaggccacagacatggatggggacggctccaccaccacggcagtggcagtagtggagatccttgatgccaatgacaatgctcccatgtttgacccccagaagtacgaggcccatgtgcctgagaatgcagtgggccatgaggtgcagaggctgacggtcactgatctggacgcccccaactcaccagcgtggcgtgccacctaccttatcatgggcggtgacgacggggaccattttaccatcaccacccaccctgagagcaaccagggcatcctgacaaccaggaagggtttggattttgaggccaaaaaccagcacaccctgtacgttgaagtgaccaacgaggccccttttgtgctgaagctcccaacctccacagccaccatagtggtccacgtggaggatgtgaatgaggcacctgtgtttgtcccaccctccaaagtcgttgaggtccaggagggcatccccactggggagcctgtgtgtgtctacactgcagaagaccctgacaaggagaatcaaaagatcagctaccgcatcctgagagacccagcagggtggctagccatggacccagacagtgggcaggtcacagctgtgggcaccctcgaccgtgaggatgagcagtttgtgaggaacaacatctatgaagtcatggtcttggccatggacaatggaagccctcccaccactggcacgggaacccttctgctaacactgattgatgtcaatgaccatggcccagtccctgagccccgtcagatcaccatctgcaaccaaagccctgtgcgccaggtgctgaacatcacggacaaggacctgtctccccacacctcccctttccaggcccagctcacagatgactcagacatctactggacggcagaggtcaacgaggaaggtgacacagtggtcttgtccctgaagaagttcctgaagcaggatacatatgacgtgcacctttctctgtctgaccatggcaacaaagagcagctgacggtgatcagggccactgtgtgcgactgccatggccatgtcgaaacctgccctggaccctggaagggaggtttcatcctccctgtgctgggggctgtcctggctctgctgttcctcctgctggtgctgcttttgttggtgagaaagaagcggaagatcaaggagcccctcctactcccagaagatgacacccgtgacaacgtcttctactatggcgaagaggggggtggcgaagaggaccaggactatgacatcacccagctccaccgaggtctggaggccaggccggaggtggttctccgcaatgacgtggcaccaaccatcatcccgacacccatgtaccgtcctcggccagccaacccagatgaaatcggcaactttataattgagaacctgaaggcggctaacacagaccccacagccccgccctacgacaccctcttggtgttcgactatgagggcagcggctccgacgccgcgtccctgagctccctcacctcctccgcctccgaccaagaccaagattacgattatctgaacgagtggggcagccgcttcaagaagctggcagacatgtacggtggcggggaggacgactaggcggcctgcctgcagggctggggaccaaacgtcaggccacagagcatctccaaggggtctcagttcccccttcagctgaggacttcggagcttgtcaggaagtggccgtagcaacttggcggagacaggctatgagtctgacgttagagtggtggcttccttagcctttcaggatggaggaatgtgggcagtttgacttcagcactgaaaacctctccacctgggccagggttgcctcagaggccaagtttccagaagcctcttacctgccgtaaaatgctcaaccctgtgtcctgggcctgggcctgctgtgactgacctacagtggactttctctctggaatggaaccttcttaggcctcctggtgcaacttaatttttttttttaatgctatcttcaaaacgttagagaaagttcttcaaaagtgcagcccagagctgctgggcccactggccgtcctgcatttctggtttccagaccccaatgcctcccattcggatggatctctgcgtttttatactgagtgtgcctaggttgccccttattttttattttccctgttgcgttgctatagatgaagggtgaggacaatcgtgtatatgtactagaacttttttattaaagaaacttttcccagaggtgcctggggagtgaactgttttctaaatagaaggtttattggcatctaactcacataccataccattcacttgtttaacgtttacaattcaatggtttttagaattttcagagttctgcaaaaagagtgggctctgtttaccctgctggcttcacccaagcttcctctcaatggcaggggatactcagggtcagcttccatgcctaagtgggctcagggaggggagacttgccctcctttgcaaagtcagttgctccatgagagagaaccattaacctcttaccccaaggctgagcccctccacagccccagcaaggtctcttctggaacagcggctgccctccctgcaggacagtgtgtgacgacttcctcttctatgctggaggggtccctgttgaaaggcaggggttggggaacagccagctctgctacttgctagcacatttttttttttttttttgagacggagtctcgttctgtcgcccaggctggagtgcagtggtgtgatcttggctcactgcaagctctgcctcctgggttcacgccattctcctgcctcagcctcccgagtagctgggactacaggtgcctgccactatgcccagctaattttttttgagtgtgtgtgtttttttagtagagacggggtttcactgtgttagccaggatgtctcgatctcctgacctcgtgatccgcccacgtcggcctcccaaagtgctaggattacaggcttgagccaccgcgcccagcgctggcacatcatttaacctccagttgcctcagattttacatttacaaaatggggagtttttgtggagattaagtgaattaatatctggcacatggtccatgcaatctgttagttggtaacagctaccatttattcagtacttttaaaggccagacaggacttcgattatttcctctaaatcctcacaatcaccctctgaggggactttctcctttaaagaatggccacattgtatttgtttttttaaatgacatctggtcatcatcgaaatcaagcaaaacaaaattaagagaacctacccaagatgtcagtgaaattggaacattcctgacaataccagggcataaatgcaggaatcaggaataggcagcagtgatagaacaattctgtttgtgcccttgttaacgtgaagttcaaagtcatctttgcaattagccaaaagaatctgaagtgaagctgaggaaattgctgatgttgaaataaacatttccttccatgagga

SEQ ID NO: 112826 - DNA, 3611 bp, Homo sapiens
  Payload ID: 2078
  Gene Symbol: CDH3
  Gene Name: cadherin 3, type 1, P-cadherin (placental)
  Uniprot ID: P22223
  ENST ID: ENST00000429102
  CDS Start-End: 388-2742
cttttttccgctgtagccgcaaggcaaggaaacatttctcttcccgtactgaggaggctgaggagtgcactgggtgttcttttctcctctaacccagaactgcgagacagaggctgagtccctgtaaagaacagctccagaaaagccaggagagcgcaggagggcatccgggaggccaggaggggttcgctggggcctcaaccgcacccacatcggtcccacctgcgagggggcgggacctcgtggcgctggaccaatcagcacccacctgcgctcacctggcctcctcccgctggctcccgggggctgcggtgctcaaaggggcaagagctgagcggaacaccggcccgccgtcgcggcagctgcttcacccctctctctgcagccatggggctccctcgtggacctctcgcgtctctcctccttctccaggtttgctggctgcagtgcgcggcctccgagccgtgccgggcggtcttcagggaggctgaagtgaccttggaggcgggaggcgcggagcaggagcccggccaggcgctggggaaagtattcatgggctgccctgggcaagagccagctctgtttagcactgataatgatgacttcactgtgcggaatggcgagacagtccaggaaagaaggtcactgaaggaaaggaatccattgaagatcttcccatccaaacgtatcttacgaagacacaagagagattgggtggttgctccaatatctgtccctgaaaatggcaagggtcccttcccccagagactgaatcagctcaagtctaataaagatagagacaccaagattttctacagcatcacggggccgggggcagacagcccccctgagggtgtcttcgctgtagagaaggagacaggctggttgttgttgaataagccactggaccgggaggagattgccaagtatgagctctttggccacgctgtgtcagagaatggtgcctcagtggaggaccccatgaacatctccatcatcgtgaccgaccagaatgaccacaagcccaagtttacccaggacaccttccgagggagtgtcttagagggagtcctaccaggtacttctgtgatgcaggtgacagccacggatgaggatgatgccatctacacctacaatggggtggttgcttactccatccatagccaagaaccaaaggacccacacgacctcatgttcaccattcaccggagcacaggcaccatcagcgtcatctccagtggcctggaccgggaaaaagtccctgagtacacactgaccatccaggccacagacatggatggggacggctccaccaccacggcagtggcagtagtggagatccttgatgccaatgacaatgctcccatgtttgacccccagaagtacgaggcccatgtgcctgagaatgcagtgggccatgaggtgcagaggctgacggtcactgatctggacgcccccaactcaccagcgtggcgtgccacctaccttatcatgggcggtgacgacggggaccattttaccatcaccacccaccctgagagcaaccagggcatcctgacaaccaggaagggtttggattttgaggccaaaaaccagcacaccctgtacgttgaagtgaccaacgaggccccttttgtgctgaagctcccaacctccacagccaccatagtggtccacgtggaggatgtgaatgaggcacctgtgtttgtcccaccctccaaagtcgttgaggtccaggagggcatccccactggggagcctgtgtgtgtctacactgcagaagaccctgacaaggagaatcaaaagatcagctaccgcatcctgagagacccagcagggtggctagccatggacccagacagtgggcaggtcacagctgtgggcaccctcgaccgtgaggatgagcagtttgtgaggaacaacatctatgaagtcatggtcttggccatggacaatggaagccctcccaccactggcacgggaacccttctgctaacactgattgatgtcaatgaccatggcccagtccctgagccccgtcagatcaccatctgcaaccaaagccctgtgcgccaggtgctgaacatcacggacaaggacctgtctccccacacctcccctttccaggcccagctcacagatgactcagacatctactggacggcagaggtcaacgaggaaggtgacacagtggtcttgtccctgaagaagttcctgaagcaggatacatatgacgtgcacctttctctgtctgaccatggcaacaaagagcagctgacggtgatcagggccactgtgtgcgactgccatggccatgtcgaaacctgccctggaccctggaagggaggtttcatcctccctgtgctgggggctgtcctggctctgctgttcctcctgctggtgctgcttttgttggtgagaaagaagcggaagatcaaggagcccctcctactcccagaagatgacacccgtgacaacgtcttctactatggcgaagaggggggtggcgaagaggaccaggactatgacatcacccagctccaccgaggtctggaggccaggccggaggtggttctccgcaatgacgtggcaccaaccatcatcccgacacccatgtaccgtcctcggccagccaacccagatgaaatcggcaactttataattgaggggaggggagagaggggctcacagagaggaaatggaggcttgcagctggcaagaggcaggacccgccgctcctaactacctgttctctgttgccgcagaacctgaaggcggctaacacagaccccacagccccgccctacgacaccctcttggtgttcgactatgagggcagcggctccgacgccgcgtccctgagctccctcacctcctccgcctccgaccaagaccaagattacgattatctgaacgagtggggcagccgcttcaagaagctggcagacatgtacggtggcggggaggacgactaggcggcctgcctgcagggctggggaccaaacgtcaggccacagagcatctccaaggggtctcagttcccccttcagctgaggacttcggagcttgtcaggaagtggccgtagcaacttggcggagacaggctatgagtctgacgttagagtggtggcttccttagcctttcaggatggaggaatgtgggcagtttgacttcagcactgaaaacctctccacctgggccagggttgcctcagaggccaagtttccagaagcctcttacctgccgtaaaatgctcaaccctgtgtcctgggcctgggcctgctgtgactgacctacagtggactttctctctggaatggaaccttcttaggcctcctggtgcaacttaatttttttttttaatgctatcttcaaaacgttagagaaagttcttcaaaagtgcagcccagagctgctgggcccactggccgtcctgcatttctggtttccagaccccaatgcctcccattcggatggatctctgcgtttttatactgagtgtgcctaggttgccccttattttttattttccctgttgcgttgctatagatgaagggtgaggacaatcgtgtatatgtactagaacttttttattaaagaaacttttccc

SEQ ID NO: 112827 - DNA, 573 bp, Homo sapiens
  Payload ID: 2078
  Gene Symbol: CDH3
  Gene Name: cadherin 3, type 1, P-cadherin (placental)
  ENST ID: ENST00000566808
  CDS Start-End: 1-221
tttgctggctgcagtgcgcggcctccgagccgtgccgggcggtcttcagggaggctgaagtgaccttggaggcgggaggcgcggagcaggagcccggccaggcgctggggaaaggaaagaaggtcactgaaggaaaggaatccattgaagatcttcccatccaaacgtatcttacgaagacacaagagagattgggtggttgctccaatatctgtccctgaaaatggcaagggtcccttcccccagagactgaatcagctcaagtctaataaagatagagacaccaagattttctacagcatcacggggccgggggcagacagcccccctgagggtgtcttcgctgtagagaaggagacaggctggttgttgttgaataagccactggaccgggaggagattgccaagtatgagctctttggccacgctgtgtcagagaatggtgcctcagtggaggaccccatgaacatctccatcatcgtgaccgaccagaatgaccacaagcccaagtttacccaggacaccttccgagggagtgtcttagagggagtcctaccaggtacttctgtgatg

SEQ ID NO: 112828 - DNA, 892 bp, Homo sapiens
  Payload ID: 2078
  Gene Symbol: CDH3
  Gene Name: cadherin 3, type 1, P-cadherin (placental)
  ENST ID: ENST00000567674
  CDS Start-End: 1-125
ctgtgcgccaggtgctgaacatcacggacaaggacctgtctccccacacctcccctttccaggcccagctcacagatgactcagacatctactggacggcagaggtcaacgaggaaggtacctgagtgacacagtggtcttgtccctgaagaagttcctgaagcaggatacatatgacgtgcacctttctctgtctgaccatggcaacaaagagcagctgacggtgatcagggccactgtgtgcgactgccatggccatgtcgaaacctgccctggaccctggaagggaggtttcatcctccctgtgctgggggctgtcctggctctgctgttcctcctgctggtgctgcttttgttggtgagaaagaagcggaagatcaaggagcccctcctactcccagaagatgacacccgtgacaacgtcttctactatggcgaagaggggggtggcgaagaggaccaggactatgacatcacccagctccaccgaggtctggaggccaggccggaggtggttctccgcaatgacgtggcaccaaccatcatcccgacacccatgtaccgtcctcggccagccaacccagatgaaatcggcaactttataattgagaacctgaaggcggctaacacagaccccacagccccgccctacgacaccctcttggtgttcgactatgagggcagcggctccgacgccgcgtccctgagctccctcacctcctccgcctccgaccaagaccaagattacgattatctgaacgagtggggcagccgcttcaagaagctggcagacatgtacggtggcggggaggacgactaggcggcctgcctgcagggctggggaccaaacgtcaggccacagagcatctccaaggggtctcagttccccctt

SEQ ID NO: 112829 - DNA, 570 bp, Homo sapiens
  Payload ID: 2078
  Gene Symbol: CDH3
  Gene Name: cadherin 3, type 1, P-cadherin (placental)
  ENST ID: ENST00000568292
  CDS Start-End: 1-467
atggccatgtcgaaacctgccctggaccctggaagggaggtttcatcctccctgtgctgggggctgtcctggctctgctgttcctcctgctggtgctgcttttgttggtgagaaagaagcggaagatcaaggagcccctcctactcccagaagatgacacccgtgacaacgtcttctactatggcgaagaggggggtggcgaagaggaccaggactatgacatcacccagctccaccgaggtctggaggccaggccggaggtggttctccgcaatgacgtggcaccaaccatcatcccgacacccatgtaccgtcctcggccagccaacccagatgaaatcggcaactttataattgaggtgaggcgtggcaggccagtcgagggccaccctttattcaagcccagcaccagccacacaggagaacaagcatgggcctggagtcttgggtctgggttcaaattctgactccaccaccaaccagcttttgacctctggcttatttgagtaacttctggggtttgtttcttcctccatagaactcacttgcagagtggttaaaaatgattag

SEQ ID NO: 112830 - DNA, 291 bp, Homo sapiens
  Payload ID: 2078
  Gene Symbol: CDH3
  Gene Name: cadherin 3, type 1, P-cadherin (placental)
  ENST ID: ENST00000569080
  CDS Start-End: 1-246
gtggttctccgcaatgacgtggcaccaaccatcatcccgacacccatgtaccgtcctcggccagccaacccagatgaaatcggcaactttataattgaggttttattgctctgcaggtctccaccctggcaggaagctcttgccaccggctacagtctggatccagcctggccagttccacctttcccacctacaacacctggcaagaccaagacacagcccttccacaaatacatgagtacatgagcacgtggggtggacaagccatccaatcagtcctcactgactctg

SEQ ID NO: 112831 - DNA, 2746 bp, Homo sapiens
  Payload ID: 2078
  Gene Symbol: CDH3
  Gene Name: cadherin 3, type 1, P-cadherin (placental)
  ENST ID: ENST00000542274
  CDS Start-End: 80-226
gcggtgctcaaaggggcaagagctgagcggaacaccggcccgccgtcgcggcagctgcttcacccctctctctgcagccatggggctccctcgtggacctctcgcgtctctcctccttctccagtattcatgggctgccctgggcaagagccagctctgtttagcactgataatgatgacttcactgtgcggaatggcgagacagtccaggaaagaaggtcactgaaggaaaggaatccattgaagatcttcccatccaaacgtatcttacgaagacacaagagagattgggtggttgctccaatatctgtccctgaaaatggcaagggtcccttcccccagagactgaatcagctcaagtctaataaagatagagacaccaagattttctacagcatcacggggccgggggcagacagcccccctgagggtgtcttcgctgtagagaaggagacaggctggttgttgttgaataagccactggaccgggaggagattgccaagtatgagctctttggccacgctgtgtcagagaatggtgcctcagtggaggaccccatgaacatctccatcatcgtgaccgaccagaatgaccacaagcccaagtttacccaggacaccttccgagggagtgtcttagagggagtcctaccaggtacttctgtgatgcaggtgacagccacggatgaggatgatgccatctacacctacaatggggtggttgcttactccatccatagccaagaaccaaaggacccacacgacctcatgttcaccattcaccggagcacaggcaccatcagcgtcatctccagtggcctggaccgggaaaaagtccctgagtacacactgaccatccaggccacagacatggatggggacggctccaccaccacggcagtggcagtagtggagatccttgatgccaatgacaatgctcccatgtttgacccccagaagtacgaggcccatgtgcctgagaatgcagtgggccatgaggtgcagaggctgacggtcactgatctggacgcccccaactcaccagcgtggcgtgccacctaccttatcatgggcggtgacgacggggaccattttaccatcaccacccaccctgagagcaaccagggcatcctgacaaccaggaagggtttggattttgaggccaaaaaccagcacaccctgtacgttgaagtgaccaacgaggccccttttgtgctgaagctcccaacctccacagccaccatagtggtccacgtggaggatgtgaatgaggcacctgtgtttgtcccaccctccaaagtcgttgaggtccaggagggcatccccactggggagcctgtgtgtgtctacactgcagaagaccctgacaaggagaatcaaaagatcagctaccgcatcctgagagacccagcagggtggctagccatggacccagacagtgggcaggtcacagctgtgggcaccctcgaccgtgaggatgagcagtttgtgaggaacaacatctatgaagtcatggtcttggccatggacaatggaagccctcccaccactggcacgggaacccttctgctaacactgattgatgtcaatgaccatggcccagtccctgagccccgtcagatcaccatctgcaaccaaagccctgtgcgccaggtgctgaacatcacggacaaggacctgtctccccacacctcccctttccaggcccagctcacagatgactcagacatctactggacggcagaggtcaacgaggaaggtgacacagtggtcttgtccctgaagaagttcctgaagcaggatacatatgacgtgcacctttctctgtctgaccatggcaacaaagagcagctgacggtgatcagggccactgtgtgcgactgccatggccatgtcgaaacctgccctggaccctggaagggaggtttcatcctccctgtgctgggggctgtcctggctctgctgttcctcctgctggtgctgcttttgttggtgagaaagaagcggaagatcaaggagcccctcctactcccagaagatgacacccgtgacaacgtcttctactatggcgaagaggggggtggcgaagaggaccaggactatgacatcacccagctccaccgaggtctggaggccaggccggaggtggttctccgcaatgacgtggcaccaaccatcatcccgacacccatgtaccgtcctcggccagccaacccagatgaaatcggcaactttataattgagaacctgaaggcggctaacacagaccccacagccccgccctacgacaccctcttggtgttcgactatgagggcagcggctccgacgccgcgtccctgagctccctcacctcctccgcctccgaccaagaccaagattacgattatctgaacgagtggggcagccgcttcaagaagctggcagacatgtacggtggcggggaggacgactaggcggcctgcctgcagggctggggaccaaacgtcaggccacagagcatctccaaggggtctcagttcccccttcagctgaggacttcggagcttgtcaggaagtggccgtagcaacttggcggagacaggctatgagtctgacgttagagtggtggcttccttagcctttcaggatggaggaatgtgggcagtttgacttcagcactgaaaacctctccacctgggccagggttgcctcagaggccaagtttccagaagcctcttacctgccgtaaaatgctcaaccctgtgt

SEQ ID NO: 112832 - DNA, 563 bp, Homo sapiens
  Payload ID: 2078
  Gene Symbol: CDH3
  Gene Name: cadherin 3, type 1, P-cadherin (placental)
  ENST ID: ENST00000569036
  CDS Start-End: 1-179
gactgaatcagctcaagtctaataaagatagagacaccaagattttctacagcatcacggggccgggggcagacagcccccctgagggtgtcttcgctgtagagaaggagacaggctggttgttgttgaataagccactggaccgggaggagattgccaagtatgaggtacttctgtgatgcaggtgacagccacggatgaggatgatgccatctacacctacaatggggtggttgcttactccatccatagccaagaaccaaaggacccacacgacctcatgttcaccattcaccggagcacaggcaccatcagcgtcatctccagtggcctggaccgggaaaaagtccctgagtacacactgaccatccaggccacagacatggatggggacggctccaccaccacggcagtggcagtagtggagatccttgatgccaatgacaatgctcccatgtttgacccccagaagtacgaggcccatgtgcctgagaatgcagtgggccatgaggtgcagaggctgacggtcactgatctggacgcccccaactcaccagcgtggc

SEQ ID NO: 112833 - DNA, 3117 bp, Homo sapiens
  Payload ID: 2079
  Gene Symbol: CDH4
  Gene Name: cadherin 4, type 1, R-cadherin (retinal)
  Uniprot ID: P55283
  ENST ID: ENST00000543233
  CDS Start-End: 283-2811
gcactggcgctctggctttcttctttctccctctgccttaatgatgctgcccctttcctgttcctggttgaagctgaagcccgcttcccttcgccgcacacaacacaggagcaatcttctcagccgtgcactcacagcttggaaaataaagggaggaaggagtcccagccacagggtagaggaacggcctctccacagagaagctgctgctgctgagctgaagtgacagtcaagttcagcagctgtgtggggaccaaggggacacaatatgagaccaacagcatggacttcaaagttggggcagatgggacagtcttcgccacccgggagctgcaggtcccctccgagcaggtggcgttcacggtgactgcatgggacagccagacagcagagaaatgggacgccgtggtgcggttgctggtggcccagacctcgtccccgcactctggacacaagccgcagaaaggaaagaaggtcgtggctctggacccctctccgcctccgaaggacaccctgctgccgtggccccagcaccagaacgccaacgggctgaggcggcgcaaacgggactgggtcatcccgcccatcaacgtgcccgagaactcgcgcgggcccttcccgcagcagctcgtgaggatccggtccgacaaagacaatgacatccccatccggtacagcatcacgggagtgggcgccgaccagccccccatggaggtcttcagcattgactccatgtccggccggatgtacgtcacaaggcccatggaccgggaggagcacgcctcttaccacctccgagcccacgctgtggacatgaatggcaacaaggtggagaaccccatcgacctgtacatctacgtcatcgacatgaatgacaaccgccctgagttcatcaaccaggtctacaacggctccgtggacgagggctccaagccaggcacctacgtgatgaccgtcacggccaacgatgctgacgacagcaccacggccaacgggatggtgcggtaccggatcgtgacccagaccccacagagcccgtcccagaatatgttcaccatcaacagcgagactggagatatcgtcacagtggcggctggcctggaccgagagaaagttcagcagtacacagtcatcgttcaggccacagatatggaaggaaatctcaactatggcctctcaaacacagccacagccatcatcacggtgacagatgtgaatgacaacccgccagaatttaccgccagcacgtttgcaggggaggtccccgaaaaccgcgtggagaccgtggtcgcaaacctcacggtgatggaccgagatcagccccactctccaaactggaatgccgtttaccgcatcatcagtggggatccatccgggcacttcagcgtccgcacagaccccgtaaccaacgagggcatggtcaccgtggtgaaggcagtcgactacgagctcaacagagctttcatgctgacagtgatggtgtccaaccaggcgcccctggccagcggaatccagatgtccttccagtccacggcaggggtgaccatctccatcatggacatcaacgaggctccctacttcccctcaaaccacaagctgatccgcctggaggagggcgtgccccccggcaccgtgctgaccacgttttcagctgtggaccctgaccggttcatgcagcaggctgtgagatactcaaagctgtcagacccagcgagctggctgcacatcaatgccaccaacggccagatcaccacggcggcagtgctggaccgtgagtccctctacaccaaaaacaacgtctacgaggccaccttcctggcagctgacaatgggatacccccggccagcggcaccgggaccctccagatctatctcattgacatcaacgacaacgcccctgagctgctgcccaaggaggcgcagatctgcgagaagcccaacctgaacgccatcaacatcacggcggccgacgctgacgtcgaccccaacatcggcccctacgtcttcgagctgccctttgtcccggcggccgtgcggaagaactggaccatcacccgcctgaacggtgactatgcccaactcagcttgcgcatcctgtacctggaggccgggatgtatgacgtccccatcatcgtcacagactctggaaaccctcccctgtccaacacgtccatcatcaaagtcaaggtgtgcccatgtgatgacaacggggactgcaccaccattggcgcagtggcagcggctggtctgggcaccggtgccatcgtggccatcctcatctgcatcctcatcctgctgaccatggtcctgctgtttgtcatgtggatgaagcggcgagagaaggagcgccacacgaagcagctgctcattgaccccgaggacgacgtccgcgacaacatcctcaagtatgacgaggaaggcggtggcgaggaggaccaggactacgacctcagccagctgcagcagccggaagccatggggcacgtgccaagcaaagcccctggcgtgcgtcgcgtggatgagcggccggtgggcgctgagccccagtacccgatcaggcccatggtgccgcacccaggcgacatcggtgacttcatcaatgagggactccgcgctgctgacaacgaccccacggcacccccctatgactccctgctggtcttcgactacgaggggagcggctccaccgcaggctccgtcagctccctgaactcatccagttccggggaccaagactacgattacctcaacgactgggggcccagattcaagaagctggcggacatgtatggaggtggtgaagaggattgactgacctcgcatcttcggaccgaagtgagagccgtgctcggacgccggaggagcaggactgagcagaggcggccggtcttcccgactccctgcggctgtgtccttagtgctgttaggaggccccccaatccccacgttgagctgtctagcatgagcacccacccccacagcgccctgcacccggccgctgcccagcaccgcgctggctggcactgaaggacagcaagaggcactctgtcttcacttgaatttcctagaacagaagcactgtttttaaaaaaaaaaaaaaaaaaagaagaaagaaag

SEQ ID NO: 112834 - DNA, 3304 bp, Homo sapiens
  Payload ID: 2079
  Gene Symbol: CDH4
  Gene Name: cadherin 4, type 1, R-cadherin (retinal)
  ENST ID: ENST00000611855
  CDS Start-End: 561-3029
atcttgggcctgtcacttggggagcactgtagaaggttctggagaaggcattgagactataattctactttaatgagctgggctacctagattctatggtacagcaagagaagctgtttgtatgcacctgtatgtacgtgccttacttaaaattcagaaagaaaatcttcaggtgccagaattacttgtgaggctggtgaagagtgaaaagccacttcccaggccagacaggaaagagtgccctggttgggaccagacgggcctggctgcagacgtacactttgggcttcagcagccctggtgctgccttgagcttgacccgaattgcttcttcccagaggctgggtctccctcgcagcccctgctctcaaggatgggaatgagaaggtcgatgacaaggcacctctgctttacatccaagcgttgacttttgtggcttcctttaccccattgctctgccctttaaagggtcctggtgtgtttgggaatgggacagacaattttgtttttcacaatggtattgggctgtggatccagaactcaagttccagaggaaagcgatgccaaagtcaacagggatgcttcacggaggcagggaaaatgcaggagtcaagttcagcagctgtgtggggaccaaggggacacaatatgagaccaacagcatggacttcaaaccgcagaaaggaaagaaggtcgtggctctggacccctctccgcctccgaaggacaccctgctgccgtggccccagcaccagaacgccaacgggctgaggcggcgcaaacgggactgggtcatcccgcccatcaacgtgcccgagaactcgcgcgggcccttcccgcagcagctcgtgaggatccggtccgacaaagacaatgacatccccatccggtacagcatcacgggagtgggcgccgaccagccccccatggaggtcttcagcattgactccatgtccggccggatgtacgtcacaaggcccatggaccgggaggagcacgcctcttaccacctccgagcccacgctgtggacatgaatggcaacaaggtggagaaccccatcgacctgtacatctacgtcatcgacatgaatgacaaccgccctgagttcatcaaccaggtctacaacggctccgtggacgagggctccaagccaggcacctacgtgatgaccgtcacggccaacgatgctgacgacagcaccacggccaacgggatggtgcggtaccggatcgtgacccagaccccacagagcccgtcccagaatatgttcaccatcaacagcgagactggagatatcgtcacagtggcggctggcctggaccgagagaaagttcagcagtacacagtcatcgttcaggccacagatatggaaggaaatctcaactatggcctctcaaacacagccacagccatcatcacggtgacagatgtgaatgacaacccgccagaatttaccgccagcacgtttgcaggggaggtccccgaaaaccgcgtggagaccgtggtcgcaaacctcacggtgatggaccgagatcagccccactctccaaactggaatgccgtttaccgcatcatcagtggggatccatccgggcacttcagcgtccgcacagaccccgtaaccaacgagggcatggtcaccgtggtgaaggcagtcgactacgagctcaacagagctttcatgctgacagtgatggtgtccaaccaggcgcccctggccagcggaatccagatgtccttccagtccacggcaggggtgaccatctccatcatggacatcaacgaggctccctacttcccctcaaaccacaagctgatccgcctggaggagggcgtgccccccggcaccgtgctgaccacgttttcagctgtggaccctgaccggttcatgcagcaggctgtgagatactcaaagctgtcagacccagcgagctggctgcacatcaatgccaccaacggccagatcaccacggcggcagtgctggaccgtgagtccctctacaccaaaaacaacgtctacgaggccaccttcctggcagctgacaatgggatacccccggccagcggcaccgggaccctccagatctatctcattgacatcaacgacaacgcccctgagctgctgcccaaggaggcgcagatctgcgagaagcccaacctgaacgccatcaacatcacggcggccgacgctgacgtcgaccccaacatcggcccctacgtcttcgagctgccctttgtcccggcggccgtgcggaagaactggaccatcacccgcctgaacggtgactatgcccaactcagcttgcgcatcctgtacctggaggccgggatgtatgacgtccccatcatcgtcacagactctggaaaccctcccctgtccaacacgtccatcatcaaagtcaaggtgtgcccatgtgatgacaacggggactgcaccaccattggcgcagtggcagcggctggtctgggcaccggtgccatcgtggccatcctcatctgcatcctcatcctgctgaccatggtcctgctgtttgtcatgtggatgaagcggcgagagaaggagcgccacacgaagcagctgctcattgaccccgaggacgacgtccgcgacaacatcctcaagtatgacgaggaaggcggtggcgaggaggaccaggactacgacctcagccagctgcagcagccggaagccatggggcacgtgccaagcaaagcccctggcgtgcgtcgcgtggatgagcggccggtgggcgctgagccccagtacccgatcaggcccatggtgccgcacccaggcgacatcggtgacttcatcaatgagggactccgcgctgctgacaacgaccccacggcacccccctatgactccctgctggtcttcgactacgaggggagcggctccaccgcaggctccgtcagctccctgaactcatccagttccggggaccaagactacgattacctcaacgactgggggcccagattcaagaagctggcggacatgtatggaggtggtgaagaggattgactgacctcgcatcttcggaccgaagtgagagccgtgctcggacgccggaggagcaggactgagcagaggcggccggtcttcccgactccctgcggctgtgtccttagtgctgttaggaggccccccaatccccacgttgagctgtctagcatgagcacccacccccacagcgccctgcacccggccgctgcccagcaccgcgctggctggcactgaaggacagcaagaggcactctgtcttcacttgaatttcctagaacagaagcactgttttt

SEQ ID NO: 112835 - DNA, 6513 bp, Homo sapiens
  Payload ID: 2079
  Gene Symbol: CDH4
  Gene Name: cadherin 4, type 1, R-cadherin (retinal)
  Uniprot ID: P55283
  ENST ID: ENST00000614565
  CDS Start-End: 89-2839
agcggcggcggtggtctcggcggcggcggcggcggcggcggcagggagcgggctcccggtgccgggcaccgggcgggcggcggggaagatgaccgcgggcgccggcgtgctccttctgctgctctcgctctccggcgcgctccgggcccataatgaggatcttacaactagagagacctgcaaggctgggttctctgaagatgattacacggcattaatctcccaaaatattctagaaggggaaaagctacttcaagtcaagttcagcagctgtgtggggaccaaggggacacaatatgagaccaacagcatggacttcaaagttggggcagatgggacagtcttcgccacccgggagctgcaggtcccctccgagcaggtggcgttcacggtgactgcatgggacagccagacagcagagaaatgggacgccgtggtgcggttgctggtggcccagacctcgtccccgcactctggacacaagccgcagaaaggaaagaaggtcgtggctctggacccctctccgcctccgaaggacaccctgctgccgtggccccagcaccagaacgccaacgggctgaggcggcgcaaacgggactgggtcatcccgcccatcaacgtgcccgagaactcgcgcgggcccttcccgcagcagctcgtgaggatccggtccgacaaagacaatgacatccccatccggtacagcatcacgggagtgggcgccgaccagccccccatggaggtcttcagcattgactccatgtccggccggatgtacgtcacaaggcccatggaccgggaggagcacgcctcttaccacctccgagcccacgctgtggacatgaatggcaacaaggtggagaaccccatcgacctgtacatctacgtcatcgacatgaatgacaaccgccctgagttcatcaaccaggtctacaacggctccgtggacgagggctccaagccaggcacctacgtgatgaccgtcacggccaacgatgctgacgacagcaccacggccaacgggatggtgcggtaccggatcgtgacccagaccccacagagcccgtcccagaatatgttcaccatcaacagcgagactggagatatcgtcacagtggcggctggcctggaccgagagaaagttcagcagtacacagtcatcgttcaggccacagatatggaaggaaatctcaactatggcctctcaaacacagccacagccatcatcacggtgacagatgtgaatgacaacccgccagaatttaccgccagcacgtttgcaggggaggtccccgaaaaccgcgtggagaccgtggtcgcaaacctcacggtgatggaccgagatcagccccactctccaaactggaatgccgtttaccgcatcatcagtggggatccatccgggcacttcagcgtccgcacagaccccgtaaccaacgagggcatggtcaccgtggtgaaggcagtcgactacgagctcaacagagctttcatgctgacagtgatggtgtccaaccaggcgcccctggccagcggaatccagatgtccttccagtccacggcaggggtgaccatctccatcatggacatcaacgaggctccctacttcccctcaaaccacaagctgatccgcctggaggagggcgtgccccccggcaccgtgctgaccacgttttcagctgtggaccctgaccggttcatgcagcaggctgtgagatactcaaagctgtcagacccagcgagctggctgcacatcaatgccaccaacggccagatcaccacggcggcagtgctggaccgtgagtccctctacaccaaaaacaacgtctacgaggccaccttcctggcagctgacaatgggatacccccggccagcggcaccgggaccctccagatctatctcattgacatcaacgacaacgcccctgagctgctgcccaaggaggcgcagatctgcgagaagcccaacctgaacgccatcaacatcacggcggccgacgctgacgtcgaccccaacatcggcccctacgtcttcgagctgccctttgtcccggcggccgtgcggaagaactggaccatcacccgcctgaacggtgactatgcccaactcagcttgcgcatcctgtacctggaggccgggatgtatgacgtccccatcatcgtcacagactctggaaaccctcccctgtccaacacgtccatcatcaaagtcaaggtgtgcccatgtgatgacaacggggactgcaccaccattggcgcagtggcagcggctggtctgggcaccggtgccatcgtggccatcctcatctgcatcctcatcctgctgaccatggtcctgctgtttgtcatgtggatgaagcggcgagagaaggagcgccacacgaagcagctgctcattgaccccgaggacgacgtccgcgacaacatcctcaagtatgacgaggaaggcggtggcgaggaggaccaggactacgacctcagccagctgcagcagccggaagccatggggcacgtgccaagcaaagcccctggcgtgcgtcgcgtggatgagcggccggtgggcgctgagccccagtacccgatcaggcccatggtgccgcacccaggcgacatcggtgacttcatcaatgagggactccgcgctgctgacaacgaccccacggcacccccctatgactccctgctggtcttcgactacgaggggagcggctccaccgcaggctccgtcagctccctgaactcatccagttccggggaccaagactacgattacctcaacgactgggggcccagattcaagaagctggcggacatgtatggaggtggtgaagaggattgactgacctcgcatcttcggaccgaagtgagagccgtgctcggacgccggaggagcaggactgagcagaggcggccggtcttcccgactccctgcggctgtgtccttagtgctgttaggaggccccccaatccccacgttgagctgtctagcatgagcacccacccccacagcgccctgcacccggccgctgcccagcaccgcgctggctggcactgaaggacagcaagaggcactctgtcttcacttgaatttcctagaacagaagcactgtttttaaaaaaaaaaaaaaaaaaagaagaaagaaagaaaaaaaaaaaaaaaagaaagtgccttttggtacatgtatcagattccctcaaactcaggagtgtctaaagcagacagaccgtccccaccttcccatcccgagcggcctccaaccccagctagtcccagctctgaaggcatcattcagaaatgggggagactgtgtctgtctttcttactttttttttggtcttttattaagaaaaagaaagtgggtgacttgtttgaaaacagagtggggttcaaatcccagcagcctttgctgtacacagctgggggtctcttgagcctcttgggagtcaaggccagctgggaggcttagcccttcagccccagcagaaggccctggggctggtggggctcagaatacccctaccttgtggctgctccccacccctcccggatgctgtgaggagctcaggcaggggcctggaggggaacaggggtcatcctgaaggggctccacccccagtcaacccaggcctccctcagggacacctgtcaccctgagtgccaccaggtcccctctgcctttggtccagaagagtgagttgtccaaaccagccagcatctggctccagccctccaaccctggcgaccagaccccatggggtgccatcaacggccccgcgacaggcatcaattcaaaccccaggacactctcgacagctccaaccatccggagggctgtgcagatggcaggaaccaaggaccctccctggcagctgaagagggcagttacggttgggcgtggtgaccagaacacacccagcagcctgcgaagcctccccgtccccagcctgtgctcctgattcccgccagacgcttgtgagcctgtgtgggtggcaggaggccccgtcttgccgtgcctacctgtcgcacagatgcctctgcacgctgcagacggtgcctctcctctcctatggaccctcgtcgggggcaggcagcggccgggtccaaacttgctgctgtcctcgaggctggcactgctatctccagggctgggttgactcaagccagacagggggaaggaattggttctgcaggacagtgagagggtctgtgtcccggcacccctgggacagcgctcggctgcctgtgctcactgcatgagaaaactcagagggtgcattctccctctggcatggctgtgtctgggcgccttgggctgcggcagggggcaggccccacgtggggaagcctcgtgcttggtcagctttctgtctctcccaggccagtgacaactggcttcccgaggaaggaggtgaggtaccagggaccctgggcaggacctggtgtcgggcagggcggtgccagcactggggaaggacagggagccctcccggagccccaccctgcacctgccactggggtcagggagtgtctcggggtgcctttgggggcagcatgagctccaccaggggccccggcccccacctcagcctatggcccttccccatggctaaggtcatgccttttctgaacagctttggccttgagtgcacacatctgtgccaggctcacggcatgttcccgttggatgtcagggtccttgtccaaaccaaactcacagctgcccctgtgcagccttcagagttgagctggggtctcagtctccaacctgtcctttctgaccctcccatggctgcccagggagggcggggttcactgtgccacgtgctgggtgcccccctctgcagacagccagtccaggagatggaccaacagaggtcaaggggcagctggccaggccgcaccggggtccccgagttctgagctgtgctatgcaaacaagaatgctcctgtgtgggggggcatggccgttggaggtatagctgggcgggtagtggaaggactggaaatctctgttgttgtttggggaagtccatgcttcagtccttcggagtatgcgtggattgttcgaagtgtgactatggcccgggagccagggcagcatgaactcctttctctgaaatttcgaggcctccttgggttccctgaactccgggctgatgttcccaggacccagcaccaggagaccccagtcccgccagcagccgccgctacccaggagggctgggcgacattggccgcctcccactagctccccctcctcgcccacagcctcttgtcactgccaagcccccgttccttttgcccaaatcacgcaggcggaagctgcagtgccagctggagggatgttcatagggcttcctgtgcccatccctgctccaaacagctggacagcttcccctctacccccaccctggtgagcccctgggggccagagaaagatggggttcctgcaccttcccagctccacctctgaacttgagttagcgttagctaagcatacaatcagtgtcgaacgtctctcttccttaagcttgtagatacgactgcctataatcaggggactcccactggaggccgggaggccaatgctggccaggtgcgagggcatggtttggttcctttagggaatttttgttttgcaaacaggagaaacctgtgctgcaggttggagtggcaggaacgactggccttggtcagcaggcagcccccagcctagggccacagtcctcttcagggcctgggcagccccaatttctggcccagcaggtttctctttgtagtgtctttcagcacatccaaaatgctaggcctcctgccaccaacgtgtcagagcaatgtccaactgtcaggctctcagagatgcctcagtttccctagcatgagcaccagccgacacacacagtccactgagatgataattctgttctctccaaagcaaaaagctgggcgaggggtagtctcaatttctgtcagtgctcaaaggaataacaccaaaagaatcaacacagaatctcccagacacacgtgacccagctcgtggcgccgtgggtccgtaggagggacagtacctcacaacaggcccagcgggggaccacctctctgtacaattggaatgcgttttacttttcttttctctccttttttcattccgattttttttgcatgtttctttttgaaatgggcaaaatgtgtagcagcctgcatgagcacagttgttttggggaaagatactggagtatgatgtactcacacctgcaaatctgagcatcgcgaggttaaacgttccacctttttttgtaatcgtcaacagcacaactattttgtattgttgtttgtatcattttgtaccaaaaaaaaaaaggaaaaaaaaagggaagagagttgatgttttcagtgtgtttccagtgccagacagtcttggtcctgaactcagtagacccttgcggagcggttgtgcgcgggcaggcggggcgcgctgctccagagaatgaataaagtcccccttttccgta

SEQ ID NO: 112836 - DNA, 5377 bp, Homo sapiens
  Payload ID: 2079
  Gene Symbol: CDH4
  Gene Name: cadherin 4, type 1, R-cadherin (retinal)
  ENST ID: ENST00000625686
  CDS Start-End: 1-1701
aaagttcagcagtacacagtcatcgttcaggccacagatatggaaggaaatctcaactatggcctctcaaacacagccacagccatcatcacggtgacagatgtgaatgacaacccgccagaatttaccgccagcacgtttgcaggggaggtccccgaaaaccgcgtggagaccgtggtcgcaaacctcacggtgatggaccgagatcagccccactctccaaactggaatgccgtttaccgcatcatcagtggggatccatccgggcacttcagcgtccgcacagaccccgtaaccaacgagggcatggtcaccgtggtgaaggcagtcgactacgagctcaacagagctttcatgctgacagtgatggtgtccaaccaggcgcccctggccagcggaatccagatgtccttccagtccacggcaggggtgaccatctccatcatggacatcaacgaggctccctacttcccctcaaaccacaagctgatccgcctggaggagggcgtgccccccggcaccgtgctgaccacgttttcagctgtggaccctgaccggttcatgcagcaggctgtgagatactcaaagctgtcagacccagcgagctggctgcacatcaatgccaccaacggccagatcaccacggcggcagtgctggaccgtgagtccctctacaccaaaaacaacgtctacgaggccaccttcctggcagctgacaatgggatacccccggccagcggcaccgggaccctccagatctatctcattgacatcaacgacaacgcccctgagctgctgcccaaggaggcgcagatctgcgagaggcccaacctgaacgccatcaacatcacggcggccgacgctgacgtcgaccccaacatcggcccctacgtcttcgagctgccctttgtcccggcggccgtgcggaagaactggaccatcacccgcctgaacggtgactatgcccaactcagcttgcgcatcctgtacctggaggccgggatgtatgacgtccccatcatcgtcacagactctggaaaccctcccctgtccaacacgtccatcatcaaagtcaaggtgtgcccatgtgatgacaacggggactgcaccaccattggcgcagtggcagcggctggtctgggcaccggtgccatcgtggccatcctcatctgcatcctcatcctgctgaccatggtcctgctgtttgtcatgtggatgaagcggcgagagaaggagcgccacacgaagcagctgctcattgaccccgaggacgacgtccgcgacaacatcctcaagtatgacgaggaaggcggtggcgaggaggaccaggactacgacctcagccagctgcagcagccggaagccatggggcacgtgccaagcaaagcccctggcgtgcgtcgcgtggatgagcggccggtgggtgctgagccccagtacccgatcaggcccatggtgccgcacccaggcgacatcggtgacttcatcaatgagggactccgcgctgctgacaacgaccccacggcacccccctatgactccctgctggtcttcgactacgaggggagcggctccaccgcaggctccgtcagctccctgaactcatccagttccggggaccaagactacgattacctcaacgactgggggcccagattcaagaagctggcggacatgtatggaggtggtgaagaggattgactgacctcgcatcttcggaccgaagtgagagccgtgctcggacgccggaggagcaggactgagcagaggcggccggtcttcccgactccctgcggctgtgtccttagtgctgttaggaggccccccaatccccacgttgagctgtctagcatgagcacccacccccacagcgccctgcacccggccgctgcccagcaccgcgctggctggcactgaaggacagcaagaggcactctgtcttcacttgaatttcctagaacagaagcactgtttttaaaaaaaaaaaaaaaaaaaagaagaaagaaagaaaaaaaaaaaaaaaagaaagtgccttttggtacatgtatcagattccctcaaactcaggagtgtctaaagcagacagaccgtccccaccttcccatcccgagcggcctccaaccccagctagtcccagctctgaaggcatcattcagaaatgggggagactgtgtctgtctttcttactttttttttggtcttttattaagaaaaagaaagtgggtgacttgtttgaaaacagagtggggttcaaatcccagcagcctttgctgtacacagctgggggtctcttgagcctcttgggagtcaaggccagctgggaggcttagcccttcagccccagcagaaggccctggggctggtggggctcagaatacccctaccttgtggctgctccccaccccctcccggatgctgtgaggagctcaggcaggggcctggaggggaacaggggtcatcctgaaggggctccacccccagtcaacccaggcctccctcagggacacctgtcaccctgagtgccaccaggtcccctctgcctttggtccagaagagtgagttgtccaaaccagccagcatctggctccagccctccaaccctggcgaccagaccccatggggtgccatcaacggccccgcgacaggcatcaattcaaaccccaggacactctcgacagctccaaccatccggagggctgtgcagatggcaggaaccaaggaccctccctggcagctgaagagggcagttacggttgggcgtggtgaccagaacacacccagcagcctgcgaagcctccccgtccccagcctgtgctcctgattcccgccagacgcttgtgagcctgtgtgggtggcaggaggccccgtcttgccgtgcctacctgtcgcacaggtgcctctgcacgctgcagacggtgcctctcctctcctatggaccctcgtcgggggcaggcagcggccgggtccaaacttgctgctgtcctcgaggctggcactgctatctccagggctgggttgactcaagccagacagggggaaggaattggttctgcaggacagtgagagggtctgtgtcccggcacccctgggacagcgctcggctgcctgtgctcactgcatgagaaaactcagagggtgcattctccctctggcatggctgtgtctgggcgccttgggctgcggcagggggcaggccccacgtggggaagcctcgtgcttggtcagctttctgtctctcccaggccagtgacaactggcttcccgaggaaggaggtgaggtaccagggaccctgggcaggacctggtgtcgggcagggcggtgccagcactggggaaggacagggagccctcccggagccccaccctgcacctgccactggggtcagggagtgtctcggggtgcctttgggggcagcatgagctccaccaggggccccggcccccacctcagcctatggcccttccccatggctaaggtcatgccttttctgaacagctttggccttgagtgcacacatctgtgccaggctcacggcatgttcccgttggatgtcagggtccttgtccaaaccaaactcacagctgcccctgtgcagccttcagagttgagctggggtctcagtctccaacctgtcctttctgaccctcccatggctgcccagggagggcggggttcactgtgccacgtgctgggtgcccccctctgcagacagccagtccaggagatggaccaacagaggtcaaggggcagctggccaggccgcaccggggtccccgagttctgagctgtgctatgcaaacaagaatgctcctgtgtgggggggcatggccgttggaggtatagctgggcgggtagtggaaggactggaaatctctgttgttgtttggggaagtccatgcttcagtccttcggagtatgcgtggattgttcgaagtgtgactatggcccgggagccagggcagcatgaactcctttctctgaaatttcgaggcctccttgggttccctgaactccgggctgatgttcccaggacccagcaccaggagaccccagtcccgccagcagccgccgctacccaggagggctgggcgacattggccgcctcccactagctccccctcctcgcccacagcctcttgtcactgccaagcccccgttccttttgcccaaatcacgcaggcggaagctgcagtgccagctggagggatgttcatagggcttcctgtgcccatccctgctccaaacagctggacagcttcccctctacccccaccctggtgagcccctgggggccagagaaagatggggttcctgcaccttcccagctccacctctgaacttgagttagcgttagctaagcatacaatcagtgtcgaacgtctctcttccttaagcttgtagatacgactgcctataatcaggggactcccactggaggccgggaggccaatgctggccaggtgcgagggcatggtttggttcctttagggaatttttgttttgcaaacaggagaaacctgtgctgcaggttggagtggcaggaacgactggccttggtcagcaggcagcccccagcctagggccacagtcctcttcagggcctgggcagccccaatttctggcccagcaggtttctctttgtagtgtctttcagcacatccaaaatgctaggcctcctgccaccaacgtgtcagagcaatgtccaactgtcaggctctcagagatgcctcagtttccctagcatgagcaccagccgacacacacagtccactgagatgataattctgttctctccaaagcaaaaagctgggcgaggggtagtctcaatttctgtcagtgctcaaaggaataacaccaaaagaatcaacacagaatctcccagacacacgtgacccagctcgtggcgccgtgggtccgtaggagggacagtacctcacaacaggcccagcgggggaccacctctctgtacaattggaatgcgttttacttttcttttctctccttttttcattccgattttttttgcatgtttctttttgaaatgggcaaaatgtgtagcagcctgcatgagcacagttgttttggggaaagatactggagtatgatgtactcacacctgcaaatctgagcatcgcgaggttaaacgttccacctttttttgtaatcgtcaacagcacaactattttgtattgttgtttgtatcattttgtaccaaaaaaaaaaaggaaaaaaaaagggaagagagttgatgttttcagtgtgtttccagtgccagacagtcttggtcctgaactcagtagacccttgcggagcggttgtgcgcgggcaggcggggcgcgctgctccagagaatgaataaagtcccccttttccgta

SEQ ID NO: 112837 - DNA, 1976 bp, Homo sapiens
  Payload ID: 2079
  Gene Symbol: CDH4
  Gene Name: cadherin 4, type 1, R-cadherin (retinal)
  ENST ID: ENST00000629889
  CDS Start-End: 1-1701
aaagttcagcagtacacagtcatcgttcaggccacagatatggaaggaaatctcaactatggcctctcaaacacagccacagccatcatcacggtgacagatgtgaatgacaacccgccagaatttaccgccagcacgtttgcaggggaggtccccgaaaaccgcgtggagaccgtggtcgcaaacctcacggtgatggaccgagatcagccccactctccaaactggaatgccgtttaccgcatcatcagtggggatccatccgggcacttcagcgtccgcacagaccccgtaaccaacgagggcatggtcaccgtggtgaaggcagtcgactacgagctcaacagagctttcatgctgacagtgatggtgtccaaccaggcgcccctggccagcggaatccagatgtccttccagtccacggcaggggtgaccatctccatcatggacatcaacgaggctccctacttcccctcaaaccacaagctgatccgcctggaggagggcgtgccccccggcaccgtgctgaccacgttttcagctgtggaccctgaccggttcatgcagcaggctgtgagatactcaaagctgtcagacccagcgagctggctgcacatcaatgccaccaacggccagatcaccacggcggcagtgctggaccgtgagtccctctacaccaaaaacaacgtctacgaggccaccttcctggcagctgacaatgggatacccccggccagcggcaccgggaccctccagatctatctcattgacatcaacgacaacgcccctgagctgctgcccaaggaggcgcagatctgcgagaggcccaacctgaacgccatcaacatcacggcggccgacgctgacgtcgaccccaacatcggcccctacgtcttcgagctgccctttgtcccggcggccgtgcggaagaactggaccatcacccgcctgaacggtgactatgcccaactcagcttgcgcatcctgtacctggaggccgggatgtatgacgtccccatcatcgtcacagactctggaaaccctcccctgtccaacacgtccatcatcaaagtcaaggtgtgcccatgtgatgacaacggggactgcaccaccattggcgcagtggcagcggctggtctgggcaccggtgccatcgtggccatcctcatctgcatcctcatcctgctgaccatggtcctgctgtttgtcatgtggatgaagcggcgagagaaggagcgccacacgaagcagctgctcattgaccccgaggacgacgtccgcgacaacatcctcaagtatgacgaggaaggcggtggcgaggaggaccaggactacgacctcagccagctgcagcagccggaagccatggggcacgtgccaagcaaagcccctggcgtgcgtcgcgtggatgagcggccggtgggtgctgagccccagtacccgatcaggcccatggtgccgcacccaggcgacatcggtgacttcatcaatgagggactccgcgctgctgacaacgaccccacggcacccccctatgactccctgctggtcttcgactacgaggggagcggctccaccgcaggctccgtcagctccctgaactcatccagttccggggaccaagactacgattacctcaacgactgggggcccagattcaagaagctggcggacatgtatggaggtggtgaagaggattgactgacctcgcatcttcggaccgaagtgagagccgtgctcggacgccggaggagcaggactgagcagaggcggccggtcttcccgactccctgcggctgtgtccttagtgctgttaggaggccccccaatccccacgttgagctgtctagcatgagcacccacccccacagcgccctgcacccggccgctgcccagcaccgcgctggctggcactgaaggacagcaagaggcactctgtcttcacttgaatttcctagaacagaagcactgttttt

SEQ ID NO: 112838 - DNA, 2008 bp, Homo sapiens
  Payload ID: 2079
  Gene Symbol: CDH4
  Gene Name: cadherin 4, type 1, R-cadherin (retinal)
  ENST ID: ENST00000628489
  CDS Start-End: 1-1701
aaagttcagcagtacacagtcatcgttcaggccacagatatggaaggaaatctcaactatggcctctcaaacacagccacagccatcatcacggtgacagatgtgaatgacaacccgccagaatttaccgccagcacgtttgcaggggaggtccccgaaaaccgcgtggagaccgtggtcgcaaacctcacggtgatggaccgagatcagccccactctccaaactggaatgccgtttaccgcatcatcagtggggatccatccgggcacttcagcgtccgcacagaccccgtaaccaacgagggcatggtcaccgtggtgaaggcagtcgactacgagctcaacagagctttcatgctgacagtgatggtgtccaaccaggcgcccctggccagcggaatccagatgtccttccagtccacggcaggggtgaccatctccatcatggacatcaacgaggctccctacttcccctcaaaccacaagctgatccgcctggaggagggcgtgccccccggcaccgtgctgaccacgttttcagctgtggaccctgaccggttcatgcagcaggctgtgagatactcaaagctgtcagacccagcgagctggctgcacatcaatgccaccaacggccagatcaccacggcggcagtgctggaccgtgagtccctctacaccaaaaacaacgtctacgaggccaccttcctggcagctgacaatgggatacccccggccagcggcaccgggaccctccagatctatctcattgacatcaacgacaacgcccctgagctgctgcccaaggaggcgcagatctgcgagaggcccaacctgaacgccatcaacatcacggcggccgacgctgacgtcgaccccaacatcggcccctacgtcttcgagctgccctttgtcccggcggccgtgcggaagaactggaccatcacccgcctgaacggtgactatgcccaactcagcttgcgcatcctgtacctggaggccgggatgtatgacgtccccatcatcgtcacagactctggaaaccctcccctgtccaacacgtccatcatcaaagtcaaggtgtgcccatgtgatgacaacggggactgcaccaccattggcgcagtggcagcggctggtctgggcaccggtgccatcgtggccatcctcatctgcatcctcatcctgctgaccatggtcctgctgtttgtcatgtggatgaagcggcgagagaaggagcgccacacgaagcagctgctcattgaccccgaggacgacgtccgcgacaacatcctcaagtatgacgaggaaggcggtggcgaggaggaccaggactacgacctcagccagctgcagcagccggaagccatggggcacgtgccaagcaaagcccctggcgtgcgtcgcgtggatgagcggccggtgggtgctgagccccagtacccgatcaggcccatggtgccgcacccaggcgacatcggtgacttcatcaatgagggactccgcgctgctgacaacgaccccacggcacccccctatgactccctgctggtcttcgactacgaggggagcggctccaccgcaggctccgtcagctccctgaactcatccagttccggggaccaagactacgattacctcaacgactgggggcccagattcaagaagctggcggacatgtatggaggtggtgaagaggattgactgacctcgcatcttcggaccgaagtgagagccgtgctcggacgccggaggagcaggactgagcagaggcggccggtcttcccgactccctgcggctgtgtccttagtgctgttaggaggccccccaatccccacgttgagctgtctagcatgagcacccacccccacagcgccctgcacccggccgctgcccagcaccgcgctggctggcactgaaggacagcaagaggcactctgtcttcacttgaatttcctagaacagaagcactgtttttaaaaaaaaaaaaaaaaaaaagaagaaagaaag

SEQ ID NO: 112839 - DNA, 4120 bp, Homo sapiens
  Payload ID: 2080
  Gene Symbol: CDH5
  Gene Name: cadherin 5, type 2 (vascular endothelium)
  Uniprot ID: P33151
  ENST ID: ENST00000341529
  CDS Start-End: 149-2503
ctcgccagcggggtgtggctcccctccaaagacggtcggctgacaggctccacagagctccactcacgctcagccctggacggacaggcagtccaacggaacagaaacatccctcagcccacaggcacgatctgttcctcctgggaagatgcagaggctcatgatgctcctcgccacatcgggcgcctgcctgggcctgctggcagtggcagcagtggcagcagcaggtgctaaccctgcccaacgggacacccacagcctgctgcccacccaccggcgccaaaagagagattggatttggaaccagatgcacattgatgaagagaaaaacacctcacttccccatcatgtaggcaagatcaagtcaagcgtgagtcgcaagaatgccaagtacctgctcaaaggagaatatgtgggcaaggtcttccgggtcgatgcagagacaggagacgtgttcgccattgagaggctggaccgggagaatatctcagagtaccacctcactgctgtcattgtggacaaggacactggcgaaaacctggagactccttccagcttcaccatcaaagttcatgacgtgaacgacaactggcctgtgttcacgcatcggttgttcaatgcgtccgtgcctgagtcgtcggctgtggggacctcagtcatctctgtgacagcagtggatgcagacgaccccactgtgggagaccacgcctctgtcatgtaccaaatcctgaaggggaaagagtattttgccatcgataattctggacgtattatcacaataacgaaaagcttggaccgagagaagcaggccaggtatgagatcgtggtggaagcgcgagatgcccagggcctccggggggactcgggcacggccaccgtgctggtcactctgcaagacatcaatgacaacttccccttcttcacccagaccaagtacacatttgtcgtgcctgaagacacccgtgtgggcacctctgtgggctctctgtttgttgaggacccagatgagccccagaaccggatgaccaagtacagcatcttgcggggcgactaccaggacgctttcaccattgagacaaaccccgcccacaacgagggcatcatcaagcccatgaagcctctggattatgaatacatccagcaatacagcttcatcgtcgaggccacagaccccaccatcgacctccgatacatgagccctcccgcgggaaacagagcccaggtcattatcaacatcacagatgtggacgagccccccattttccagcagcctttctaccacttccagctgaaggaaaaccagaagaagcctctgattggcacagtgctggccatggaccctgatgcggctaggcatagcattggatactccatccgcaggaccagtgacaagggccagttcttccgagtcacaaaaaagggggacatttacaatgagaaagaactggacagagaagtctacccctggtataacctgactgtggaggccaaagaactggattccactggaacccccacaggaaaagaatccattgtgcaagtccacattgaagttttggatgagaatgacaatgccccggagtttgccaagccctaccagcccaaagtgtgtgagaacgctgtccatggccagctggtcctgcagatctccgcaatagacaaggacataacaccacgaaacgtgaagttcaaattcatcttgaatactgagaacaactttaccctcacggataatcacgataacacggccaacatcacagtcaagtatgggcagtttgaccgggagcataccaaggtccacttcctacccgtggtcatctcagacaatgggatgccaagtcgcacgggcaccagcacgctgaccgtggccgtgtgcaagtgcaacgagcagggcgagttcaccttctgcgaggatatggccgcccaggtgggcgtgagcatccaggcagtggtagccatcttactctgcatcctcaccatcacagtgatcaccctgctcatcttcctgcggcggcggctccggaagcaggcccgcgcgcacggcaagagcgtgccggagatccacgagcagctggtcacctacgacgaggagggcggcggcgagatggacaccaccagctacgatgtgtcggtgctcaactcggtgcgccgcggcggggccaagcccccgcggcccgcgctggacgcccggccttccctctatgcgcaggtgcagaagccaccgaggcacgcgcctggggcacacggagggcccggggagatggcagccatgatcgaggtgaagaaggacgaggcggaccacgacggcgacggccccccctacgacacgctgcacatctacggctacgagggctccgagtccatagccgagtccctcagctccctgggcaccgactcatccgactctgacgtggattacgacttccttaacgactggggacccaggtttaagatgctggctgagctgtacggctcggacccccgggaggagctgctgtattaggcggccgaggtcactctgggcctggggacccaaaccccctgcagcccaggccagtcagacgccaggcaccacagcctccaaaaatggcagtgactccccagcccagcaccccttcctcgtgggtcccagagacctcatcagccttgggatagcaaactccaggttcctgaaatatccaggaatatatgtcagtgatgactattctcaaatgctggcaaatccaggctggtgttctgtctgggctcagacatccacataaccctgtcacccacagaccgccgtctaactcaaagacttcctctggctccccaaggctgcaaagcaaaacagactgtgtttaactgctgcagggtctttttctagggtccctgaacgccctggtaaggctggtgaggtcctggtgcctatctgcctggaggcaaaggcctggacagcttgacttgtggggcaggattctctgcagcccattcccaagggagactgaccatcatgccctctctcgggagccctagccctgctccaactccatactccactccaagtgccccaccactccccaacccctctccaggcctgtcaagagggaggaaggggccccatggcagctcctgaccttgggtcctgaagtgacctcactggcctgccatgccagtaactgtgctgtactgagcactgaaccacattcagggaaatggcttattaaactttgaagcaactgtgaattcattctggaggggcagtggagatcaggagtgacagatcacagggtgagggccacctccacacccaccccctctggagaaggcctggaagagctgagaccttgctttgagactcctcagcacccctccagttttgcctgagaaggggcagatgttcccggagcagaagacgtctccccttctctgcctcacctggtcgccaatccatgctctctttcttttctctgtctactccttatcccttggtttagaggaacccaagatgtggcctttagcaaaactggacaatgtccaaacccactcatgactgcatgacggagccgagccatgtgtctttacacctcgctgttgtcacatctcagggaactgaccctcaggcacaccttgcagaaggcaaggccctgccctgcccaacctctgtggtcacccatgcatcttccactggaacgtttcactgcaaacacaccttggagaagtggcatcagtcaacagagaggggcagggaaggagacaccaagctcacccttcgtcatggaccgaggttcccactctgggcaaagcccctcacactgcaagggattgtagataacactgacttgtttgttttaaccaataactagcttcttataatgatttttttactaatgatacttacaagtttctagctctcacagacatatagaataagggtttttgcataataagcaggttgttatttaggttaacaatattaattcaggttttttagttggaaaaacaattcctgtaaccttctattttctataattgtagtaattgctctacagataatgtctatatattggccaaactggtgcatgacaagtactgtatttttttatacctaaataaagaaaaatctttagcctgggcaaca

SEQ ID NO: 112840 - DNA, 615 bp, Homo sapiens
  Payload ID: 2080
  Gene Symbol: CDH5
  Gene Name: cadherin 5, type 2 (vascular endothelium)
  ENST ID: ENST00000562048
  CDS Start-End: 222-615
attttgcagcacatgactctatttatccatctgaccgctggctgcggtcagccctagggatcactaacccatcccaataggccccaggaaagagaaaaccacattcccgctcactgtattagagatggggttcccagcaggaaacagagcgaaccctgggaggccaattgaagagattttatgaagggactgcttcagagagatctgttcctcctgggaagatgcagaggctcatgatgctcctcgccacatcgggcgcctgcctgggcctgctggcagtggcagcagtggcagcagcaggtgctaaccctgcccaacgggacacccacagcctgctgcccacccaccggcgccaaaagagagattggatttggaaccagatgcacattgatgaagagaaaaacacctcacttccccatcatgtaggcaagatcaagtcaagcgtgagtcgcaagaatgccaagtacctgctcaaaggagaatatgtgggcaaggtcttccgggtcgatgcagagacaggagacgtgttcgccattgagaggctggaccgggagaatatctcagagtaccacctcactgctgtcattgtggacaaggacactggcgaaaacctgg

SEQ ID NO: 112841 - DNA, 591 bp, Homo sapiens
  Payload ID: 2080
  Gene Symbol: CDH5
  Gene Name: cadherin 5, type 2 (vascular endothelium)
  ENST ID: ENST00000568023
  CDS Start-End: 540-591
cctgcctcctttcttctccaagcctttcctcaccgccttcctcctgcctagagcatcccttcaagggcctcaagtctcttccaggttgaccccctcatttatggctgaggaaactgaggcccagaggggtcagggcctctcccaggcatatggcacttgcattctggggcctatccccaccctgggagtccacttcctccagggccagaggcaggaaccagaaggcaggggccgtcgatactaaaatcagtgggcccagaggtcagctggcccagcacagacaccctcagccctccctgaggtcagcctggcgccagcaaatcaggggaaatgttactagagtttacaaacctcttgtgatgtacagagtccagcctctccctctggccagacaggggacagtcaagggaggaggccatcccatccagcaccttgtagatccttgtctgtctccatatgtgagtcctggttccctctcccacccacctgttcttcctctacatcatcccaggagttgcagatctgttcctcctgggaagatgcagaggctcatgatgctcctcgccacatcgggcgcctgcctgggcctgc

SEQ ID NO: 112842 - DNA, 2138 bp, Homo sapiens
  Payload ID: 2080
  Gene Symbol: CDH5
  Gene Name: cadherin 5, type 2 (vascular endothelium)
  ENST ID: ENST00000565334
  CDS Start-End: 89-421
cactcacgctcagccctggacggacaggcagtccaacggaacagaaacatccctcagcccacaggcacgatctgttcctcctgggaagatgcagaggctcatgatgctcctcgccacatcgggcgcctgcctgggcctgctggcagtggcagcagtggcagcagcaggtgctaaccctgcccaacgggacacccacagcctgctgcccacccaccggcgccaaaagagagattggatttggaaccagatgcacattgatgaagagaaaaacacctcacttccccatcatgtaggcaagatcaagtcaagcgtgagtcgcaagaatgccaagtacctgctcaaaggagaatatgtgggcaaggtcttccgggtcgatgcagagacaggagacgtgacccagatgagccccagaaccggatgaccaagtacagcatcttgcggggcgactaccaggacgctttcaccattgagacaaaccccgcccacaacgagggcatcatcaagcccatgaagcctctggattatgaatacatccagcaatacagcttcatcgtcgaggccacagaccccaccatcgacctccgatacatgagccctcccgcgggaaacagagcccaggtcattatcaacatcacagatgtggacgagccccccattttccagcagcctttctaccacttccagctgaaggaaaaccagaagaagcctctgattggcacagtgctggccatggaccctgatgcggctaggcatagcattggatactccatccgcaggaccagtgacaagggccagttcttccgagtcacaaaaaagggggacatttacaatgagaaagaactggacagagaagtctacccctggtataacctgactgtggaggccaaagaactggattccactggaacccccacaggaaaagaatccattgtgcaagtccacattgaagttttggatgagaatgacaatgccccggagtttgccaagccctaccagcccaaagtgtgtgagaacgctgtccatggccagctggtcctgcagatctccgcaatagacaaggacataacaccacgaaacgtgaagttcaaattcatcttgaatactgagaacaactttaccctcacggataatcacgataacacggccaacatcacagtcaagtatgggcagtttgaccgggagcataccaaggtccacttcctacccgtggtcatctcagacaatgggatgccaagtcgcacgggcaccagcacgctgaccgtggccgtgtgcaagtgcaacgagcagggcgagttcaccttctgcgaggatatggccgcccaggtgggcgtgagcatccaggcagtggtagccatcttactctgcatcctcaccatcacagtgatcaccctgctcatcttcctgcggcggcggctccggaagcaggcccgcgcgcacggcaagagcgtgccggagatccacgagcagctggtcacctacgacgaggagggcggcggcgagatggacaccaccagctacgatgtgtcggtgctcaactcggtgcgccgcggcggggccaagcccccgcggcccgcgctggacgcccggccttccctctatgcgcaggtgcagaagccaccgaggcacgcgcctggggcacacggagggcccggggagatggcagccatgatcgaggtgaagaaggacgaggcggaccacgacggcgacggccccccctacgacacgctgcacatctacggctacgagggctccgagtccatagccgagtccctcagctccctgggcaccgactcatccgactctgacgtggattacgacttccttaacgactggggacccaggtttaagatgctggctgagctgtacggctcggacccccgggaggagctgctgtattaggcggccgaggtcactctgggcctggggacccaaaccccctgcagcccaggccagtcagacgccaggcaccacagcctccaaaaatggcagtgactccccagcccagcaccccttcctcgtgggtcccagagacctcatcagccttgggatagcaaactccaggttcctgaaatatccaggaatatatgtcagtgatgactattctcaaatgctggcaaatccaggctggtgttctgtct

SEQ ID NO: 112843 - DNA, 459 bp, Homo sapiens
  Payload ID: 2080
  Gene Symbol: CDH5
  Gene Name: cadherin 5, type 2 (vascular endothelium)
  ENST ID: ENST00000568155
  CDS Start-End: 231-459
agccctagggatcactaacccatcccaataggccccaggaaagagaaaaccacattcccgctcactgtattagagatggggttcccagcaggaaacagagcgaaccctgggaggccaattgaagagattttatgaagggactgcttcagagaggtgggctcctttaaggaaaccaaccactgcctgcacagaggtgggctcggatgttgagatctgttcctcctgggaagatgcagaggctcatgatgctcctcgccacatcgggcgcctgcctgggcctgctggcagtggcagcagtggcagcagcaggtgctaaccctgcccaacgggacacccacagcctgctgcccacccaccggcgccaaaagagagattggatttggaaccagatgcacattgatgaagagaaaaacacctcacttccccatcatgtaggcaagatcaagtcaagcgtgagtc

SEQ ID NO: 112844 - DNA, 1932 bp, Homo sapiens
  Payload ID: 2080
  Gene Symbol: CDH5
  Gene Name: cadherin 5, type 2 (vascular endothelium)
  ENST ID: ENST00000563425
  CDS Start-End: 114-1334
attatatctagctgctcttatgtgaaatacctgtgtctaagtactcctttcatcgtcactggccagagtctgaatgtgtctcctctttccccagatctgttcctcctgggaagatgcagaggctcatgatgctcctcgccacatcgggcgcctgcctgggcctgctggcagtggcagcagtggcagcagcaggtgctaaccctgcccaacgggacacccacagcctgctgcccacccaccggcgccaaaagagagattggatttggaaccagatgcacattgatgaagagaaaaacacctcacttccccatcatgtaggcaagatcaagtcaagcgtgagtcgcaagaatgccaagtacctgctcaaaggagaatatgtgggcaaggtcttccgggtcgatgcagagacaggagacgtgttcgccattgagaggctggaccgggagaatatctcagagtaccacctcactgctgtcattgtggacaaggacactggcgaaaacctggagactccttccagcttcaccatcaaagttcatgacgtgaacgacaactggcctgtgttcacgcatcggttgttcaatgcgtccgtgcctgagtcgtcggctgtggggacctcagtcatctctgtgacagcagtggatgcagacgaccccactgtgggagaccacgcctctgtcatgtaccaaatcctgaaggggaaagagtattttgccatcgataattctggacgtattatcacaataacgaaaagcttggaccgagagaagcaggccaggtatgagatcgtggtggaagcgcgagatgcccagggcctccggggggactcgggcacggccaccgtgctggtcactctgcaagacatcaatgacaacttccccttcttcacccagaccaagtacacatttgtcgtgcctgaagacacccgtgtgggcacctctgtgggctctctgtttgttgaggacccagatgagccccagaaccggatgaccaagtacagcatcttgcggggcgactaccaggacgctttcaccattgagacaaaccccgcccacaacgagggcatcatcaagcccatgaagcctctggattatgaatacatccagcaatacagcttcatcgtcgaggccacagaccccaccatcgacctccgatacatgagccctcccgcgggaaacagagcccaggtcattatcaacatcacagatgtggacgagccccccattttccagcagcctttctaccacttccagctgaaggaaaaccagaagaagcctctgattggcacagtgctggccatggaccctgatgcggctaggcatagcattgggtaagggggcgtgtgtcgatgagaatgataaggacaatccggcctggatgttcctatgcctgctggtctgaggccaggactcagagaggggaactggcttctcctagcacttacagggaaagtgacagaggcaagaccagaagcccaagctcttgcacttggcagcctggcatcttgacctgcctggactcccccacctagcatggtcctgggcatccagagctacttgtcctctgtccggccttgaaggcttattctctgcaccacagctctcaccagtcctatgtggtaagatctgacagtcaagaaagcaaccaatcagacgacacaccagaggccccttcactaaaactgtattcttgaatctatcttccccaaaccacaaaagtaagaagtgttcattttatacagtgaaacaacacagagatctaccaagaaaacactgataacccccactctcagataactcatgttcgtggcctaacctggtcctattgctcctttcttttcgtgaccacacaaacatgtggatgcatttatggtgggtttgttgttgtctgtttgcttttgatgtttgattgttttaaaatttttttggatca

SEQ ID NO: 112845 - DNA, 1672 bp, Homo sapiens
  Payload ID: 2080
  Gene Symbol: CDH5
  Gene Name: cadherin 5, type 2 (vascular endothelium)
  ENST ID: ENST00000539168
  CDS Start-End: 835-1506
ataatgtgtagactcaagcctttcttcagatcaggaaacttttcttttctttttttttttttttttttttgttatttcttctgttctgtttgttctgggattttcctcattaatagcaactattattcctatatacacaaaacatatatatttatctttccatagatttttcctgatttctgaaagaactttttaagttttttatttcacaaagttaatttctttgtaattacttcttatctcttccagctctttttgtattccttcctggctcttgcccaatgatcttttcattaatcactaaaacaagtcccagctatggtgtgatgtcacctgttcagctctgaaagtgcatctgatggtctcagatactccatccgcaggaccagtgacaagggccagttcttccgagtcacaaaaaagggggacatttacaatgagaaagaactggacagagaagtctacccctggtataacctgactgtggaggccaaagaactggattccactggaacccccacaggaaaagaatccattgtgcaagtccacattgaagttttggatgagaatgacaatgccccggagtttgccaagccctaccagcccaaagtgtgtgagaacgctgtccatggccagctggtcctgcagatctccgcaatagacaaggacataacaccacgaaacgtgaagttcaaattcatcttgaatactgagaacaactttaccctcacggataatcacgataacacggccaacatcacagtcaagtatgggcagtttgaccgggagcataccaaggtccacttcctacccgtggtcatctcagacaatgggatgccaagtcgcacgggcaccagcacgctgaccgtggccgtgtgcaagtgcaacgagcagggcgagttcaccttctgcgaggatatggccgcccaggtgggcgtgagcatccaggcagtggtagccatcttactctgcatcctcaccatcacagtgatcaccctgctcatcttcctgcggcggcggctccggaagcaggcccgcgcgcacggcaagagcgtgccggagatccacgagcagctggtcacctacgacgaggagggcggcggcgagatggacaccaccagctacgatgtgtcggtgctcaactcggtgcgccgcggcggggccaagcccccgcggcccgcgctggacgcccggccttccctctatgcgcaggtgcagaagccaccgaggcacgcgcctggggcacacggagggcccggggagatggcagccatgatcgaggtgaagaaggacgaggcggaccacgacggcgacggccccccctacgacacgctgcacatctacggctacgagggctccgagtccatagccgagtccctcagctccctgggcaccgactcatccgactctgacgtggattacgacttccttaacgactggggacccaggtttaagatgctggctgagctgtacggctcggacccccgggaggagctgctgtattaggcggccgaggtcactctgggcctggggacccaaaccccctgcagcccaggccagtcagacgccaggcaccacagcctccaaaaatggcagtgactccccagcccagcaccccttcctcgtgggtcccagagacctcatcagccttgggatagcaaactccaggttc

SEQ ID NO: 112846 - DNA, 3779 bp, Homo sapiens
  Payload ID: 2080
  Gene Symbol: CDH5
  Gene Name: cadherin 5, type 2 (vascular endothelium)
  Uniprot ID: P33151
  ENST ID: ENST00000614547
  CDS Start-End: 157-2166
aggcctccctcgccagcggggtgtggctcccctccaaagacggtcggctgacaggctccacagagctccactcacgctcagccctggacggacaggcagtccaacggaacagaaacatccctcagcccacaggcacgatctgttcctcctgggaagatgcagaggctcatgatgctcctcgccacatcgggcgcctgcctgggcctgctggcagtggcagcagtggcagcagcaggtgctaaccctgcccaacgggacacccacagcctgctgcccacccaccggcgccaaaagagagattggatttggaaccagatgcacattgatgaagagaaaaacacctcacttccccatcatgtaggcaagatcaagtcaagcgtgagtcgcaagaatgccaagtacctgctcaaaggagaatatgtgggcaaggtcttccgggtcgatgcagagacaggagacgtgttcgccattgagaggctggaccgggagaatatctcagagtaccacctcactgctgtcattgtggacaaggacactggcgaaaacctggagactccttccagcttcaccatcaaagttcatgacgtgaacgacaactggcctgtgttcacgcatcggttgttcaatgcgtccgtgcctgagtcgtcggctgtggggacctcagtcatctctgtgacagcagtggatgcagacgaccccactgtgggagaccacgcctctgtcatgtaccaaatcctgaaggggaaagagtattttgccatcgataattctggacgtattatcacaataacgaaaagcttggaccgagagaagcaggccaggtatgagatcgtggtggaagcgcgagatgcccagggcctccggggggactcgggcacggccaccgtgctggtcactctgcaagacatcaatgacaacttccccttcttcacccagaccaagtacacatttgtcgtgcctgaagacacccgtgtgggcacctctgtgggctctctgtttgttgaggacccagatgagccccagaaccggatgaccaagtacagcatcttgcggggcgactaccaggacgctttcaccattgagacaaaccccgcccacaacgagggcatcatcaagcccatgaagcctctggattatgaatacatccagcaatacagcttcatcgtcgaggccacagaccccaccatcgacctccgatacatgagccctcccgcgggaaacagagcccaggtcattatcaacatcacagatgtggacgagccccccattttccagcagcctttctaccacttccagctggtcctgcagatctccgcaatagacaaggacataacaccacgaaacgtgaagttcaaattcatcttgaatactgagaacaactttaccctcacggataatcacgataacacggccaacatcacagtcaagtatgggcagtttgaccgggagcataccaaggtccacttcctacccgtggtcatctcagacaatgggatgccaagtcgcacgggcaccagcacgctgaccgtggccgtgtgcaagtgcaacgagcagggcgagttcaccttctgcgaggatatggccgcccaggtgggcgtgagcatccaggcagtggtagccatcttactctgcatcctcaccatcacagtgatcaccctgctcatcttcctgcggcggcggctccggaagcaggcccgcgcgcacggcaagagcgtgccggagatccacgagcagctggtcacctacgacgaggagggcggcggcgagatggacaccaccagctacgatgtgtcggtgctcaactcggtgcgccgcggcggggccaagcccccgcggcccgcgctggacgcccggccttccctctatgcgcaggtgcagaagccaccgaggcacgcgcctggggcacacggagggcccggggagatggcagccatgatcgaggtgaagaaggacgaggcggaccacgacggcgacggccccccctacgacacgctgcacatctacggctacgagggctccgagtccatagccgagtccctcagctccctgggcaccgactcatccgactctgacgtggattacgacttccttaacgactggggacccaggtttaagatgctggctgagctgtacggctcggacccccgggaggagctgctgtattaggcggccgaggtcactctgggcctggggacccaaaccccctgcagcccaggccagtcagacgccaggcaccacagcctccaaaaatggcagtgactccccagcccagcaccccttcctcgtgggtcccagagacctcatcagccttgggatagcaaactccaggttcctgaaatatccaggaatatatgtcagtgatgactattctcaaatgctggcaaatccaggctggtgttctgtctgggctcagacatccacataaccctgtcacccacagaccgccgtctaactcaaagacttcctctggctccccaaggctgcaaagcaaaacagactgtgtttaactgctgcagggtctttttctagggtccctgaacgccctggtaaggctggtgaggtcctggtgcctatctgcctggaggcaaaggcctggacagcttgacttgtggggcaggattctctgcagcccattcccaagggagactgaccatcatgccctctctcgggagccctagccctgctccaactccatactccactccaagtgccccaccactccccaacccctctccaggcctgtcaagagggaggaaggggccccatggcagctcctgaccttgggtcctgaagtgacctcactggcctgccatgccagtaactgtgctgtactgagcactgaaccacattcagggaaatggcttattaaactttgaagcaactgtgaattcattctggaggggcagtggagatcaggagtgacagatcacagggtgagggccacctccacacccaccccctctggagaaggcctggaagagctgagaccttgctttgagactcctcagcacccctccagttttgcctgagaaggggcagatgttcccggagcagaagacgtctccccttctctgcctcacctggtcgccaatccatgctctctttcttttctctgtctactccttatcccttggtttagaggaacccaagatgtggcctttagcaaaactggacaatgtccaaacccactcatgactgcatgacggagccgagccatgtgtctttacacctcgctgttgtcacatctcagggaactgaccctcaggcacaccttgcagaaggcaaggccctgccctgcccaacctctgtggtcacccatgcatcttccactggaacgtttcactgcaaacacaccttggagaagtggcatcagtcaacagagaggggcagggaaggagacaccaagctcacccttcgtcatggaccgaggttcccactctgggcaaagcccctcacactgcaagggattgtagataacactgacttgtttgttttaaccaataactagcttcttataatgatttttttactaatgatacttacaagtttctagctctcacagacatatagaataagggtttttgcataataagcaggttgttatttaggttaacaatattaattcaggttttttagttggaaaaacaattcctgtaaccttctattttctataattgtagtaattgctctacagataatgtctatatattggccaaactggtgcatgacaagtactgtatttttttatacctaaataaagaaaaatctttagcctgggc

SEQ ID NO: 112847 - DNA, 8476 bp, Homo sapiens
  Payload ID: 2081
  Gene Symbol: CDH6
  Gene Name: cadherin 6, type 2, K-cadherin (fetal kidney)
  Uniprot ID: P55285
  ENST ID: ENST00000265071
  CDS Start-End: 266-2638
ttcgcatcccaagagctgcagtttcagccgcgacagcaagaacggcagagccggcgaccgcggcggcggcggcggcggaggcaggagcagcctgggcgggtcgcagggtctccgcgggcgcaggaaggcgagcagagatatcctctgagagccaagcaaagaacattaaggaaggaaggaggaatgaggctggatacggtgcagtgaaaaaggcacttccaagagtggggcactcactacgcacagactcgacggtgccatcagcatgagaacttaccgctacttcttgctgctcttttgggtgggccagccctacccaactctctcaactccactatcaaagaggactagtggtttcccagcaaagaaaagggccctggagctctctggaaacagcaaaaatgagctgaaccgttcaaaaaggagctggatgtggaatcagttctttctcctggaggaatacacaggatccgattatcagtatgtgggcaagttacattcagaccaggatagaggagatggatcacttaaatatatcctttcaggagatggagcaggagatctcttcattattaatgaaaacacaggcgacatacaggccaccaagaggctggacagggaagaaaaacccgtttacatccttcgagctcaagctataaacagaaggacagggagacccgtggagcccgagtctgaattcatcatcaagatccatgacatcaatgacaatgaaccaatattcaccaaggaggtttacacagccactgtccctgaaatgtctgatgtcggtacatttgttgtccaagtcactgcgacggatgcagatgatccaacatatgggaacagtgctaaagttgtctacagtattctacagggacagccctatttttcagttgaatcagaaacaggtattatcaagacagctttgctcaacatggatcgagaaaacagggagcagtaccaagtggtgattcaagccaaggatatgggcggccagatgggaggattatctgggaccaccaccgtgaacatcacactgactgatgtcaacgacaaccctccccgattcccccagagtacataccagtttaaaactcctgaatcttctccaccggggacaccaattggcagaatcaaagccagcgacgctgatgtgggagaaaatgctgaaattgagtacagcatcacagacggtgaggggctggatatgtttgatgtcatcaccgaccaggaaacccaggaagggattataactgtcaaaaagctcttggactttgaaaagaagaaagtgtatacccttaaagtggaagcctccaatccttatgttgagccacgatttctctacttggggcctttcaaagattcagccacggttagaattgtggtggaggatgtagatgagccacctgtcttcagcaaactggcctacatcttacaaataagagaagatgctcagataaacaccacaataggctccgtcacagcccaagatccagatgctgccaggaatcctgtcaagtactctgtagatcgacacacagatatggacagaatattcaacattgattctggaaatggttcgatttttacatcgaaacttcttgaccgagaaacactgctatggcacaacattacagtgatagcaacagagatcaataatccaaagcaaagtagtcgagtacctctatatattaaagttctagatgtcaatgacaacgccccagaatttgctgagttctatgaaacttttgtctgtgaaaaagcaaaggcagatcagttgattcagaccctgcatgctgttgacaaggatgacccttatagtggacaccaattttcgttttccttggcccctgaagcagccagtggctcaaactttaccattcaagacaacaaagacaacacggcgggaatcttaactcggaaaaatggctataatagacacgagatgagcacctatctcttgcctgtggtcatttcagacaacgactacccagttcaaagcagcactgggacagtgactgtccgggtctgtgcatgtgaccaccacgggaacatgcaatcctgccatgcggaggcgctcatccaccccacgggactgagcacgggggctctggttgccatccttctgtgcatcgtgatcctactagtgacagtggtgctgtttgcagctctgaggcggcagcgaaaaaaagagcctttgatcatttccaaagaggacatcagagataacattgtcagttacaacgacgaaggtggtggagaggaggacacccaggcttttgatatcggcaccctgaggaatcctgaagccatagaggacaacaaattacgaagggacattgtgcccgaagcccttttcctaccccgacggactccaacagctcgcgacaacaccgatgtcagagatttcattaaccaaaggttaaaggaaaatgacacggaccccactgccccgccatacgactccttggccacttacgcctatgaaggcactggctccgtggcggattccctgagctcgctggagtcagtgaccacggatgcagatcaagactatgattaccttagtgactggggacctcgattcaaaaagcttgcagatatgtatggaggagtggacagtgacaaagactcctaatctgttgcctttttcattttccaatacgacactgaaatatgtgaagtggctatttctttatatttatccactactccgtgaaggcttctctgttctacccgttccaaaagccaatggctgcagtccgtgtggatccaatgttagagacttttttctagtacacttttatgagcttccaaggggcaaatttttattttttagtgcatccagttaaccaagtcagcccaacaggcaggtgccggaggggaggacagggaacagtatttccacttgttctcagggcagcgtgcccgcttccgctgtcctggtgttttactacactccatgtcaggtcagccaactgccctaactgtacatttcacaggctaatgggataaaggactgtgctttaaagataaaaatatcatcatagtaaaagaaatgagggcatatcggctcacaaagagataaactacataggggtgtttatttgtgtcacaaagaatttaaaataacacttgcccatgctatttgttcttcaagaactttctctgccatcaactactattcaaaacctcaaatccacccatatgttaaaattctcattactcttaaggaatagaagcaaattaaacggtaacatccaaaagcaaccacaaacctagtacgacttcattccttccactaactcatagtttgttatatcctagactagacatgcgaaagtttgcctttgtaccatataaagggggagggaaatagctaataatgttaaccaaggaaatatattttaccatacatttaaagttttggccaccacatgtatcacgggtcacttgaaattctttcagctatcagtaggctaatgtcaaaattgtttaaaaattcttgaaagaattttcctgagacaaattttaacttcttgtctatagttgtcagtattattctactatactgtacatgaaagtagcagtgtgaagtacaataattcatattcttcatatccttcttacacgactaagttgaattagtaaagttagattaaataaaacttaaatctcactctaggagttcagtggagaggttagagccagccacacttgaacctaataccctgcccttgacatctggaaacctctacatatttatataacgtgatacatttggataaacaacattgagattatgatgaaaacctacatattccatgtttggaagacccttggaagaggaaaattggattcccttaaacaaaagtgtttaagattgtaattaaaatgatagttgattttcaaaagcattaattttttttcattgtttttaactttgctttcatgaccatcctgccatccttgactttgaactaatgataaagtaatgatctcaaactatgacagaaaagtaatgtaaaatccatccaatctattatttctctaattatgcaattagcctcatagttattatccagaggacccaactgaactgaactaatccttctggcagattcaaatcgtttatttcacacgctgttctaatggcacttatcattagaatcttaccttgtgcagtcatcagaaattccagcgtactataatgaaaacatccttgttttgaaaacctaaaagacaggctctgtatatatatatacttaagaatatgctgacttcacttattagtcttagggatttattttcaattaatattaattttctacaaataattttagtgtcatttccatttggggatattgtcatatcagcacatattttctgtttggaaacacactgttgtttagttaagttttaaataggtgtattacccaagaagtaaagatggaaacgttaaaagaagagaaatgtagtattttgggttacctgattagagtgaaaattttttacaatcatattattccttgtgtcttctgaatggtttccgattttataatggactgccctatatagtaacaagtatttcatgcttgagctatttcctgctttcagggtttcttttttctagttcttcatacacacacatacacacacacacacacacacacacacacacacacgaatgcaaacaaaaggctatatgaggtcttcactctaatgaattgatatgtatcatagtcacaggtaagtgttgaaaaaagcttagtaaagttagaagctacttactcatagcaatagaacagcaccttaatcacacgatttactgtaaaattaaagaggtctctatctgtatgtttcatgtcacgtaacaaattgaatcaaggaagatagtcctgtaaaaagaaaggtatcatctgaagttgaggattgacactagcagtttccaatgtttaaaggtaagatctgagttctcctaataagtaaaagtaagtagttctatagcagaatatctgagatgtaattggcaaggtattttatccctccctgcagatgacacagcataccaagaacaggttaatatgattacttatggaaataactttaatctcttatcataaaagctgatgatgaagtaaatttataggaaattggataatttgagactggggctaaatatttagtaccagggtactgtaagtatcaagttggagtgacgttttcctataattcagactctttgacatcgtggaaccaataagagtcatagttccatcattctccagcttcgtctcacttccttcccaccccacctgagtatcaggtcaaacatcattgcatgcgcaggttttttttttaattgctaggtcccaggcaacatgaaagattattggagaaaaaaataattttcagcccagttttttcattgtctgtttcctaattttagatgttggtgatgggaaagatggaaggagagtgggaagaagtaaaattttaatatttgtttcaatcactttgaaactaaaattcattaagcataaccagattgcttttgtgggttgtttcaaggacattgagagctttctgatgatatgtttttgccctctattcaaaagcaagagttcctttaaactactaagatattccctagaataagctgaatttaaaaaaacattaagccattgtttaaagccccttcacttcctggccacttacttctgaaaggcctaaaaaacatttgtgcccaaataagtaaataaaccaaatgggaaagaagcaaagattattccatagaaccacaagagagggaatgtgggcacagtaaatagatgtttctttcagaactttcctgcctttacagtttgtgtccataaagggatgttcagcaatgaaattactcccttttcagatggaacaaaacctgcccatttaattttaacgcagtataaaaaacgtgtggtttagtttttattttcagctcccaaagagttgtgcagaaaatcttaaaattttttttttttttttttttttttttttgagacagaatctcgctctgtcgcccaggctggaatgcagtggcgcgatctctgctcactacaagctccgcctcccgggttcacgccattctcctgcctcagcgcccccagtagctgggactacaggcacacaccaccacgcccggctaatttttgttgtattttttagtggagacagggtttcaccatgttagccaggatgatctccatctcctgacctcgtggtccgcccgcctcggcctcccaaagtgctgggattacaggcgtgagccaccgcgcccggccttaaaaattgaatctgtagcttaggccatccaaattttataaatccaaattaactttagaatgtttctattactttcacttttacatatataaattttaagtgtcctgattggctgaacaatatctcacatcaaatgctttgcctggaaatagatatcccactggggatagtggtgtgtaaactatgacttggacaattctatatactcaagcaccataaaaagtatgcagttgaaaagaaaatcaaagttgattcctgggtgccaactaaatattcaaatcaggtactcatccttatcagctaaattcattttcaccaggaacagaccaccaaataaattattttatcctaataactagttttgaagcagtgtaattactctggaagaaggctctaaaaagtcatgattcccccactattttgaaatgtatcctctaacaaggatcattatagtgtaatcttaatttttatgttttatcaagatgaaatcttgtttgaattgtgatattataaaaggggactcaaaaatccaagcagtctactgtgtttaaattaacaccacaaccttccttatcagattataagagtagaaaaattaacacttggtgtgtgaatcttcaggaaaatgagctatttcataagctcaaacaagcagcttccttttccagagaatatagaattatattatggtctccttaaatgtttagtagctcttatggtcacagcatttttaatctccctatggcatctttatggaataattttctaaagggtaattctctactaaaaatatcagaccccgaccatatttaatgtggagagcaataccctcttagaaagaaaatacattgactcatacacttgttaaaagttaataaagaaatagctcatttttaaagccggaagtttatggtctctgcatcgtcaatttaatttaagcattgctgagacaatctttaatctactcccctttttgtaataccttatttatggtgcattttcatttttatttgggggaaacgttagcccaacagagccggcagatgaaagtgttgaaaagaggtcaaatggaaacaaaggctcttacccgctgtatttcagacaggactgaggcacttagccgaggagccactgggttattagattaatttcaaaagagcttttacaagttgcttaattcctttttttttttttttttttttcaaaaacccatgaaccacaaactcaaatttctcctcaaatggggttaatctgacaaacgaggcatggacccagccttgtggaaaaagcattccacgctaatgagatcttggtctttcttgtgaggctacgttatttatgtaaatatgtctggaggcaccttctctaagcttttagttttctatgatctattagtttagtgtttattaaagaatcaaatgtatagaattaccaggcattcgtggggaatgctgtgtagcaaatgtaaaactgacctgctcggaagaaacgtaggaacgcttcaaacccactgtaatgtttggtttgagattattttcattgctttgagagtgaactgcctaagagtaggccttataataaatgctatgtgcgtcttcagtagttccaagctaaagcaatttggcattctcccactgtgatttgtgacttttaaacccacaaaataaaagctttttggtattgattgtttttaattaaaaatacttccaagtataaattgaaacggatgccacccttgaagatttactggcgggaatgctcactcttgtcgttttcctcagtatcgttcatgtctttggcaacaagaacacctgatgaaagcaagcaatgctcagttcccatcaacatttctagttagggggattctcataaccccacagtttacctgagaaagttttctgtgttagaagaatggggtcgagagtattaccttttagctcagtgtggccgggccttttgttgcagtcaaatggcaaatacgcactccttgaaatggcttcttttatttggttttgttttcttagacttataaatttgaaaagaatgcaatttaaaaagtgatttctcacaaagagtaaatatgccttttgcaaatcaatttttgtaacaagttatttatatgatattacttaataaactggtttttttctaa

SEQ ID NO: 112848 - DNA, 2569 bp, Homo sapiens
  Payload ID: 2081
  Gene Symbol: CDH6
  Gene Name: cadherin 6, type 2, K-cadherin (fetal kidney)
  ENST ID: ENST00000514738
  CDS Start-End: 431-2257
ttcgcatcccaagagctgcagtttcagccgcgacagcaagaacggcagagccggcgaccgcggcggcggcggcggcggaggcaggagcagcctgggcgggtcgcagggtctccgcgggcgcaggaaggcgagcagagatatcctctgagagccaagcaaagaacattaaggaaggaaggaggaatgaggctggatacggtgcagtgaaaaaggcacttccaagagtggggcactcactacgcacagactcgacggtgccatcagcatgagaacttaccgctacttcttgctgctcttttgggtgggccagccctacccaactctctcaactccactatcaaagaggactagtggtttcccagcaaagaaaagggccctggagctctctggaaacagcaaaaatgagctgaaccgttcaaaaaggagctggatgtggaatcagttctttctcctggaggaatacacaggatccgattatcagtatgtgggcaagttacattcagaccaggatagaggagatggatcacttaaatatatcctttcaggagatggagcaggagatctcttcattattaatgaaaacacaggcgacatacaggccaccaagaggctggacagggaagaaaaacccgtttacatccttcgagctcaagctataaacagaaggacagggagacccgtggagcccgagtctgaattcatcatcaagatccatgacatcaatgacaatgaaccaatattcaccaaggaggtttacacagccactgtccctgaaatgtctgatgtcggtacatttgttgtccaagtcactgcgacggatgcagatgatccaacatatgggaacagtgctaaagttgtctacagtattctacagggacagccctatttttcagttgaatcagaaacaggtattatcaagacagctttgctcaacatggatcgagaaaacagggagcagtaccaagtggtgattcaagccaaggatatgggcggccagatgggaggattatctgggaccaccaccgtgaacatcacactgactgatgtcaacgacaaccctccccgattcccccagagtacataccagtttaaaactcctgaatcttctccaccggggacaccaattggcagaatcaaagccagcgacgctgatgtgggagaaaatgctgaaattgagtacagcatcacagacggtgaggggctggatatgtttgatgtcatcaccgaccaggaaacccaggaagggattataactgtcaaaaagctcttggactttgaaaagaagaaagtgtatacccttaaagtggaagcctccaatccttatgttgagccacgatttctctacttggggcctttcaaagattcagccacggttagaattgtggtggaggatgtagatgagccacctgtcttcagcaaactggcctacatcttacaaataagagaagatgctcagataaacaccacaataggctccgtcacagcccaagatccagatgctgccaggaatcctgtcaagtactctgtagatcgacacacagatatggacagaatattcaacattgattctggaaatggttcgatttttacatcgaaacttcttgaccgagaaacactgctatggcacaacattacagtgatagcaacagagatcaataatccaaagcaaagtagtcgagtacctctatatattaaagttctagatgtcaatgacaacgccccagaatttgctgagttctatgaaacttttgtctgtgaaaaagcaaaggcagatcagttgattcagaccctgcatgctgttgacaaggatgacccttatagtggacaccaattttcgttttccttggcccctgaagcagccagtggctcaaactttaccattcaagacaacaaagacaacacggcgggaatcttaactcggaaaaatggctataatagacacgagatgagcacctatctcttgcctgtggtcatttcagacaacgactacccagttcaaagcagcactgggacagtgactgtccgggtctgtgcatgtgaccaccacgggaacatgcaatcctgccatgcggaggcgctcatccaccccacgggactgagcacgggggctctggttgccatccttctgtgcatcgtgatcctactaggtaaactggttctccctgcctcctatctccccatggtgaggggctcacactgttactgtgacactctagatttatctgcctcccccattaaggcatacagcctgatctaggtgagtcgagttacatactgagaatctgtgctgtacgatgtgaactcatttttgcttgcaaatggctttggaaaatgaacagatgtgaaacttgctcgtgtctttgcttgcccaggaagcaaagaatctcttgtctatcagactgggaatgaatctcgggggatttcagggcaacataaatgtgcccttttcatttcattcgttgtgtaatttttttacttggaaaacgttgttaagtgtctggcatggagtgtatgatgagggccctttctataaaggtaaagtttaaagatctatgggaaagtgggaaga

SEQ ID NO: 112849 - DNA, 2728 bp, Homo sapiens
  Payload ID: 2082
  Gene Symbol: CDH7
  Gene Name: cadherin 7, type 2
  Uniprot ID: Q9ULB5
  ENST ID: ENST00000323011
  CDS Start-End: 326-2683
ctagggcagtccgaggagattgaaagggcaaaactatcaagcaagaaaactgtaagttctgattagttttatgactttgccttcatgcctcaggagctcaactgatcacggctttcacgacaggctaaggtacttactacaccattctttggcgaaggctattcagcagtggtgacctcttccaatccaacactctacagattattatctctggactcccagctgacaccctgccggaggcaagagctactaagccaactggaactgtgccttttctcttgtcaaggtttttttcttacacaggaaaaagaaagaaaaaaaaaagatgaagttgggcaaagtggagttctgccattttctgcagctaatagctcttttcctgtgtttttctgggatgagtcaagcagaactctcaaggtccagatcaaagccctatttccaatcagggaggtcccggaccaagcgcagctgggtgtggaatcagttctttgtgctggaggaatacatgggttcagaccccctctatgtaggaaagcttcactctgatgttgataaaggagatggttccatcaaatacatcttgtcaggcgaaggggcaagttccattttcattattgatgagaacactggggatattcatgccaccaagagactggatcgtgaggagcaggcctactacacgctccgagctcaagcgctggataggctcaccaacaaacccgtggagcccgagtcggagtttgtcatcaaaattcaggatatcaacgacaatgaacccaaatttttggatggcccatacacggcaggagttcccgaaatgtctcccgtggggacctcagtggtacaagtgacagcgacggatgctgatgatcctacatatggcaacagtgccagagtggtctacagtattctgcaaggacagccgtacttctcagtggagccaaagacaggagtcatcaagactgcccttccaaacatggatagagaggctaaagaccagtatttgcttgtcattcaggcaaaggatatggttggtcaaaatggaggactgtcaggaactacatcagtcactgtgaccctaactgatgtcaacgataatccacctcgctttcctcgaaggtcttatcaatataacgtcccagagtcattacctgtagcctcagttgtggccagaattaaagctgctgatgcagatattggagctaatgctgaaatggagtacaagattgtggatggtgatggtttgggcatttttaagatttctgttgacaaagaaacccaggaaggaatcattactatacagaaggagctggattttgaagccaaaacaagttacacgctacggatagaagctgcaaataaagatgccgaccctcgctttctgagcttgggtccgttcagtgacacgacaactgtgaagataattgtggaagatgtagatgagccccctgtgttctcttcacccttgtaccctatggaggtgtcggaagctacccaggttgggaatatcattggcactgtagcagctcatgacccagattcttccaatagccctgtgaggtactcaattgacagaaacacagacttggagagatacttcaatattgatgccaacagtggggtcatcacaactgccaagtctttggatcgagagacaaatgctattcacaatatcacagtccttgcaatggagagccagaatccatctcaagtaggaagaggctatgtggccatcactatacttgacatcaatgataacgcccctgaatttgccatggactatgagaccaccgtctgtgaaaatgcccagccggggcaggttatccagaaaatcagtgctgtggataaagatgagccatccaatggacaccagttttacttcagcttaacaacggatgcaacaaataaccacaacttttcattgaaagataacaaagacaacacagcctcaatactgaccaggagaaacggcttccggagacaggaacaatcagtttactatctgccaattttcattgtggacagtggatctccctcacttagcagcaccaacaccctcaccatccgcgtgtgtgactgtgatgctgacggcgtagcccagacctgcaatgcagaggcctatgtcctacctgctggcctcagtacaggagccctgatagccatactcgcctgtgtcttgacattattggtgttgatcctccttatcgtcactatgagaagacggaaaaaagagccccttatttttgacgaagaaagagacatcagagaaaatattgtgagatacgatgacgagggcgggggagaggaggacacggaagcgtttgacatggctgcactgagaaacctcaacgtcatccgagacaccaagacccggagggatgtgactccagaaattcaattcctgagtcgaccagcttttaaaagcatcccagataatgtcatctttagggaatttatttgggaaagattaaaagaagccgatgttgatcctggtgctcctccttatgactccctgcagacatatgcttttgaaggaaatggctcagttgctgaatcactcagctctttagattccatcagctcaaactctgatcagaactatgactacctaagtgactggggacctcgctttaaacgactcgcggacatgtatgggactggccaagagagtttgtactcatagccttggaaccttaattcgaaatgtactgaagaaaaagtaacagca

SEQ ID NO: 112850 - DNA, 12231 bp, Homo sapiens
  Payload ID: 2082
  Gene Symbol: CDH7
  Gene Name: cadherin 7, type 2
  Uniprot ID: Q9ULB5
  ENST ID: ENST00000397968
  CDS Start-End: 427-2784
gggcagggtccccgcgcaccgcggagtgggctgtgattggaggaggagcccgtgccgggcgggcccgagcgggtgtcgagccggttcctccagtctgccccgcgcgcggagctgcgcgcactgggtccccaagagcccgcgggcgtccggcagccgagcgcacgttctttcggatgcacacgcccgggtccctggcgtctgacgccgtggggagggcagcgaggccccaggtacttactacaccattctttggcgaaggctattcagcagtggtgacctcttccaatccaacactctacagattattatctctggactcccagctgacaccctgccggaggcaagagctactaagccaactggaactgtgccttttctcttgtcaaggtttttttcttacacaggaaaaagaaagaaaaaaaaaagatgaagttgggcaaagtggagttctgccattttctgcagctaatagctcttttcctgtgtttttctgggatgagtcaagcagaactctcaaggtccagatcaaagccctatttccaatcagggaggtcccggaccaagcgcagctgggtgtggaatcagttctttgtgctggaggaatacatgggttcagaccccctctatgtaggaaagcttcactctgatgttgataaaggagatggttccatcaaatacatcttgtcaggcgaaggggcaagttccattttcattattgatgagaacactggggatattcatgccaccaagagactggatcgtgaggagcaggcctactacacgctccgagctcaagcgctggataggctcaccaacaaacccgtggagcccgagtcggagtttgtcatcaaaattcaggatatcaacgacaatgaacccaaatttttggatggcccatacacggcaggagttcccgaaatgtctcccgtggggacctcagtggtacaagtgacagcgacggatgctgatgatcctacatatggcaacagtgccagagtggtctacagtattctgcaaggacagccgtacttctcagtggagccaaagacaggagtcatcaagactgcccttccaaacatggatagagaggctaaagaccagtatttgcttgtcattcaggcaaaggatatggttggtcaaaatggaggactgtcaggaactacatcagtcactgtgaccctaactgatgtcaacgataatccacctcgctttcctcgaaggtcttatcaatataacgtcccagagtcattacctgtagcctcagttgtggccagaattaaagctgctgatgcagatattggagctaatgctgaaatggagtacaagattgtggatggtgatggtttgggcatttttaagatttctgttgacaaagaaacccaggaaggaatcattactatacagaaggagctggattttgaagccaaaacaagttacacgctacggatagaagctgcaaataaagatgccgaccctcgctttctgagcttgggtccgttcagtgacacgacaactgtgaagataattgtggaagatgtagatgagccccctgtgttctcttcacccttgtaccctatggaggtgtcggaagctacccaggttgggaatatcattggcactgtagcagctcatgacccagattcttccaatagccctgtgaggtactcaattgacagaaacacagacttggagagatacttcaatattgatgccaacagtggggtcatcacaactgccaagtctttggatcgagagacaaatgctattcacaatatcacagtccttgcaatggagagccagaatccatctcaagtaggaagaggctatgtggccatcactatacttgacatcaatgataacgcccctgaatttgccatggactatgagaccaccgtctgtgaaaatgcccagccggggcaggttatccagaaaatcagtgctgtggataaagatgagccatccaatggacaccagttttacttcagcttaacaacggatgcaacaaataaccacaacttttcattgaaagataacaaagacaacacagcctcaatactgaccaggagaaacggcttccggagacaggaacaatcagtttactatctgccaattttcattgtggacagtggatctccctcacttagcagcaccaacaccctcaccatccgcgtgtgtgactgtgatgctgacggcgtagcccagacctgcaatgcagaggcctatgtcctacctgctggcctcagtacaggagccctgatagccatactcgcctgtgtcttgacattattggtgttgatcctccttatcgtcactatgagaagacggaaaaaagagccccttatttttgacgaagaaagagacatcagagaaaatattgtgagatacgatgacgagggcgggggagaggaggacacggaagcgtttgacatggctgcactgagaaacctcaacgtcatccgagacaccaagacccggagggatgtgactccagaaattcaattcctgagtcgaccagcttttaaaagcatcccagataatgtcatctttagggaatttatttgggaaagattaaaagaagccgatgttgatcctggtgctcctccttatgactccctgcagacatatgcttttgaaggaaatggctcagttgctgaatcactcagctctttagattccatcagctcaaactctgatcagaactatgactacctaagtgactggggacctcgctttaaacgactcgcggacatgtatgggactggccaagagagtttgtactcatagccttggaaccttaattcgaaatgtactgaagaaaaagtaacagcaaaaaataaaataaaatgaaataaaataataaaccactacatacagaaaacaagaactccccttgctggagacagatggttgtaaatatttctccatttttaattgtttagatttctgccttggtgaggcatatcttcattagacttatctaaaggactgcactgaccacagactctgagcatttgaaggttttttgataaaaataaatgctcagtggtttgtgaatagatagcaactctcatatacctgcaaaggcaccaaacctctatgagaaagtagtgccctgtgttgtcagtgagtcaaagatgccctgtacataccttcatggtactgtcattgagaggaatagaacatgatgagctattgaaaaaccctggaacttgttgcatatcaaaacttgggacaaatttaatttacagagatgcttatagcttactatattatagaatccaacagaattatgttgctcttgattaacagaaatattttatttaggaatatataaattcccagaaattccttcctaactgaaaaccctaccacaaaagccagtaaaatttagtttaaggcaatataaaccattgtttatccaataaattatgaagtgttccaaataagaaaaaggtaaataatttgatagttttgagatgcttgtgtaggtatgataaaaaaaaaagttgctgtctgttcattgatttttattatctcttctgatttgtacaggagaatatcttttcttttttatttgacacatggtgttgtatttattttggagctccaatctccactaaattcaggtccatcatactgcctcatagtattaaactcatcagaacatgctgatttttctccagcccgagctacatgaaggaaatgaagcatggaaatggagaactaatagtaaagcaattgagccctgttgcaggtcacatctcaaagaggagcacagctacaaggacatataaattgttcttctgagccattagaatgtcaaaacattggaataaaatatttgtattttagaaagacttcagagagaattgagattttctttgatgcaagaattatttttcaagatcatgagttctacatgctccaaagacgatttcaagaacacaacctttcttgctgcaaacctattgagtaaaatattgagtttttaaaagtcttaatataatgttataaaaattaaaatccatctttaaattctgatgcaaatatgtccctcaagaattaaccaagcaatgtatgatttctgtgtggtttagatgtgccaaaggaaggaaggcaattgcaagtcatcatgtgtttaagtttgagttgagcttgttagagtatgactttcatgaccaaaatgatgtttctacctattatttttcctagattaatactagtttaatgtgcatatacattcaagtaagaatggatttattttttccttcctttctccttttaaaaataattcattgttgggttcctaatacatttacagatagtaaacactgtgtagagaatcatgttctaaaagtgctttttgaaaggtagacagtggaattagaatattaatatgttgattacacaaagaagaactatgtaggattctgtaaacttgcagcccaactttagaaatgaagtatgtaaaagtggccttcaacttcataagtataaataatccaataaatttcattacctgcaaacagttctttaatttgaatagagttttgtagacattgttttatgactatatagatatgcttcttgctgtattaatatgcatatatattttaaaaaattataacagtgaaagatactgttcataacttttaatcacacatgcaagtttttcaaactaaaaaataacaaacaaacaaaaaaacacgcgtatttacccagttcaataaaatcagagtgtggtgcaggaattacagagttgttaagtcagcaaggtgctgagaaaacagtttgtaataatccccttgttgtctgcaagaagatgaaatagtttagtacatttggatgatgtcaaaactgctgattgttgcacataccactaaacggaggtgtggatgtattttagaaaaggaacacacatcattcaccctgctttttctgcttttaaaatgtgtgttttttctcattaattttttcaaatggttaccaatgatagattggaaaaagaaaggttcatgtttaaataataatttaaaattattgcatatacccaattgctatttatgtgtggatgattatatgaatacagtattacatttcattcagtggtattttttaattaaaaaaattaatttaaaaaattaatttttgagatggctggaagaatgttcctaatataggtagtatttatatgaagtattctaagcttaattgtaatagtagtaaattttttgccgttgcttattttagttttcttttttcttctgaaatctaatgctatatatgatgactgtcaatacttgagatataggctttgttttaaaaacagtgattgaagagctgattgataaaattaatattaagtctagttggaaaattctccaaatatgatttaaataaatatatattatcaagttgcttaaattcagtattatactgaaaccaactagaatgagctcacaggaactaattcttcatatctcttcccaactccaggtacagtgatatcattttggtaggttgatgtcagccttggtgggattatttagaccacaacagtaatcagcaaacactacccttttctctggagaacaagttgttaaacatttaccagcactctactgcttaaattattttataaaatgaaatgtcataattgtaaatatagtatgaatttatatgatttaaaataatgacatgaaaggaatttatgctatattttactactaaataacaatgtatgtggtagtgatttcctgaagtgaaatccttggagctacttgtagacagggagaggagtcacttctttatggaaaacaatggctaaatttcaagtagagataatagttcaggaagtcaatatatttaattattttccacttgtccatacaggagcatcaatagaaactcagggtttgccaaattatgcccattttgaacagtttaatttattgaaaaatcagatgcattttacttcttactgtctatgtcaaggaaatacacccaagcccttaatctgaattgtcaccattgcattattaaaaatcaacataaaaatataaaaatcaaatcttaaggaaatggatttctggagatcaagcctaaattatcaatctcaattcacaaattagtctctgaaagaaatattccaagatcagccagctaaggaacaaaatcaggaaagagacatcaataaaaaattaggtagtaatttgcaggcaataagtagatttttgatttttctacaagcaatcaccagatctgggatctggtaaatgtctttatttgccaggaagctctgctgatgactacaattgaggttagttgtctacaagatacatgcaggaggtagtagtggttaagtaatggtagctgccttttcactctgccctctgaggaagttttaaattattttatcttcatgcacaattacatttactacattggatggtagacataggcaattattttcatgtcaacggcatagttacacaatgtaggaatgatatttgtgaagtgatccacatgcccaagaaatgcaaatgcaaatagtgttgttagcatttatattgaaatataaaatctaaagcagcttaaaataagctaagctaaacaaactgcaagaagctaaatgatttaaacatgttaaagttttaaagcactagctgtaaatattaatcttcagattttcaatttaacatgtattcacttacaaactgttctaataataacactaattattttccaagtcaccatttaaagttttatttacagttgacctaatccaattgaagttgatgaaagcttcaacttattttttaactctttctggtccacgatgcctggaggcaagtgaaatatatatgacaaataatagataaaccaatttattttctgttagtgtatgtttattttttaattattaataatgtatattgtgtgtatatatgacggtgtatgaaagttggcaatgaaagctaatacaatcatgttagtcggctggatataataaagaacaagaaaggaataatagcatttgcattttaaatgtaattgaaactatttcagaagagtgggataagcccttaagaaaaatgggagatgtttaaggctgtgatttggccgacattgtaacgtataattctgtgggaaatttttcaagcaaatcaagacaggcagtgtgcgttgcattctgacactttttcattgttatgctaacttctactggcttagaatgtaactgaaaaggatgtgtgcctgtgtttttttttttttttttttttttgacgtggagtctcgctctgtcgcccaggctggagtgcagtggtgcgatctcggctcactgcaagctccgcctccagggttcacaccgttctcctgcctcaacctccggagtagctgggactacaggcgcccgccaccgcgccccgctaatttttttgtatttttagtacagacggggtttcaccgtggtctcgatctcctgacctcgtgattcgcccgcctcggcctcccaaagtgctgggattacaggcgtgagccaccgcgcccggccctgtgtgtgcgttttcatgtgtgtgattgggaaccttgagagatgtatctgaagtaatgtaaaaataagagtctcataattcctggttaatgctggcgtattgttgtcacctgccaagtgactgttaggcaataagactagaaaatatggtaccgaatgaaaggagaaatatcttatttgctgtaacaatctaatttatattaaggtaaggattttggtggctaaggaaagaacatttagctgttatttgtgtaattgtcacatattattgtgcagatttaatctcattgttaacagaatatagagtgtgaattatttgttattaaatgttactgggctttggtgtcagtgtggtataccagaaattacctctggtctgtggttataaaatctaggtcagaagctcagtttcgccacatttttgctgtgccctagatgccattttcattctctgaacttttatagcttcatgattaaaattgagttaattactattgtgtttcagaggcttgtgaatgattaagtgaaagactgtgtaaacagtaaaacactataaaaagataaagctttattatgggaaataatgggaattatataaaaaggttgataattgttatatggtaaacagagaatttctgtttggagatacatacattaaggaaaaatatatgcaacttggtatcctaaattggaaaataatattcaaatagataattgtcataattaattgaagccactcaaatacagttatttataagatctcagaagattgcagtttaactcaacataattcaaccattcatatgaattaatgatatccatatgtgaatgggattataaataaagaacaaatctttcttacttataatgataactgagtggaagataaaggactgcctttagatgatcccagcctcattgatgaacacaaaacaccagaatagagaaaaagacaataatgagtataagttaagtggtcttccaggcatccagagtagataaagaaaatgaagttctagagaatacaatactttttaaagtcacagtgacatatgtgtaattaataatttatacacttgaaaaaattagatgcaatgatattgacttaacatgaaaaccatcctgaatgcaatgcactcttgatgactcaaactcacttatatcttacaacagctcatcttaatctcttacgaatgaagaaactctaggaaactaaaaaataatatataatggatattactttttgtcagtgatgccaagatgaatgttaataagctctcttctcaactttagctcttagttatctggttattttatgctcatgtgaacagacactagaaacaaatatattaataactatgtaactaatgagaatgttgaaagtacagcatactttcattcaaaaacaaacttgcattttcattttattaatgaatataatgatgttaatggtttatataagcaggaaaaacttatatgattcactaccctacagcttcatgttctaattttgtgagtataaaccctatgtttttgtatatcaagatctggaatatgttgtatactgtatatgaccaatactttaagaacaatcaagtttttttattattattattatactttaagttttagggtacatgtgcacaatgtgcaggttagttacatatgtatacatgtgccatgctggtgtgcggcacccattaactcgtcatttagcattaggtatatctcctaattctatccctcccccctccccctaccccacaacagtccctagagtgtggtgttccccttcctgtgtaactatatagcaatttcattttacatgcagtaattttaaatgcccaaaaataaaaggaaaaggaaaaataagtcactacacaacttatatatattatgtatttgtctttgaattttgtgtgcgtatgtgtgtgtgtatatatagacagcatgcgcacacatacatacacgtgtgcaggaacacacacaatttgaggcgaaatgttgaagtaaagtaaatgacttttaaatattttctttttagcttttaagatgtctattagatccaacctctacaattaaattatatgagcatactgagggagaattgcacatttgtaaagtttctctttagtagagatttcagaattttttttctcaaatttagaggaacgaacaattcacattagtaaaacacacagcattactttcaatgaaactataatttttatgtttatgagattccattataattacattaaaaagaaaaccacttttataatatttttgcttatgtaagagtcacttctatagtaaaagagccttaaaaatgttaattcaattgactgcagaattgatcctgaaaatccagttcatttaaccttggaaatgagacatgaagcataaaacctggggtcaggatgtatgtccaaactgaatagattattttcgttcagctcaagtgctatctttcaggcaaatagactcctacaatattcagtattggagatgtttaaaacaaatataagaaagagtactgtttcagaactaaccagcgaagagatgtatacaaagtgtactctgaattggaataagtgtaggaagacaagccgtgagaatgtgagacctcagtatattgctgtgttttattgtgtgttttgctgtatttttaaaaaataagaaaaaattatcacagagtaagatacatagaagaaaataatttccgcaattcttggtacctcaaaagacctgacacactacaatgaagacttctgttgtcatcattctcagctgtgatggtggcgccatcctggtttccagcttatacctcctgacaactcggtacagaaaatgagtatcattgtaattaaagtttgatattttcttctaagtgactgatttttaatataaaagtatcacaataaagtttttccacagatatgtaattttaagttagataacattctaacatatacatggtttcaattttcttataagtctgtgaatcactcaagttaggcattgttaggttttttaaggaaaaactttgatgcccagaataactgtaacttatgcaaacacacacacacacacacacactcacacacacacgaagtaaatggtagaaatgaaagaagaagaagaagaaaaaaacattgggacattttgccctttatctttttattaagactgtcaataaatgatggtttggtttaagaggataagaagatagctgaaactctaataattggactttccaatcttaattatgctttagttcccttaccaggattaggaaacttctttgtgattcttttttaaaaataatttaatcaggaagtgacattaaattctgtttcaatgtaatgagaaaatagaaatatttatattgtcattacgatggcacttcaccagtatgtcctaatctattctctattacgtctctgaggtgggacattgttgtgagaatggacgagagcacaaaaacacggcagaccagattttctgagggttacccgctatgcagattcataaacttgttattgaatagttggcacacaagggtaggagaaaaatcccaacaacccttccaccttttccaaaaagaaaaaaaagaaagaaaaagctaaatcttatgaagctaaactgtcaacaaacagttccactgaagttgccatagggacagctccaacccagtgctgggctcgtggaaggcagcaaggtacctgcatcaagccaagatccatgaaagtgctaatgtcatttgaggccagtttcacccctacctcccataaatcattttaaaccaaatatgaattagtagtcaaaaatgaccaaacacagacgataacccaccatgaaggagatggttcatagaaatctccaagaacttcagataattcaggtaattatcagaaacatgacaagaaaaagctttgtgtaaaatacagaatacaacacaaggaataatgaaaagatgatctatgatggtgtatacttgcaaaataactaaagagtgtatttaagatttaaatatatctttgaagctagaagtactatggagattgtatatactatattagacactgtgcaagaaggaacttgtgaagctaaaaaatagaatgcaataaattagctagtctgccacatagagaaaaaaagataatctgcaagaacataagggacaaggataaaatacggagtttaacgtgcttataaccagtgtgatccttgttaatcagaattctagaatgttccattgccttatgtgacacctccactgcccccactttttctttttttttgacaaggtctcattatgtttcccaggctggcttttaactcctggcctcaagttatcctcctgcctctgcctccttaaatactggaattacaggtgtgagtcaccatgccaggtgtctcccattttttaatggtagcttaacttcacctgaagcctcctatgccactatctttataggaagctttaccgactttgtacgacttggtttaatttattcagcttaatggtccatttaaccaatattgttataaatttatgaagcttcaattctagcaaaaataaactatgtgcactcatcaaaatgtgtggcacacctatgaaaagtgatcaggatgcccaagcaattttaattaaaatcagataattaaatatg

SEQ ID NO: 112851 - DNA, 3766 bp, Homo sapiens
  Payload ID: 2082
  Gene Symbol: CDH7
  Gene Name: cadherin 7, type 2
  ENST ID: ENST00000536984
  CDS Start-End: 695-2587
ctgggaggcgccgaagtctcagtggctccctgggccggcctccgacagcgctgacagcaggcgcccgccgcccaccatcgtcgccctcttcccctccctcttcggccccggctccggcgcgctctctcctcctctcctgcgcgccctctcgccctctctctggccgcgcgctcccgctggctccggaccctgcgtctcagctgcccgggcgagccggaggggcccctcgcagtgagcagacgcagcgggcccccggcgcccgaggccggggcagggtccccgcgcaccgcggagtgggctgtgattggaggaggagcccgtgccgggcgggcccgagcgggtgtcgagccggttcctccagtctgccccgcgcgcggagctgcgcgcactgggtccccaagagcccgcgggcgtccggcagccgagcgcacgttctttcggatgcacacgcccgggtccctggcgtctgacgccgtggggagggcagcgaggccccaggtacttactacaccattctttggcgaaggctattcagcagtggtgacctcttccaatccaacactctacagattattatctctggactcccagctgacaccctgccggaggcaagagctactaagccaactggaactgtgccttttctcttgtcaaggtttttttcttacacaggaaaaagaaagaaaaaaaaaagatgaagttgggcaaagtggagttctgccattttctgcagctaatagctcttttcctgtgtttttctgggatgagtcaagcagaactctcaaggtccagatcaaagccctatttccaatcagggaggtcccggaccaagcgcagctgggtgtggaatcagttctttgtgctggaggaatacatgggttcagaccccctctatgtaggaaagcttcactctgatgttgataaaggagatggttccatcaaatacatcttgtcaggcgaaggggcaagttccattttcattattgatgagaacactggggatattcatgccaccaagagactggatcgtgaggagcaggcctactacacgctccgagctcaagcgctggataggctcaccaacaaacccgtggagcccgagtcggagtttgtcatcaaaattcaggatatcaacgacaatgaacccaaatttttggatggcccatacacggcaggagttcccgaaatgtctcccgtggggacctcagtggtacaagtgacagcgacggatgctgatgatcctacatatggcaacagtgccagagtggtctacagtattctgcaaggacagccgtacttctcagtggagccaaagacaggagtcatcaagactgcccttccaaacatggatagagaggctaaagaccagtatttgcttgtcattcaggcaaaggatatggttggtcaaaatggaggactgtcaggaactacatcagtcactgtgaccctaactgatgtcaacgataatccacctcgctttcctcgaaggtcttatcaatataacgtcccagagtcattacctgtagcctcagttgtggccagaattaaagctgctgatgcagatattggagctaatgctgaaatggagtacaagattgtggatggtgatggtttgggcatttttaagatttctgttgacaaagaaacccaggaaggaatcattactatacagaaggagctggattttgaagccaaaacaagttacacgctacggatagaagctgcaaataaagatgccgaccctcgctttctgagcttgggtccgttcagtgacacgacaactgtgaagataattgtggaagatgtagatgagccccctgtgttctcttcacccttgtaccctatggaggtgtcggaagctacccaggttgggaatatcattggcactgtagcagctcatgacccagattcttccaatagccctgtgaggtactcaattgacagaaacacagacttggagagatacttcaatattgatgccaacagtggggtcatcacaactgccaagtctttggatcgagagacaaatgctattcacaatatcacagtccttgcaatggagagccagaatccatctcaagtaggaagaggctatgtggccatcactatacttgacatcaatgataacgcccctgaatttgccatggactatgagaccaccgtctgtgaaaatgcccagccggggcaggttatccagaaaatcagtgctgtggataaagatgagccatccaatggacaccagttttacttcagcttaacaacggatgcaacaaataaccacaacttttcattgaaagataacaaagacaacacagcctcaatactgaccaggagaaacggcttccggagacaggaacaatcagtttactatctgccaattttcattgtggacagtggatctccctcacttagcagcaccaacaccctcaccatccgcgtgtgtgactgtgatgctgacggcgtagcccagacctgcaatgcagaggcctatgtcctacctgctggcctcagtacaggagccctgatagccatactcgcctgtgtcttgacattattgggtaggtactgtttccagggcttgctctgaaagagctgtcacaataaccacatgtcacgacttgcctattatcttctccatttggtgaacatatgcagatattctactggatggtgtttgttttgttttgtttttctttgagacggggtctcactctgttgcccaggctggagtgcagtagaatgatctgggctcactgcagcctctgcctcccaggttcaagcaattctcccacctcagcctcccgagtagctgggattacaggggtgcaccaccacacccagctaacttttgtatctttagtagagactgagtttcaccatgttgggcaggctggtcttgaactcctgacctcaggtgatccacccaccttggcctcccaaagtgctgggattacaggagtgagccacagctcctggcctggatggtgttttgctcactaagtaatacaattgttggccacactttccagtggtatatttgaagtataactcagacaaaaagttgtatcaatttcattttcaaagcaacagtgaagataaatggcttatgctttaaattaatgctttttaggattaaaaataatctatcttatcccagttctttgctttagagcactctacagaggagatacactagactggagaatacattttctatattgttttgacaatatgcttattttagaaattatggctttatattctactttttaaagaaattatttgattgctttcttaaattatttgcaaatttgaaatgattacaatttcagcaatgcaaatcttatatttttaaagtattaaatactaacacatttaattgtacatttccatgattagtttattactcggttaaattaaatttataactcatatttgcagtaactcagattttgcagcatccttttaaaaattgggagatgtccaatgtggacactgggtaatgggtttattccaaagaaacatttttcttcacattgtaacttgtaacacgaacacaacaagaacagagtaaacattcaatataccgttccatatggtgaatgttcaataaattttaagtgttactgatggaaaattataagctaagacctagttactaatacattataaatgctgtcgtgaaaatggaggttattgtcttaagtaacttaagctaaacaagtaaatctaaaagaaaataaactatattttgcatagaacttta

SEQ ID NO: 112852 - DNA, 3728 bp, Homo sapiens
  Payload ID: 2083
  Gene Symbol: CDH8
  Gene Name: cadherin 8, type 2
  ENST ID: ENST00000299345
  CDS Start-End: 956-3193
aacataacgccagccccagagctcaggtgagacctctagagagaaagctcgcaggtacctcatccgcatgctgttattatctgccagcccacttatccaggagctcggtcctcagcgggctgcgcgcaccgcgcggaagggcgcatcttcacctcgtggctctggcggcagagacgcgcggggcttgctcgggagcgaggagcgaaaagttgtgcgcccacttgggtagggggaaagagagcgatcgagccagcgcgggagagcgaagggggaaggcggggagggggcggggaggggggactgcttacatgaatttccaagtggtagacctgcctctgcgctctgcccaatgagatccgtcaggggaggcacccggctcacttttccacatcacttcacagttacatttggcaggcaggcgggctcgcacgccggagcgctcagcccagaattagtggatttatttggaatctccctgcctcctccaagctccgccgccgccgccggcttgtgcatagacggtagcgtcaagacaccagctgcactttgggttgcggacacccagagcccagcgcgcccgccctgcgtctccgcaccaagccctgtagctccgagaggcatgaacggaatccggaggcgcctgcctagcgagcgaggaccggtcggcgcttgccgccctcgggagctaaccccgagcacctccagccatttgtgaacctggaggcttgacattcgccagcgcagggccccacaagagaaatttcaatgaaaagaaaagccaatggattgtggtcttagaaaagctgcttagatgatgtctgtttcccgtgctatagacacgtggcagagctgtaagtaaatgctcggcactgcatgatgaattggatggctgcagaccggagacaaaaaaaataattgtctcattttcgtggtgatttgcttaactggtgggaccatgccagaacggctagcggaaatgctcttggatctctggactccattaataatattatggattactcttcccccttgcatttacatggctccgatgaatcagtctcaagttttaatgagtggatcccctttggaactaaacagtctgggtgaagaacagcgaattttgaaccgctccaaaagaggctgggtttggaatcaaatgtttgtcctggaagagttttctggacctgaaccgattcttgttggccggctacacacagacctggatcctgggagcaaaaaaatcaagtatatcctatcaggtgatggagctgggaccatatttcaaataaatgatgtaactggagatatccatgctataaaaagacttgaccgggaggaaaaggctgagtataccctaacagctcaagcagtggactgggagacaagcaaacctctggagcctccttctgaatttattattaaagttcaagacatcaatgacaatgcaccagagtttcttaatggaccctatcatgctactgtgccagaaatgtccattttgggtacatctgtcactaacgtcactgcgaccgacgctgatgacccagtttatggaaacagtgcaaagttggtttatagtatattggaagggcagccttatttttccattgagcctgaaacagctattataaaaactgcccttcccaacatggacagagaagccaaggaggagtacctggttgttatccaagccaaagatatgggtggacactctggtggcctgtctgggaccacgacacttacagtgactcttactgatgttaatgacaatcctccaaaatttgcacagagcctgtatcacttctcagtaccggaagatgtggttcttggcactgcaataggaagggtgaaggccaatgatcaggatattggtgaaaatgcacagtcatcatatgatatcatcgatggagatggaacagcactttttgaaatcacttctgatgcccaggcccaggatggcattataaggctaagaaaacctctggactttgagaccaaaaaatcctatacgctaaaggtagaggcagccaatgtccatattgacccacgcttcagtggcagggggccctttaaagacacggcgacagtcaaaatcgtggttgaagatgctgatgagcctccggtcttctcttcaccgacttacctacttgaagttcatgaaaatgctgctctaaactccgtgattgggcaagtgactgctcgtgaccctgatatcacttccagtcctataaggttttccatcgaccggcacactgacctggagaggcagttcaacattaatgcagacgatgggaagataacgctggcaacaccacttgacagagaattaagtgtatggcacaacataacaatcattgctactgaaattaggaaccacagtcagatatcacgagtacctgttgctattaaagtgctggatgtcaatgacaacgcccctgaattcgcatccgaatatgaggcatttttatgtgaaaatggaaaacccggccaagtcattcaaactgttagcgccatggacaaagatgatcccaaaaacggacattatttcttatacagtctccttccagaaatggtcaacaatccgaatttcaccatcaagaaaaatgaagataattccctcagtattttggcaaagcataatggattcaaccgccagaagcaagaagtctatcttttaccaatcataatcagtgatagtggaaatcctccactgagcagcactagcaccttgacaatcagggtctgtggctgcagcaatgacggtgtcgtccagtcttgcaatgtcgaagcttatgtccttccaattggactcagtatgggcgccttaattgccatattagcatgcatcattttgctgttagtcatcgtggtgctgtttgtaactctacggcggcataaaaatgaaccattaattatcaaagatgatgaagacgttcgagaaaacatcattcgctacgatgatgaaggaggaggggaggaggacacagaggcttttgacattgcaactttacaaaatccagatggaattaatggatttttaccccgtaaggatattaaaccagatttgcagtttatgccaagattacagaagagggttgctaggaggaatatcacaagatgctgtctgaagagaaagactgtggaaaaccatggcttcaatgaactcagaggtcaggaccagaaaaggaaatgagaggtcaccaaagccaaatgttaatttcttgggatttcttctgtacatgcaaagaacttcaggccatcctatgattcctcaaaaataagaggaaaattttaacaattatgctctaagatggaccatgacaatttaggagtcattgggatcaccccccaaagccaaatgttaatttcttgggatttcttctgtacatgcaaagaacttcaggccatcctatgatccctcacaaataagaggaagattttaacaattatgctctaagatggaacatgacaatttaggagtcactgggatcaccccccccacctttccaacgttactctgctttaactacaaatatgtcgaatggttttctaatttttctttaacttaacctctaaagttcgagagctgtcatctttgtcaagtctgattgttgagtatgtgaatggatgtttttggctcaatgttagagccaaaatttataaataataattatttatacataatgatattgcaaataaactttaagaaagagctttaaacataaaaa

SEQ ID NO: 112853 - DNA, 8009 bp, Homo sapiens
  Payload ID: 2083
  Gene Symbol: CDH8
  Gene Name: cadherin 8, type 2
  ENST ID: ENST00000577730
  CDS Start-End: 200-2434
gaaatttcaatgaaaagaaaagccaatggattgtggtcttagaaaagctgcttagatgatgtctgtttcccgtgctatagacacgtggcagagctgtaagtaaatgctcggcactgcatgatgaattggatggctgcagaccggagacaaaaaaaataattgtctcattttcgtggtgatttgcttaactggtgggaccatgccagaacggctagcggaaatgctcttggatctctggactccattaataatattatggattactcttcccccttgcatttacatggctccgatgaatcagtctcaagttttaatgagtggatcccctttggaactaaacagtctgggtgaagaacagcgaattttgaaccgctccaaaagaggctgggtttggaatcaaatgtttgtcctggaagagttttctggacctgaaccgattcttgttggccggctacacacagacctggatcctgggagcaaaaaaatcaagtatatcctatcaggtgatggagctgggaccatatttcaaataaatgatgtaactggagatatccatgctataaaaagacttgaccgggaggaaaaggctgagtataccctaacagctcaagcagtggactgggagacaagcaaacctctggagcctccttctgaatttattattaaagttcaagacatcaatgacaatgcaccagagtttcttaatggaccctatcatgctactgtgccagaaatgtccattttgggtacatctgtcactaacgtcactgcgaccgacgctgatgacccagtttatggaaacagtgcaaagttggtttatagtatattggaagggcagccttatttttccattgagcctgaaacagctattataaaaactgcccttcccaacatggacagagaagccaaggaggagtacctggttgttatccaagccaaagatatgggtggacactctggtggcctgtctgggaccacgacacttacagtgactcttactgatgttaatgacaatcctccaaaatttgcacagagcctgtatcacttctcagtaccggaagatgtggttcttggcactgcaataggaagggtgaaggccaatgatcaggatattggtgaaaatgcacagtcatcatatgatatcatcgatggagatggaacagcactttttgaaatcacttctgatgcccaggcccaggatggcattataaggctaagaaaacctctggactttgagaccaaaaaatcctatacgctaaaggtagaggcagccaatgtccatattgacccacgcttcagtggcagggggccctttaaagacacggcgacagtcaaaatcgtggttgaagatgctgatgagcctccggtcttctcttcaccgacttacctacttgaagttcatgaaaatgctgctctaaactccgtgattgggcaagtgactgctcgtgaccctgatatcacttccagtcctataaggttttccatcgaccggcacactgacctggagaggcagttcaacattaatgcagacgatgggaagataacgctggcaacaccacttgacagagaattaagtgtatggcacaacataacaatcattgctactgaaattaggaaccacagtcagatatcacgagtacctgttgctattaaagtgctggatgtcaatgacaacgcccctgaattcgcatccgaatatgaggcatttttatgtgaaaatggaaaacccggccaagtcattcaaactgttagcgccatggacaaagatgatcccaaaaacggacattatttcttatacagtctccttccagaaatggtcaacaatccgaatttcaccatcaagaaaaatgaagataattccctcagtattttggcaaagcataatggattcaaccgccagaagcaagaagtctatcttttaccaatcataatcagtgatagtggaaatcctccactgagcagcactagcaccttgacaatcagggtctgtggctgcagcaatgacggtgtcgtccagtcttgcaatgtcgaagcttatgtccttccaattggactcagtatgggcgccttaattgccatattagcatgcatcattttgctgttagtcatcgtggtgctgtttgtaactctacggcggcataaaaatgaaccattaattatcaaagatgatgaagacgttcgagaaaacatcattcgctacgatgatgaaggaggaggggaggaggacacagaggcttttgacattgcaactttacaaaatccagatggaattaatggatttttaccccggtggggcttgccaattcagtggtgggaggagagaaatcccattcaaacatgcttgttttctagaagcaggattcctcgttccctcctcttcatcttcttccacaaggacacaaagataaactgtatcacacagtggactacataagagacagatggttttattgctagcgcgtgaatttatttgtttaatcctcgaaataaatattttattgatgtccattaatgcttttatttattaaggtcggtaatctatagattaaggggatatatgggaaaaaactaaattatatccattaataatcctttagattgttttatataaatatatatacaatgaatgtttaatacatgtacattttgatgagatgagtatggcaggcaatattatcgaaaggagagctaatagtctctttagagtagaaagtgttattgtaactggagatggcaggaacagcatcttcccagacaaacttttggactgttttctattttgttcataatcctagtatttggtgtttttactacaagcacaaacatcctaaagtatattgattcctgtgaatatttaaactctagacttttagatacctacatcatgccctgcccaataaacatgcttcaatttacccccacagttttagagcaggaactgatttgtacataatttcactgtttacgtttttagcactcctatccctgatcttcatggtgatgcacagaatgtcttagactccaaaaaggaacagcactagaagatgtgagcatatttaatttgtaatgcaaacctgccatttaggagtagaaaatgtatgataaaactcaagtattacatgcagatcattttaattttctactttgctttaatgcaatattgtttattcactccatgtattgtattcagagaaactcctgtattgtttcctactttgtgaaatatatttttataaatacctttgttgtcattaatttttttttcaatcagtggaagatctattaacagaatcatcaactcaaactaaaattctagaatactcaaccaaatcatcccaagggtcacttttgtttgtaagactctttattatagagaaacagagaagagaaatggcttgccagtgatcacacagcaagataccagcagggacataagaggaacatggaacacctaaaggctagtccagctgtgtcatttgggtccttctggaagcagacgcattgggcagggaaaaccttcagacaagtttgcagacctaaaacttgtaacaatagagggattgggagcaggatttggcaagagagtcttagactgcagtgcggacctggcaaaatctctgccagtctgacagggggttctagagtgaaaacacatccattaaagcagtcaggctgtggtcctctgtcatctcagtcattggtgcggggctgctaagaagagaacggtttttgactcaaaagctgaacgcaccaacttctagaggccaccttcactgtgacagaaactgcatgtttaaatactatactaacaatttataactatccggtggcttaatcaactttttattgagtttctgttgctgagaataagtcatcttttatgcgtattattacggctagtgaacactttttcttgaggtcaaagggatggtccaacatgactttaaaatatactaggacttggcacagtgtctaaaacaagtgcttggtgaatgtaaattattagtagtagttgcagtaataaccaatagtaatattccaactatcttacaccttccaaaccaaggagagattattatgttttatgtatctcttgaacaccagactcatttctagtgtactttgaagtgcccaaagattatagacacacaaatatgtctaacagaataattacagtattttttaaggagtataaaatctgtatcctcaaatattggtaatcaacaggataatcttcgtacagtggtttctgtgagcaggagataatgtctgctctactagttgcccaaatatcgcctaagtattctctttgcctaggaacacagaatgaaagcttgcatctcttgctgactttctttgccaccacagtgtcagcattttgtgtttaaaagcctatttcaggtcttgtaacatagaataaagtgactaataccttgatcctaataagattgacctatacttttagagtgtcatgaattaaactaaaaatctcaggaactatctctctctttctctctttctctctctctctctctctctctctcacacacacacacacacacacacacacacacacacaacaaacaaataaaaaacacacattttgacttgaagttttactttagcaatagacttgccaggactttcccaaccaaaagatatcaataaggttcctaacattttctaagatttaagtatcccatgctcaatttgttaaataacacattttaaaaactttattgaaatgactatatttttaaagctatgtgcattgttgtctgtttcatcaacattgacatagcagaaacaagagtactctctgctaaatagagaagaatgattaagttggagccaagtgagacaaagttatctccctctgcctacctcacaattcaaggttcccacctagggaactgatgcatccctgggtgattggacacaacatgggatcaattcagcctctactctgcctatgatttgatcaaatcatattagcaaagtgtctcttaaacatccatatatgaatattaaagagtattaaggggggcatttcttaacaatatttttatgagtatagttataagtttctaaacatttataatacgatgactaaaatatgctatttttaaattcaagtgttaaccttgccacacagaattatgacttctagggtgtaaactttaaagtgaaactgttttgaaaaaaatctgcagttaagtgtatgtgtatatatagaagaaaaggaaacttagatttactggtatcaccagtgaagcaagaatgcttagaaagatacaaatgtgtctttgggagagtctgcttaatcagatgcttaaagtaagacaagtctctgcatgagacttagaaatctcctaggagcagctggattccacactgagactcaacagagttctgggctatgctgtattttggaaaaggaaaagcgggtgctgagagctaagtagccaattactctttatagccacataaggactgaaggcaagtaggcccttccaacaagttgtattatgcgatcactggctttgcagggaatctcacgaatgtataaccttctgattgcctttttgattgaaagttccatctgagatcagggcagtgtaaccagtaataagatttcaaaaaaatcccatcactggcactgtcggaaaggctgagcatgactgaaatcctatcattgtcagtcaaaaagataaggtaacagcgggcatcactataaaagctctataaatgcacaacttaaacatgaatatcaacattaaaaagaatatatatatccttatacatatatttataaatatattcatatatataaatatgcacatatatacacaattcagttactggggataatttatagttttaatttttcatctcataatctcacgcactgccaacaaattgaaattgtggctctctgttttcatgaatctaaccttgaatttgaaagaagttgaattgagggtaaagggttttaaaagcagctttttatttgtgaacagaataatggctcataatacctgggattagaattaaatatgtcacgttgtgaggctgtacttagactttttaaatgtcattgtatttttttgtggacaaaataattgtagaatatactttgcaggaaatacttttctatattttttcaatttcaatactgttttatttgctataaaaagtgtctttgcactgttactcagccaaacagtgttgaatgtattatttgcccttgtaattattgcttcttatgataattgtagaagagcatgtctttatgatctatcatttaaaaatacatttattgtcattgtagttttagtcaacacaaatttatggattacatggtatactgttgctattgaagatattctagtcctagtattttgagcacagacctagcgttatggaggacataaaatttaaaaatttcctgacttgatggactatctgaggaaaaagaattttgtctgtcacatttattgagtatctatcagtacagaaattaagctacatggttgatacagaaagattaaatacagtagcattctcaaacttattttctttatttataaaatgtacctaatcaatctcataagaactaattgttgaattttttttttatctatggataaatactatttgagtctgggtttaagtttggttgatctgacactaaatccccttaactttcaactaaacagttatctctgtaattatgagacttttgatgataagaaatagaaactaagttatatatagtgctatggaagtactgaggaggaagtaagggaccccatatgggaagactcaagaagacgtcacggtgaaattttccaaaaagatgggaactcaagaatgggtgcaacagaaatcacagcttttccaaatactaaaagggaaaattataaaaagcaccaatggcacacttttggacattcagaaagatccagaaattaggtgcttataggaaactctaggtttgccaaattgtagtgttttatggataggaaaaatgaagttcagaaacgttataaggaattttcagggttaaattacacatcaaatatgtgagagaaacagaaattacatgctggtatttggggtcatctcctgagttgtaatgttgtaagtgtttttgtatgtattctcctccttcctttatgtgtggaagtttcatctaggtctcaaggttagtaggcatttgctggtgaaaatagtgcctttgggtactatttccccaacttgagttacctgccaccatctaattcacatcttgaatgcaagtattatttcttgcaagtatccctactaatagataatagatatttctattattatccacagattacagaagagggttgctaggaggaatatcacaagatgctgtctgaagagaaagactgtggaaaaccatggcttcaatgaactcagaggtcaggaccagaaaaggaaatgagaggtcaccaaagccaaatgttaatttcttgggatttcttctgtacatgcaaagaacttcaggccatcctatgattcctcaaaaataagaggaaaattttaacaattatgctctaagatggaccatgacaatttaggagtcattgggatcaccccccaaagccaaatgttaatttcttgggatttcttctgtacatgcaaagaacttcaggccatcctatgatccctcacaaataagaggaagattttaacaattatgctctaagatggaacatgacaatttaggagtcactgggatcaccccccccacctttccaacgttactctgctttaactacaaatatgtcgaatggttttctaatttttctttaacttaacctctaaagttcgagagctgtcatctttgtcaagtctgattgttgagtatgtgaatggatgtttttggctcaatgttagagccaaaatttataaataataattatttatacataatgatattgcaaataaactttaagaaagagctttaaacataaaaa

SEQ ID NO: 112854 - DNA, 9721 bp, Homo sapiens
  Payload ID: 2083
  Gene Symbol: CDH8
  Gene Name: cadherin 8, type 2
  Uniprot ID: P55286
  ENST ID: ENST00000577390
  CDS Start-End: 956-3355
aacataacgccagccccagagctcaggtgagacctctagagagaaagctcgcaggtacctcatccgcatgctgttattatctgccagcccacttatccaggagctcggtcctcagcgggctgcgcgcaccgcgcggaagggcgcatcttcacctcgtggctctggcggcagagacgcgcggggcttgctcgggagcgaggagcgaaaagttgtgcgcccacttgggtagggggaaagagagcgatcgagccagcgcgggagagcgaagggggaaggcggggagggggcggggaggggggactgcttacatgaatttccaagtggtagacctgcctctgcgctctgcccaatgagatccgtcaggggaggcacccggctcacttttccacatcacttcacagttacatttggcaggcaggcgggctcgcacgccggagcgctcagcccagaattagtggatttatttggaatctccctgcctcctccaagctccgccgccgccgccggcttgtgcatagacggtagcgtcaagacaccagctgcactttgggttgcggacacccagagcccagcgcgcccgccctgcgtctccgcaccaagccctgtagctccgagaggcatgaacggaatccggaggcgcctgcctagcgagcgaggaccggtcggcgcttgccgccctcgggagctaaccccgagcacctccagccatttgtgaacctggaggcttgacattcgccagcgcagggccccacaagagaaatttcaatgaaaagaaaagccaatggattgtggtcttagaaaagctgcttagatgatgtctgtttcccgtgctatagacacgtggcagagctgtaagtaaatgctcggcactgcatgatgaattggatggctgcagaccggagacaaaaaaaataattgtctcattttcgtggtgatttgcttaactggtgggaccatgccagaacggctagcggaaatgctcttggatctctggactccattaataatattatggattactcttcccccttgcatttacatggctccgatgaatcagtctcaagttttaatgagtggatcccctttggaactaaacagtctgggtgaagaacagcgaattttgaaccgctccaaaagaggctgggtttggaatcaaatgtttgtcctggaagagttttctggacctgaaccgattcttgttggccggctacacacagacctggatcctgggagcaaaaaaatcaagtatatcctatcaggtgatggagctgggaccatatttcaaataaatgatgtaactggagatatccatgctataaaaagacttgaccgggaggaaaaggctgagtataccctaacagctcaagcagtggactgggagacaagcaaacctctggagcctccttctgaatttattattaaagttcaagacatcaatgacaatgcaccagagtttcttaatggaccctatcatgctactgtgccagaaatgtccattttgggtacatctgtcactaacgtcactgcgaccgacgctgatgacccagtttatggaaacagtgcaaagttggtttatagtatattggaagggcagccttatttttccattgagcctgaaacagctattataaaaactgcccttcccaacatggacagagaagccaaggaggagtacctggttgttatccaagccaaagatatgggtggacactctggtggcctgtctgggaccacgacacttacagtgactcttactgatgttaatgacaatcctccaaaatttgcacagagcctgtatcacttctcagtaccggaagatgtggttcttggcactgcaataggaagggtgaaggccaatgatcaggatattggtgaaaatgcacagtcatcatatgatatcatcgatggagatggaacagcactttttgaaatcacttctgatgcccaggcccaggatggcattataaggctaagaaaacctctggactttgagaccaaaaaatcctatacgctaaaggtagaggcagccaatgtccatattgacccacgcttcagtggcagggggccctttaaagacacggcgacagtcaaaatcgtggttgaagatgctgatgagcctccggtcttctcttcaccgacttacctacttgaagttcatgaaaatgctgctctaaactccgtgattgggcaagtgactgctcgtgaccctgatatcacttccagtcctataaggttttccatcgaccggcacactgacctggagaggcagttcaacattaatgcagacgatgggaagataacgctggcaacaccacttgacagagaattaagtgtatggcacaacataacaatcattgctactgaaattaggaaccacagtcagatatcacgagtacctgttgctattaaagtgctggatgtcaatgacaacgcccctgaattcgcatccgaatatgaggcatttttatgtgaaaatggaaaacccggccaagtcattcaaactgttagcgccatggacaaagatgatcccaaaaacggacattatttcttatacagtctccttccagaaatggtcaacaatccgaatttcaccatcaagaaaaatgaagataattccctcagtattttggcaaagcataatggattcaaccgccagaagcaagaagtctatcttttaccaatcataatcagtgatagtggaaatcctccactgagcagcactagcaccttgacaatcagggtctgtggctgcagcaatgacggtgtcgtccagtcttgcaatgtcgaagcttatgtccttccaattggactcagtatgggcgccttaattgccatattagcatgcatcattttgctgttagtcatcgtggtgctgtttgtaactctacggcggcataaaaatgaaccattaattatcaaagatgatgaagacgttcgagaaaacatcattcgctacgatgatgaaggaggaggggaggaggacacagaggcttttgacattgcaactttacaaaatccagatggaattaatggatttttaccccgtaaggatattaaaccagatttgcagtttatgccaaggcaagggcttgctccagttccaaatggtgttgatgtcgatgaatttataaatgtaaggctgcatgaggcagataatgatcccacggccccgccatatgactccattcagatatatggctatgaaggccgagggtcagtggctggctccctcagctccttggagtccaccacatcagactcagaccagaattttgactacctcagtgactggggtccccgctttaagagactgggcgaactctactctgttggtgaaagtgacaaagaaacttgacagtggattataaataaatcactggaactgagcattctgtaatattctagggtcactccccttagatacaaccaatgtggctatttgttttagaggcaagtttagcaccagtcatctataaactcaaccacattttaatgttgaaccaaaaaaagataataaaataaaaaagtatatgttaggaggttataaatcttgtggagtgtgaattaagtatgtggagtgtctagaagtccttggatatttgatatttacctgaccaccacagacaaagattgggatcctggctaatccttagataaatggtttaaatagaggaaaaaatcataattaaaaggtgctttcttagaaaaaaaaatacggacctgcaaggaatctgctgctgatatgtgtcttctgcaaggatttttatgaatgcaaatggttttttccccttcaccaataaggatcccgccacaaatgataaagcaatacttggtctgctgtacattataactttttggagttttgagaggcctcctagattatacagtacggtgaccacacattgtacataattgttggccccactcactagagactgaatagcatctttaaatattgtgtcgagccttaaaatattcacatgttcgtaatccattccagggtggggcttgccaattcagtggtgggaggagagaaatcccattcaaacatgcttgttttctagaagcaggattcctcgttccctcctcttcatcttcttccacaaggacacaaagataaactgtatcacacagtggactacataagagacagatggttttattgctagcgcgtgaatttatttgtttaatcctcgaaataaatattttattgatgtccattaatgcttttatttattaaggtcggtaatctatagattaaggggatatatgggaaaaaactaaattatatccattaataatcctttagattgttttatataaatatatatacaatgaatgtttaatacatgtacattttgatgagatgagtatggcaggcaatattatcgaaaggagagctaatagtctctttagagtagaaagtgttattgtaactggagatggcaggaacagcatcttcccagacaaacttttggactgttttctattttgttcataatcctagtatttggtgtttttactacaagcacaaacatcctaaagtatattgattcctgtgaatatttaaactctagacttttagatacctacatcatgccctgcccaataaacatgcttcaatttacccccacagttttagagcaggaactgatttgtacataatttcactgtttacgtttttagcactcctatccctgatcttcatggtgatgcacagaatgtcttagactccaaaaaggaacagcactagaagatgtgagcatatttaatttgtaatgcaaacctgccatttaggagtagaaaatgtatgataaaactcaagtattacatgcagatcattttaattttctactttgctttaatgcaatattgtttattcactccatgtattgtattcagagaaactcctgtattgtttcctactttgtgaaatatatttttataaatacctttgttgtcattaatttttttttcaatcagtggaagatctattaacagaatcatcaactcaaactaaaattctagaatactcaaccaaatcatcccaagggtcacttttgtttgtaagactctttattatagagaaacagagaagagaaatggcttgccagtgatcacacagcaagataccagcagggacataagaggaacatggaacacctaaaggctagtccagctgtgtcatttgggtccttctggaagcagacgcattgggcagggaaaaccttcagacaagtttgcagacctaaaacttgtaacaatagagggattgggagcaggatttggcaagagagtcttagactgcagtgcggacctggcaaaatctctgccagtctgacagggggttctagagtgaaaacacatccattaaagcagtcaggctgtggtcctctgtcatctcagtcattggtgcggggctgctaagaagagaacggtttttgactcaaaagctgaacgcaccaacttctagaggccaccttcactgtgacagaaactgcatgtttaaatactatactaacaatttataactatccggtggcttaatcaactttttattgagtttctgttgctgagaataagtcatcttttatgcgtattattacggctagtgaacactttttcttgaggtcaaagggatggtccaacatgactttaaaatatactaggacttggcacagtgtctaaaacaagtgcttggtgaatgtaaattattagtagtagttgcagtaataaccaatagtaatattccaactatcttacaccttccaaaccaaggagagattattatgttttatgtatctcttgaacaccagactcatttctagtgtactttgaagtgcccaaagattatagacacacaaatatgtctaacagaataattacagtattttttaaggagtataaaatctgtatcctcaaatattggtaatcaacaggataatcttcgtacagtggtttctgtgagcaggagataatgtctgctctactagttgcccaaatatcgcctaagtattctctttgcctaggaacacagaatgaaagcttgcatctcttgctgactttctttgccaccacagtgtcagcattttgtgtttaaaagcctatttcaggtcttgtaacatagaataaagtgactaataccttgatcctaataagattgacctatacttttagagtgtcatgaattaaactaaaaatctcaggaactatctctctctttctctctttctctctctctctctctctctctctcacacacacacacacacacacacacacacacacacaacaaacaaataaaaaacacacattttgacttgaagttttactttagcaatagacttgccaggactttcccaaccaaaagatatcaataaggttcctaacattttctaagatttaagtatcccatgctcaatttgttaaataacacattttaaaaactttattgaaatgactatatttttaaagctatgtgcattgttgtctgtttcatcaacattgacatagcagaaacaagagtactctctgctaaatagagaagaatgattaagttggagccaagtgagacaaagttatctccctctgcctacctcacaattcaaggttcccacctagggaactgatgcatccctgggtgattggacacaacatgggatcaattcagcctctactctgcctatgatttgatcaaatcatattagcaaagtgtctcttaaacatccatatatgaatattaaagagtattaaggggggcatttcttaacaatatttttatgagtatagttataagtttctaaacatttataatacgatgactaaaatatgctatttttaaattcaagtgttaaccttgccacacagaattatgacttctagggtgtaaactttaaagtgaaactgttttgaaaaaaatctgcagttaagtgtatgtgtatatatagaagaaaaggaaacttagatttactggtatcaccagtgaagcaagaatgcttagaaagatacaaatgtgtctttgggagagtctgcttaatcagatgcttaaagtaagacaagtctctgcatgagacttagaaatctcctaggagcagctggattccacactgagactcaacagagttctgggctatgctgtattttggaaaaggaaaagcgggtgctgagagctaagtagccaattactctttatagccacataaggactgaaggcaagtaggcccttccaacaagttgtattatgcgatcactggctttgcagggaatctcacgaatgtataaccttctgattgcctttttgattgaaagttccatctgagatcagggcagtgtaaccagtaataagatttcaaaaaaatcccatcactggcactgtcggaaaggctgagcatgactgaaatcctatcattgtcagtcaaaaagataaggtaacagcgggcatcactataaaagctctataaatgcacaacttaaacatgaatatcaacattaaaaagaatatatatatccttatacatatatttataaatatattcatatatataaatatgcacatatatacacaattcagttactggggataatttatagttttaatttttcatctcataatctcacgcactgccaacaaattgaaattgtggctctctgttttcatgaatctaaccttgaatttgaaagaagttgaattgagggtaaagggttttaaaagcagctttttatttgtgaacagaataatggctcataatacctgggattagaattaaatatgtcacgttgtgaggctgtacttagactttttaaatgtcattgtatttttttgtggacaaaataattgtagaatatactttgcaggaaatacttttctatattttttcaatttcaatactgttttatttgctataaaaagtgtctttgcactgttactcagccaaacagtgttgaatgtattatttgcccttgtaattattgcttcttatgataattgtagaagagcatgtctttatgatctatcatttaaaaatacatttattgtcattgtagttttagtcaacacaaatttatggattacatggtatactgttgctattgaagatattctagtcctagtattttgagcacagacctagcgttatggaggacataaaatttaaaaatttcctgacttgatggactatctgaggaaaaagaattttgtctgtcacatttattgagtatctatcagtacagaaattaagctacatggttgatacagaaagattaaatacagtagcattctcaaacttattttctttatttataaaatgtacctaatcaatctcataagaactaattgttgaattttttttttatctatggataaatactatttgagtctgggtttaagtttggttgatctgacactaaatccccttaactttcaactaaacagttatctctgtaattatgagacttttgatgataagaaatagaaactaagttatatatagtgctatggaagtactgaggaggaagtaagggaccccatatgggaagactcaagaagacgtcacggtgaaattttccaaaaagatgggaactcaagaatgggtgcaacagaaatcacagcttttccaaatactaaaagggaaaattataaaaagcaccaatggcacacttttggacattcagaaagatccagaaattaggtgcttataggaaactctaggtttgccaaattgtagtgttttatggataggaaaaatgaagttcagaaacgttataaggaattttcagggttaaattacacatcaaatatgtgagagaaacagaaattacatgctggtatttggggtcatctcctgagttgtaatgttgtaagtgtttttgtatgtattctcctccttcctttatgtgtggaagtttcatctaggtctcaaggttagtaggcatttgctggtgaaaatagtgcctttgggtactatttccccaacttgagttacctgccaccatctaattcacatcttgaatgcaagtattatttcttgcaagtatccctactaatagataatagatatttctattattatccacagattacagaagagggttgctaggaggaatatcacaagatgctgtctgaagagaaagactgtggaaaaccatggcttcaatgaactcagaggtcaggaccagaaaaggaaatgagaggtcaccaaagccaaatgttaatttcttgggatttcttctgtacatgcaaagaacttcaggccatcctatgattcctcaaaaataagaggaaaattttaacaattatgctctaagatggaccatgacaatttaggagtcattgggatcaccccccaaagccaaatgttaatttcttgggatttcttctgtacatgcaaagaacttcaggccatcctatgatccctcacaaataagaggaagattttaacaattatgctctaagatggaacatgacaatttaggagtcactgggatcaccccccccacctttccaacgttactctgctttaactacaaatatgtcgaatggttttctaatttttctttaacttaacctctaaagttcgagagctgtcatctttgtcaagtctgattgttgagtatgtgaatggatgtttttggctcaatgttagagccaaaatttataaataataattatttatacataatgatattgcaaataaactttaagaaagagctttaaacataaaaa

SEQ ID NO: 112855 - DNA, 559 bp, Homo sapiens
  Payload ID: 2083
  Gene Symbol: CDH8
  Gene Name: cadherin 8, type 2
  ENST ID: ENST00000584506
  CDS Start-End: 316-559
gaatgcgctccatcacagaaccgcgacacacagcctctacatagcgtctgagttgcaggcaggggtctcacaatcaccctattctgtacgcaagaggcccttggaataaagaggaggaaatttcaatgaaaagaaaagccaatggattgtggtcttagaaaagctgcttagatgatgtctgtttcccgtgctatagacacgtggcagagctgtaagtaaatgctcggcactgcatgatgaattggatggctgcagaccggagacaaaaaaaataattgtctcattttcgtggtgatttgcttaactggtgggaccatgccagaacggctagcggaaatgctcttggatctctggactccattaataatattatggattactcttcccccttgcatttacatggctccgatgaatcagtctcaagttttaatgagtggatcccctttggaactaaacagtctgggtgaagaacagcgaattttgaaccgctccaaaagaggctgggtttggaatcaaatgtttgtcctggaagagttttctggacctgaaccgattcttg

SEQ ID NO: 112856 - DNA, 1528 bp, Homo sapiens
  Payload ID: 2083
  Gene Symbol: CDH8
  Gene Name: cadherin 8, type 2
  ENST ID: ENST00000583382
  CDS Start-End: 252-1528
aaggctgggaaacggtaaaaaaacgtgctgccgccaacgctgatgccaacaggaaatttcaatgaaaagaaaagccaatggattgtggtcttagaaaagctgcttagatgatgtctgtttcccgtgctatagacacgtggcagagctgtaagtaaatgctcggcactgcatgatgaattggatggctgcagaccggagacaaaaaaaataattgtctcattttcgtggtgatttgcttaactggtgggaccatgccagaacggctagcggaaatgctcttggatctctggactccattaataatattatggattactcttcccccttgcatttacatggctccgatgaatcagtctcaagttttaatgagtggatcccctttggaactaaacagtctgggtgaagaacagcgaattttgaaccgctccaaaagaggctgggtttggaatcaaatgtttgtcctggaagagttttctggacctgaaccgattcttgttggccggctacacacagacctggatcctgggagcaaaaaaatcaagtatatcctatcaggtgatggagctgggaccatatttcaaataaatgatgtaactggagatatccatgctataaaaagacttgaccgggaggaaaaggctgagtataccctaacagctcaagcagtggactgggagacaagcaaacctctggagcctccttctgaatttattattaaagttcaagacatcaatgacaatgcaccagagtttcttaatggaccctatcatgctactgtgccagaaatgtccattttgggtacatctgtcactaacgtcactgcgaccgacgctgatgacccagtttatggaaacagtgcaaagttggtttatagtatattggaagggcagccttatttttccattgagcctgaaacagctattataaaaactgcccttcccaacatggacagagaagccaaggaggagtacctggttgttatccaagccaaagatatgggtggacactctggtggcctgtctgggaccacgacacttacagtgactcttactgatgttaatgacaatcctccaaaatttgcacagagcctgtatcacttctcagtaccggaagatgtggttcttggcactgcaataggaagggtgaaggccaatgatcaggatattggtgaaaatgcacagtcatcatatgatatcatcgatggagatggaacagcactttttgaaatcacttctgatgcccaggcccaggatggcattataaggctaagaaaacctctggactttgagaccaaaaaatcctatacgctaaaggtagaggcagccaatgtccatattgacccacgcttcagtggcagggggccctttaaagacacggcgacagtcaaaatcgtggttgaagatgctgatgagcctccggtcttctcttcaccgacttacctacttgaagttcatgaaaatgctgctctaaactccgtgattgggcaagtgactgctcgtgaccctgatatcacttccagtcctataag

SEQ ID NO: 112857 - DNA, 9076 bp, Homo sapiens
  Payload ID: 2083
  Gene Symbol: CDH8
  Gene Name: cadherin 8, type 2
  ENST ID: ENST00000585315
  CDS Start-End: 433-1863
agcgtcaagacaccagctgcactttgggttgcggacacccagagcccagcgcgcccgccctgcgtctccgcaccaagccctgtagctccgagaggcatgaacggaatccggaggcgcctgcctagcgagcgaggaccggtcggcgcttgccgccctcgggagctaaccccgagcacctccagccatttgtgaacctggaggcttgacattcgccagcgcagggccccacaagagaaatttcaatgaaaagaaaagccaatggattgtggtcttagaaaagctgcttagatgatgtctgtttcccgtgctatagacacgtggcagagctgtaagtaaatgctcggcactgcatgatgaattggatggctgcagaccggagacaaaaaaaataattgtctcattttcgtggtgatttgcttaactggtgggaccatgccagaacggctagcggaaatgctcttggatctctggactccattaataatattatggattactcttcccccttgcatttacatggctccgatgaatcagtctcaagttttaatgagtggatcccctttggaactaaacagtctgggtgaagaacagcgaattttgaaccgctccaaaagaggctgggtttggaatcaaatgtttgtcctggaagagttttctggacctgaaccgattcttgttggccggctacacacagacctggatcctgggagcaaaaaaatcaagtatatcctatcaggtgatggagctgggaccatatttcaaataaatgatgtaactggagatatccatgctataaaaagacttgaccgggaggaaaaggctgagtataccctaacagctcaagcagtggactgggagacaagcaaacctctggagcctccttctgaatttattattaaagttcaagacatcaatgacaatgcaccagagtttcttaatggaccctatcatgctactgtgccagaaatgtccattttgggtacatctgtcactaacgtcactgcgaccgacgctgatgacccagtttatggaaacagtgcaaagttggtttatagtatattggaagggcagccttatttttccattgagcctgaaacagctattataaaaactgcccttcccaacatggacagagaagccaaggaggagtacctggttgttatccaagccaaagatatgggtggacactctggtggcctgtctgggaccacgacacttacagtgactcttactgatgttaatgacaatcctccaaaatttgcacagagcctgtatcacttctcagtaccggaagatgtggttcttggcactgcaataggaagggtgaaggccaatgatcaggatattggtgaaaatgcacagtcatcatatgatatcatcgatggagatggaacagcactttttgaaatcacttctgatgcccaggcccaggatggcattataaggctaagaaaacctctggactttgagaccaaaaaatcctatacgctaaaggtagaggcagccaatgtccatattgacccacgcttcagtggcagggggccctttaaagacacggcgacagtcaaaatcgtggttgaagatgctgatgagcctccggtcttctcttcaccgacttacctacttgaagttcatgaaaatgctgctctaaactccgtgattgggcaagtgactgctcgtgaccctgatatcacttccagtcctataaggttttccatcgaccggcacactgacctggagaggcagttcaacattaatgcagacgatgggaagataacgctggcaacaccacttgacagagaattaagtgtatggcacaacataacaatcattgctactgaaattagtcattcaaactgttagcgccatggacaaagatgatcccaaaaacggacattatttcttatacagtctccttccagaaatggtcaacaatccgaatttcaccatcaagaaaaatgaagataattccctcagtattttggcaaagcataatggattcaaccgccagaagcaagaagtctatcttttaccaatcataatcagtgatagtggaaatcctccactgagcagcactagcaccttgacaatcagggtctgtggctgcagcaatgacggtgtcgtccagtcttgcaatgtcgaagcttatgtccttccaattggactcagtatgggcgccttaattgccatattagcatgcatcattttgctgttagtcatcgtggtgctgtttgtaactctacggcggcataaaaatgaaccattaattatcaaagatgatgaagacgttcgagaaaacatcattcgctacgatgatgaaggaggaggggaggaggacacagaggcttttgacattgcaactttacaaaatccagatggaattaatggatttttaccccgtaaggatattaaaccagatttgcagtttatgccaaggcaagggcttgctccagttccaaatggtgttgatgtcgatgaatttataaatgtaaggctgcatgaggcagataatgatcccacggccccgccatatgactccattcagatatatggctatgaaggccgagggtcagtggctggctccctcagctccttggagtccaccacatcagactcagaccagaattttgactacctcagtgactggggtccccgctttaagagactgggcgaactctactctgttggtgaaagtgacaaagaaacttgacagtggattataaataaatcactggaactgagcattctgtaatattctagggtcactccccttagatacaaccaatgtggctatttgttttagaggcaagtttagcaccagtcatctataaactcaaccacattttaatgttgaaccaaaaaaagataataaaataaaaaagtatatgttaggaggttataaatcttgtggagtgtgaattaagtatgtggagtgtctagaagtccttggatatttgatatttacctgaccaccacagacaaagattgggatcctggctaatccttagataaatggtttaaatagaggaaaaaatcataattaaaaggtgctttcttagaaaaaaaaatacggacctgcaaggaatctgctgctgatatgtgtcttctgcaaggatttttatgaatgcaaatggttttttccccttcaccaataaggatcccgccacaaatgataaagcaatacttggtctgctgtacattataactttttggagttttgagaggcctcctagattatacagtacggtgaccacacattgtacataattgttggccccactcactagagactgaatagcatctttaaatattgtgtcgagccttaaaatattcacatgttcgtaatccattccagggtggggcttgccaattcagtggtgggaggagagaaatcccattcaaacatgcttgttttctagaagcaggattcctcgttccctcctcttcatcttcttccacaaggacacaaagataaactgtatcacacagtggactacataagagacagatggttttattgctagcgcgtgaatttatttgtttaatcctcgaaataaatattttattgatgtccattaatgcttttatttattaaggtcggtaatctatagattaaggggatatatgggaaaaaactaaattatatccattaataatcctttagattgttttatataaatatatatacaatgaatgtttaatacatgtacattttgatgagatgagtatggcaggcaatattatcgaaaggagagctaatagtctctttagagtagaaagtgttattgtaactggagatggcaggaacagcatcttcccagacaaacttttggactgttttctattttgttcataatcctagtatttggtgtttttactacaagcacaaacatcctaaagtatattgattcctgtgaatatttaaactctagacttttagatacctacatcatgccctgcccaataaacatgcttcaatttacccccacagttttagagcaggaactgatttgtacataatttcactgtttacgtttttagcactcctatccctgatcttcatggtgatgcacagaatgtcttagactccaaaaaggaacagcactagaagatgtgagcatatttaatttgtaatgcaaacctgccatttaggagtagaaaatgtatgataaaactcaagtattacatgcagatcattttaattttctactttgctttaatgcaatattgtttattcactccatgtattgtattcagagaaactcctgtattgtttcctactttgtgaaatatatttttataaatacctttgttgtcattaatttttttttcaatcagtggaagatctattaacagaatcatcaactcaaactaaaattctagaatactcaaccaaatcatcccaagggtcacttttgtttgtaagactctttattatagagaaacagagaagagaaatggcttgccagtgatcacacagcaagataccagcagggacataagaggaacatggaacacctaaaggctagtccagctgtgtcatttgggtccttctggaagcagacgcattgggcagggaaaaccttcagacaagtttgcagacctaaaacttgtaacaatagagggattgggagcaggatttggcaagagagtcttagactgcagtgcggacctggcaaaatctctgccagtctgacagggggttctagagtgaaaacacatccattaaagcagtcaggctgtggtcctctgtcatctcagtcattggtgcggggctgctaagaagagaacggtttttgactcaaaagctgaacgcaccaacttctagaggccaccttcactgtgacagaaactgcatgtttaaatactatactaacaatttataactatccggtggcttaatcaactttttattgagtttctgttgctgagaataagtcatcttttatgcgtattattacggctagtgaacactttttcttgaggtcaaagggatggtccaacatgactttaaaatatactaggacttggcacagtgtctaaaacaagtgcttggtgaatgtaaattattagtagtagttgcagtaataaccaatagtaatattccaactatcttacaccttccaaaccaaggagagattattatgttttatgtatctcttgaacaccagactcatttctagtgtactttgaagtgcccaaagattatagacacacaaatatgtctaacagaataattacagtattttttaaggagtataaaatctgtatcctcaaatattggtaatcaacaggataatcttcgtacagtggtttctgtgagcaggagataatgtctgctctactagttgcccaaatatcgcctaagtattctctttgcctaggaacacagaatgaaagcttgcatctcttgctgactttctttgccaccacagtgtcagcattttgtgtttaaaagcctatttcaggtcttgtaacatagaataaagtgactaataccttgatcctaataagattgacctatacttttagagtgtcatgaattaaactaaaaatctcaggaactatctctctctttctctctttctctctctctctctctctctctctcacacacacacacacacacacacacacacacacacaacaaacaaataaaaaacacacattttgacttgaagttttactttagcaatagacttgccaggactttcccaaccaaaagatatcaataaggttcctaacattttctaagatttaagtatcccatgctcaatttgttaaataacacattttaaaaactttattgaaatgactatatttttaaagctatgtgcattgttgtctgtttcatcaacattgacatagcagaaacaagagtactctctgctaaatagagaagaatgattaagttggagccaagtgagacaaagttatctccctctgcctacctcacaattcaaggttcccacctagggaactgatgcatccctgggtgattggacacaacatgggatcaattcagcctctactctgcctatgatttgatcaaatcatattagcaaagtgtctcttaaacatccatatatgaatattaaagagtattaaggggggcatttcttaacaatatttttatgagtatagttataagtttctaaacatttataatacgatgactaaaatatgctatttttaaattcaagtgttaaccttgccacacagaattatgacttctagggtgtaaactttaaagtgaaactgttttgaaaaaaatctgcagttaagtgtatgtgtatatatagaagaaaaggaaacttagatttactggtatcaccagtgaagcaagaatgcttagaaagatacaaatgtgtctttgggagagtctgcttaatcagatgcttaaagtaagacaagtctctgcatgagacttagaaatctcctaggagcagctggattccacactgagactcaacagagttctgggctatgctgtattttggaaaaggaaaagcgggtgctgagagctaagtagccaattactctttatagccacataaggactgaaggcaagtaggcccttccaacaagttgtattatgcgatcactggctttgcagggaatctcacgaatgtataaccttctgattgcctttttgattgaaagttccatctgagatcagggcagtgtaaccagtaataagatttcaaaaaaatcccatcactggcactgtcggaaaggctgagcatgactgaaatcctatcattgtcagtcaaaaagataaggtaacagcgggcatcactataaaagctctataaatgcacaacttaaacatgaatatcaacattaaaaagaatatatatatccttatacatatatttataaatatattcatatatataaatatgcacatatatacacaattcagttactggggataatttatagttttaatttttcatctcataatctcacgcactgccaacaaattgaaattgtggctctctgttttcatgaatctaaccttgaatttgaaagaagttgaattgagggtaaagggttttaaaagcagctttttatttgtgaacagaataatggctcataatacctgggattagaattaaatatgtcacgttgtgaggctgtacttagactttttaaatgtcattgtatttttttgtggacaaaataattgtagaatatactttgcaggaaatacttttctatattttttcaatttcaatactgttttatttgctataaaaagtgtctttgcactgttactcagccaaacagtgttgaatgtattatttgcccttgtaattattgcttcttatgataattgtagaagagcatgtctttatgatctatcatttaaaaatacatttattgtcattgtagttttagtcaacacaaatttatggattacatggtatactgttgctattgaagatattctagtcctagtattttgagcacagacctagcgttatggaggacataaaatttaaaaatttcctgacttgatggactatctgaggaaaaagaattttgtctgtcacatttattgagtatctatcagtacagaaattaagctacatggttgatacagaaagattaaatacagtagcattctcaaacttattttctttatttataaaatgtacctaatcaatctcataagaactaattgttgaattttttttttatctatggataaatactatttgagtctgggtttaagtttggttgatctgacactaaatccccttaactttcaactaaacagttatctctgtaattatgagacttttgatgataagaaatagaaactaagttatatatagtgctatggaagtactgaggaggaagtaagggaccccatatgggaagactcaagaagacgtcacggtgaaattttccaaaaagatgggaactcaagaatgggtgcaacagaaatcacagcttttccaaatactaaaagggaaaattataaaaagcaccaatggcacacttttggacattcagaaagatccagaaattaggtgcttataggaaactctaggtttgccaaattgtagtgttttatggataggaaaaatgaagttcagaaacgttataaggaattttcagggttaaattacacatcaaatatgtgagagaaacagaaattacatgctggtatttggggtcatctcctgagttgtaatgttgtaagtgtttttgtatgtattctcctccttcctttatgtgtggaagtttcatctaggtctcaaggttagtaggcatttgctggtgaaaatagtgcctttgggtactatttccccaacttgagttacctgccaccatctaattcacatcttgaatgcaagtattatttcttgcaagtatccctactaatagataatagatatttctattattatccacagattacagaagagggttgctaggaggaatatcacaagatgctgtctgaagagaaagactgtggaaaaccatggcttcaatgaactcagaggtcaggaccagaaaaggaaatgagaggtcaccaaagccaaatgttaatttcttgggatttcttctgtacatgcaaagaacttcaggccatcctatgattcctcaaaaataagaggaaaattttaacaattatgctctaagatggaccatgacaatttaggagtcattgggatcaccccccaaagccaaatgttaatttcttgggatttcttctgtacatgcaaagaacttcaggccatcctatgatccctcacaaataagaggaagattttaacaattatgctctaagatggaacatgacaatttaggagtcactgggatcaccccccccacctttccaacgttactctgctttaactacaaatatgtcgaatggttttctaatttttctttaacttaacctctaaagttcgagagctgtcatctttgtcaagtctgattgttgagtatgtgaatggatgtttttggctcaatgttagagccaaaatttataaataataattatttatacataatgatattgcaaataaactttaagaaagagctttaaacataaaaa

SEQ ID NO: 112858 - DNA, 3986 bp, Homo sapiens
  Payload ID: 2083
  Gene Symbol: CDH8
  Gene Name: cadherin 8, type 2
  ENST ID: ENST00000584337
  CDS Start-End: 523-2121
ggagcgctcagcccagaattagtggatttatttggaatctccctgcctcctccaagctccgccgccgccgccggcttgtgcatagacggtagcgtcaagacaccagctgcactttgggttgcggacacccagagcccagcgcgcccgccctgcgtctccgcaccaagccctgtagctccgagaggcatgaacggaatccggaggcgcctgcctagcgagcgaggaccggtcggcgcttgccgccctcgggagctaaccccgagcacctccagccatttgtgaacctggaggcttgacattcgccagcgcagggccccacaagagaaatttcaatgaaaagaaaagccaatggattgtggtcttagaaaagctgcttagatgatgtctgtttcccgtgctatagacacgtggcagagctgtaagtaaatgctcggcactgcatgatgaattggatggctgcagaccggagacaaaaaaaataattgtctcattttcgtggtgatttgcttaactggtgggaccatgccagaacggctagcggaaatgctcttggatctctggactccattaataatattatggattactcttcccccttgcatttacatggctccgatgaatcagtctcaagttttaatgagtggatcccctttggaactaaacagtctgggtgaagaacagcgaattttgaaccgctccaaaagaggctgggtttggaatcaaatgtttgtcctggaagagttttctggacctgaaccgattcttgttggccggctacacacagacctggatcctgggagcaaaaaaatcaagtatatcctatcaggtgatggagctgggaccatatttcaaataaatgatgtaactggagatatccatgctataaaaagacttgaccgggaggaaaaggctgagtataccctaacagctcaagcagtggactgggagacaagcaaacctctggagcctccttctgaatttattattaaagttcaagacatcaatgacaatgcaccagagtttcttaatggaccctatcatgctactgtgccagaaatgtccattttgggtacatctgtcactaacgtcactgcgaccgacgctgatgacccagtttatggaaacagtgcaaagttggtttatagtatattggaagggcagccttatttttccattgagcctgaaacagctattataaaaactgcccttcccaacatggacagagaagccaaggaggagtacctggttgttatccaagccaaagatatgggtggacactctggtggcctgtctgggaccacgacacttacagtgactcttactgatgttaatgacaatcctccaaaatttgcacagagcctgtatcacttctcagtaccggaagatgtggttcttggcactgcaataggaagggtgaaggccaatgatcaggatattggtgaaaatgcacagtcatcatatgatatcatcgatggagatggaacagcactttttgaaatcacttctgatgcccaggcccaggatggcattataaggctaagaaaacctctggactttgagaccaaaaaatcctatacgctaaaggtagaggcagccaatgtccatattgacccacgcttcagtggcagggggccctttaaagacacggcgacagtcaaaatcgtggttgaagatgctgatgagcctccggtcttctcttcaccgacttacctacttgaagttcatgaaaatgctgctctaaactccgtgattgggcaagtgactgctcgtgaccctgatatcacttccagtcctataaggttttccatcgaccggcacactgacctggagaggcagttcaacattaatgcagacgatgggaagataacgctggcaacaccacttgacagagaattaagtgtatggcacaacataacaatcattgctactgaaattaggaaccacagtcagatatcacgagtacctgttgctattaaagtgctggatgtcaatgacaacgcccctgaattcgcatccgaatatgaggcatttttatgtgaaaatggaaaacccggccaagtaaatatctccatgttgttaatgctgaatatgtttgtatacaactgtctcatatttgactaacctgcattatattgtgcatttgcatcatttatgatctgcaaagtctcaggcaagaaacacatccaaatgggaacagagagggaattttttttctccatcagatgttatttctcttcctacttatgaccaaattggctcctaaagtggaacaacctgctgtgccacaaacccagagccaaatcactgtcttaaaatatcttgggatatggatgatagcaggagatgtcttagagtgacgggggctgaatttttactttcaaatgacaagaagcaaggtaaaacctcgtggagaggagacatttgtttcacagcaaacatatgaataccaaataatagtgaaacccaagaaggccagtggtttatagaaagttgtaggaagtgaatattgaaatctgtaaatatgtaaatatatttagataaacataagatgaacaacacgttttacatgtgtgtattagtagaacattttttgtgcctcatattgcatagatgggtcaatgaaaacagaaaaaaaagaaacataaagaaagtgagagagagggagaaggaaagggagagggagagggaatgggaatgggagtgggaggaagggagggagggagagagaaaaagagggaggaagaaagggaggaaaatagttaaacaagcaagatgaacagaaacaaatatctgctatactctgaatgtcaaaatggaaatagcctgtgtaaagttctgcaaaaccataaatgtaatagatttattttaacaaggtaccaaagtactgtatgtttaagaaatttatcatttttcaacttcctaatttatttctggatggtgacattttaatttaaataaacagcagctgacagtatgacactggagttgttaatccaactattcttgtgcctcatgtgggtgttaggaattaaacttactatttgctaagcagcttacctgacaagagtcagattttttccccctaaagaaaggactggcactgtagctgtatgctttattataaatgatcaatttgttaccctcctataaaacagtgggcatttctccgtagactactctcatgtatctggagaattagcattgtttccatctaccagaataagacacaccacaccacacacacacacacgcacacacacacacacgttaaagctaaaattctaataataaaactgattaacttttaaacatctagccatgttctcatcaaagcattcagctttagtagagatataggtttatttttataatattctaacattagcttaaatgtttcctaattttatcatgtggaattaccccctatcaatcacacgttttgagcatcttcatttgtgatcctttgagaagggagtgtgtatatgtttatatatacacatatcaatacatatcatttacctaaattggtagattgagttgtcagagagagtttgatcaaaatatggcaggttgtttcaaagatatggttgttgtgtggaccagatcattgctgagataatgtagccaaatcacagactggtaagctagactttttcaatcacatagagtctgtaaaatacttcagaatttaaataaaactccattgctcatgcaaaactcatcagataagttcaaggagtcaatgacattgatatttcaaaaactcaacattggcttcacttgcgttattgacaagcatgtttcttggatctctgggaatttgtaggtttgccctgtggattttgactgttttcaaagttctaatgatttctcagtcgttcttcttaacttcagaaaaaaaaatgcattgttttctcatctttcctatgcaaaaccaaaataaaaaattgattctttgttttatgatttttgcaaatcacaatgaa

SEQ ID NO: 112859 - DNA, 3079 bp, Homo sapiens
  Payload ID: 2084
  Gene Symbol: CDH9
  Gene Name: cadherin 9, type 2 (T1-cadherin)
  Uniprot ID: Q9ULB4
  ENST ID: ENST00000231021
  CDS Start-End: 174-2543
actgagatgcatgaagattcagctgtgaagatactataaaaagggaagagaaggaccgagacagaagcaacaacggaactgtcagtgcggagtagggctaaactcagttccattgttaagcaaggaaaaacaaacaatacattgaatttgacaacccactgaagttgcagataatgaggacttaccattatataccattattcatctggacctatatgttccatacagttgacaccatcctattacaagaaaaacctaacagttatttatcaagcaaaaagatagcgggtctgacaaaagatgacggtaaaatgctacgtcgcaccaagcgtggctggatgtggaatcagttcttcttattggaagagtacacaggtactgacacacaatatgtaggcaagcttcacactgaccaagataaaggagatggaaatttaaaatacatactaacaggagatggggctggcagtctatttgttatagatgaaaatacaggagacattcatgctgcaaagaaactagacagagaagaaaaatctctgtacattcttcgtgccaaggctatagacagaaaaactgggcggcaggtggaaccggaatcggaatttatcattaaaatacatgatatcaatgacaatgagccaaaatttacaaaagacttatacactgccagtgttcctgaaatgtctggagtcggtacatctgttatacaagtaactgcaacagatgcagatgacgccaactatggaaatagtgccaaagtggtctatagcatattgcaaggacagccatatttttcagtggacccagaatcaggcataataaaaactgcattaccagacatgagcagagaaaatagagagcagtaccaggttgttatacaggccaaagacatgggtggccagatgggaggcctttctggaaccaccacagtgaacatcacgctgacagatgtcaacaacaaccctcctcgatttccccagagtacgtatcaatttaattctcctgagtctgtacctcttggaactcatcttggaaggataaaagccaatgaccctgacgtgggggaaaatgcagaaatggagtatagcattgctgaaggagatggtgcagacatgttcgatgtcatcactgacaaggatacacaggaagggattataactgtcaaacagaatttagattttgaaaatcaaatgctctatactttaagagtggatgcaagtaacactcaccctgatccacgattcttacacctgggacctttcaaagatacagctgtggtcaaaatatctgtggaagatatagatgagcctcctgtgttcactaaagtctcttacttgatagaagtagatgaagatgtaaaggagggcagtatcattggacaggttacagcatacgatccagatgccaggaacaatttaataaagtactctgttgatcggcatactgatatggaccgtatttttggtattcactcagaaaatggttctattttcactttgaaagcccttgaccgggaatcatctccttggcataacatcactgttacagccacagaaataaataacccaaaacaaagtagccacatccctgtcttcatcagaattctagatataaatgaccatgctccggaatttgccatgtattatgaaacatttgtttgtgaaaatgcaaaacctgggcagttgattcagactgtcagtgtcatggataaggatgaccctccccgaggtcacaaattcttttttgaaccagtgccagaatttactctcaatccgaatttcaccattgtagataataaagataatacagcaggaatcatgactcggaaagatggctacagtcgcaacaaaatgagcacctacttattgccgattttaatctttgacaacgattatccaattcaaagcagcactggtacactcactatccgtgtgtgtgcctgcgataatcaaggaaacatgcaatcctgcaccgcagaagccctgatcctttcagccggcctgagcacgggagctctcgttgcgattctactctgtgtcctcatactgcttattttagtcgtgttgtttgctgcattgaagaggcaaagaaaaaaggaacctctgataatttcaaaagacgatgtccgggacaacattgtgacctacaacgatgaaggcggcggggaagaagatacccaagcttttgacattggcacattaaggaatccagaggcaagagaagacagtaaacttagacgggatgtaatgcctgaaactatttttcagataaggaggactgtgcctctgtgggaaaatattgatgtacaagattttatccatcgaagattaaaagaaaacgacgcagacccaagtgcacctccatatgattcgctggcaacgtatgcctatgaagggaatgattccatagcagattcgctcagttctttggaatctctcacagctgattgtaaccaagattatgattacctcagtgactgggggcctcgtttcaaaaaacttgccgatatgtatgggggtgatgatagtgaccgagactaagaggattgtttgacttaatcaatattagtggaagtactgtctatgttattagattgagtggcctgcattctcttcctgggaggaaatctttcaaaaattgaagttacaaacaatacgtagatgttgtcaagtagggatttgcttaatcagtaagtctttgtgaatgaatacgaatgatacagatttttaaaaaagtaataaccagttcaccctctttgcctaacaatctcggaaggaaaatatatcacatcaataatcaataaaaataagtaaaaggctttttgtgccttttcttaggtataataatttataaatgttttcttaactgactttcagtcacctttacaattaaactaaatattgtgcaaccgctttgtaaattaatatgaagaagatatatccctaatgaaataggaatgactattactgccatatttatttagttgaagaatgtctttgtgttaattcattcatatttttataaatgtatatttatatttttgtatttttatgaaataaactagtatttataaaac

SEQ ID NO: 112860 - DNA, 532 bp, Homo sapiens
  Payload ID: 2084
  Gene Symbol: CDH9
  Gene Name: cadherin 9, type 2 (T1-cadherin)
  ENST ID: ENST00000511822
  CDS Start-End: 288-532
gagatgcatgaagattcagctgtgaagatactataaaaagggaagagaaggaccgagacagaagcaacaacggaactgtcagtgcggagtagggctaaactcagttccattgttaagcaaggtctcattctgtcgcccaggctggagtgtagtggcaggatcttggctcactgcaacgtctgcctcttgggttcaagtgattattgtgattcaacctcccaagtatctgggactacaggaaaaacaaacaatacattgaatttgacaacccactgaagttgcagataatgaggacttaccattatataccattattcatctggacctatatgttccatacagttgacaccatcctattacaagaaaaacctaacagttatttatcaagcaaaaagatagcgggtctgacaaaagatgacggtaaaatgctacgtcgcaccaagcgtggctggatgtggaatcagttcttcttattggaagagtacacaggtactgacacacaatatgtaggcaagcttcacactgaccaaga

SEQ ID NO: 112861 - DNA, 556 bp, Homo sapiens
  Payload ID: 2084
  Gene Symbol: CDH9
  Gene Name: cadherin 9, type 2 (T1-cadherin)
  ENST ID: ENST00000513289
  CDS Start-End: 159-556
agacttaactggggaagcctctattgtccctagcatttaccctattgtgtccggaattggtgggttcttggtctcactgacttcaagaacgaagccgcgcaccctcacggaaaaacaaacaatacattgaatttgacaacccactgaagttgcagataatgaggacttaccattatataccattattcatctggacctatatgttccatacagttgacaccatcctattacaagaaaaacctaacagttatttatcaagcaaaaagatagcgggtctgacaaaagatgacggtaaaatgctacgtcgcaccaagcgtggctggatgtggaatcagttcttcttattggaagagtacacaggtactgacacacaatatgtaggcaagcttcacactgaccaagataaaggagatggaaatttaaaatacatactaacaggagatggggctggcagtctatttgttatagatgaaaatacaggagacattcatgctgcaaagaaactagacagagaagaaaaatctctgtacattcttcgtgccaaggctatagacag

SEQ ID NO: 112862 - DNA, 11389 bp, Homo sapiens
  Payload ID: 2085
  Gene Symbol: CELSR1
  Gene Name: cadherin, EGF LAG seven-pass G-type receptor 1
  Uniprot ID: Q9NYQ6
  ENST ID: ENST00000262738
  CDS Start-End: 1-9045
atggcgccgccgccgccgcccgtgctgcccgtgctgctgctcctggccgccgccgccgccctgccggcgatggggctgcgagcggccgcctgggagccgcgcgtacccggcgggacccgcgccttcgccctccggcccggctgtacctacgcggtgggcgccgcttgcacgccccgggcgccgcgggagctgctggacgtgggccgcgatgggcggctggcaggacgtcggcgcgtctcgggcgcggggcgcccgctgccgctgcaagtccgcttggtggcccgcagtgccccgacggcgctgagccgccgcctgcgggcgcgcacgcaccttcccggctgcggagcccgtgcccggctctgcggaaccggtgcccggctctgcggggcgctctgcttccccgtccccggcggctgcgcggccgcgcagcattcggcgctcgcagctccgaccaccttacccgcctgccgctgcccgccgcgccccaggccccgctgtcccggccgtcccatctgcctgccgccgggcggctcggtccgcctgcgtctgctgtgcgccctgcggcgcgcggctggcgccgtccgggtgggactggcgctggaggccgccaccgcggggacgccctccgcgtcgccatccccatcgccgcccctgccgccgaacttgcccgaagcccgggcggggccggcgcgacgggcccggcggggcacgagcggcagagggagcctgaagtttccgatgcccaactaccaggtggcgttgtttgagaacgaaccggcgggcaccctcatcctccagctgcacgcgcactacaccatcgagggcgaggaggagcgcgtgagctattacatggaggggctgttcgacgagcgctcccggggctacttccgaatcgactctgccacgggcgccgtgagcacggacagcgtactggaccgcgagaccaaggagacgcacgtcctcagggtgaaagccgtggactacagtacgccgccgcgctcggccaccacctacatcactgtcttggtcaaagacaccaacgaccacagcccggtcttcgagcagtcggagtaccgcgagcgcgtgcgggagaacctggaggtgggctacgaggtgctgaccatccgcgccagcgaccgcgactcgcccatcaacgccaacttgcgttaccgcgtgttggggggcgcgtgggacgtcttccagctcaacgagagctctggcgtggtgagcacacgggcggtgctggaccgggaggaggcggccgagtaccagctcctggtggaggccaacgaccaggggcgcaatccgggcccgctcagtgccacggccaccgtgtacatcgaggtggaggacgagaacgacaactacccccagttcagcgagcagaactacgtggtccaggtgcccgaggacgtggggctcaacacggctgtgctgcgagtgcaggccacggaccgggaccagggccagaacgcggccattcactacagcatcctcagcgggaacgtggccggccagttctacctgcactcgctgagcgggatcctggatgtgatcaaccccttggatttcgaggatgtccagaaatactcgctgagcattaaggcccaggatgggggccggcccccgctcatcaattcttcaggggtggtgtctgtgcaggtgctggatgtcaacgacaacgagcctatctttgtgagcagccccttccaggccacggtgctggagaatgtgcccctgggctaccccgtggtgcacattcaggcggtggacgcggactctggagagaacgcccggctgcactatcgcctggtggacacggcctccacctttctggggggcggcagcgctgggcctaagaatcctgcccccacccctgacttccccttccagatccacaacagctccggttggatcacagtgtgtgccgagctggaccgcgaggaggtggagcactacagcttcggggtggaggcggtggaccacggctcgccccccatgagctcctccaccagcgtgtccatcacggtgctggacgtgaatgacaacgacccggtgttcacgcagcccacctacgagcttcgtctgaatgaggatgcggccgtggggagcagcgtgctgaccctgcaggcccgcgaccgtgacgccaacagtgtgattacctaccagctcacaggcggcaacacccggaaccgctttgcactcagcagccagagagggggcggcctcatcaccctggcgctacctctggactacaagcaggagcagcagtacgtgctggcggtgacagcatccgacggcacacggtcgcacactgcgcatgtcctaatcaacgtcactgatgccaacacccacaggcctgtctttcagagctcccattacacagtgagtgtcagtgaggacaggcctgtgggcacctccattgctaccctcagtgccaacgatgaggacacaggagagaatgcccgcatcacctacgtgattcaggaccccgtgccgcagttccgcattgaccccgacagtggcaccatgtacaccatgatggagctggactatgagaaccaggtcgcctacacgctgaccatcatggcccaggacaacggcatcccgcagaaatcagacaccaccaccctagagatcctcatcctcgatgccaatgacaatgcaccccagttcctgtgggatttctaccagggttccatctttgaggatgctccaccctcgaccagcatcctccaggtctctgccacggaccgggactcaggtcccaatgggcgtctgctgtacaccttccagggtggggacgacggcgatggggacttctacatcgagcccacgtccggtgtgattcgcacccagcgccggctggaccgggagaatgtggccgtgtacaacctttgggctctggctgtggatcggggcagtcccactccccttagcgcctcggtagaaatccaggtgaccatcttggacattaatgacaatgcccccatgtttgagaaggacgaactggagctgtttgttgaggagaacaacccagtggggtcggtggtggcaaagattcgtgctaacgaccctgatgaaggccctaatgcccagatcatgtatcagattgtggaaggggacatgcggcatttcttccagctggacctgctcaacggggacctgcgtgccatggtggagctggactttgaggtccggcgggagtatgtgctggtggtgcaggccacgtcggctccgctggtgagccgagccacggtgcacatccttctcgtggaccagaatgacaacccgcctgtgctgcccgacttccagatcctcttcaacaactatgtcaccaacaagtccaacagtttccccaccggcgtgatcggctgcatcccggcccatgaccccgacgtgtcagacagcctcaactacaccttcgtgcagggcaacgagctgcgcctgttgctgctggaccccgccacgggcgaactgcagctcagccgcgacctggacaacaaccggccgctggaggcgctcatggaggtgtctgtgtctgatggcatccacagcgtcacggccttctgcaccctgcgtgtcaccatcatcacggacgacatgctgaccaacagcatcactgtccgcctggagaacatgtcccaggagaagttcctgtccccgctgctggccctcttcgtggagggggtggccgccgtgctgtccaccaccaaggacgacgtcttcgtcttcaacgtccagaacgacaccgacgtcagctccaacatcctgaacgtgaccttctcggcgctgctgcctggcggcgtccgcggccagttcttcccgtcggaggacctgcaggagcagatctacctgaatcggacgctgctgaccaccatctccacgcagcgcgtgctgcccttcgacgacaacatctgcctgcgcgagccctgcgagaactacatgaagtgcgtgtccgttctgcgattcgacagctccgcgcccttcctcagctccaccaccgtgctcttccggcccatccaccccatcaacggcctgcgctgccgctgcccgcccggcttcaccggcgactactgcgagacggagatcgacctctgctactccgacccgtgcggcgccaacggccgctgccgcagccgcgagggcggctacacctgcgagtgcttcgaggacttcactggagagcactgtgaggtggatgcccgctcaggccgctgtgccaacggggtgtgcaagaacgggggcacctgcgtgaacctgctcatcggcggcttccactgcgtgtgtcctcctggcgagtatgagaggccctactgtgaggtgaccaccaggagcttcccgccccagtccttcgtcaccttccggggcctgagacagcgcttccacttcaccatctccctcacgtttgccactcaggaaaggaacggcttgcttctctacaacggccgcttcaatgagaagcacgacttcatcgccctggagatcgtggacgagcaggtgcagctcaccttctctgcaggcgagacaacaacgaccgtggcaccgaaggttcccagtggtgtgagtgacgggcggtggcactctgtgcaggtgcagtactacaacaagcccaatattggccacctgggcctgccccatgggccgtccggggaaaagatggccgtggtgacagtggatgattgtgacacaaccatggctgtgcgctttggaaaggacatcgggaactacagctgcgctgcccagggcactcagaccggctccaagaagtccctggatctgaccggccctctactcctggggggtgtccccaacctgccagaagacttcccagtgcacaaccggcagttcgtgggctgcatgcggaacctgtcagtcgacggcaaaaatgtggacatggccggattcatcgccaacaatggcacccgggaaggctgcgctgctcggaggaacttctgcgatgggaggcggtgtcagaatggaggcacctgtgtcaacaggtggaatatgtatctgtgtgagtgtccactccgattcggcgggaagaactgtgagcaagccatgcctcacccccagctcttcagcggtgagagcgtcgtgtcctggagtgacctgaacatcatcatctctgtgccctggtacctggggctcatgttccggacccggaaggaggacagcgttctgatggaggccaccagtggtgggcccaccagctttcgcctccagatcctgaacaactacctccagtttgaggtgtcccacggcccctccgatgtggagtccgtgatgctgtccgggttgcgggtgaccgacggggagtggcaccacctgctgatcgagctgaagaatgttaaggaggacagtgagatgaagcacctggtcaccatgaccttggactatgggatggaccagaacaaggcagatatcgggggcatgcttcccgggctgacggtaaggagcgtggtggtcggaggcgcctctgaagacaaggtctccgtgcgccgtggattccgaggctgcatgcagggagtgaggatgggggggacgcccaccaacgtcgccaccctgaacatgaacaacgcactcaaggtcagggtgaaggacggctgtgatgtggacgacccctgtacctcgagcccctgtccccccaatagccgctgccacgacgcctgggaggactacagctgcgtctgtgacaaagggtaccttggaataaactgtgtggatgcctgtcacctgaacccctgcgagaacatgggggcctgcgtgcgctcccccggctccccgcagggctacgtgtgcgagtgtgggcccagtcactacgggccgtactgtgagaacaaactcgaccttccgtgccccagaggctggtgggggaaccccgtctgtggaccctgccactgtgccgtcagcaaaggctttgatcccgactgtaataagaccaacggccagtgccaatgcaaggagaattactacaagctcctagcccaggacacctgtctgccctgcgactgcttcccccatggctcccacagccgcacttgcgacatggccaccgggcagtgtgcctgcaagcccggcgtcatcggccgccagtgcaaccgctgcgacaacccgtttgccgaggtcaccacgctcggctgtgaagtgatctacaatggctgtcccaaagcatttgaggccggcatctggtggccacagaccaagttcgggcagccggctgcggtgccatgccctaagggatccgttggaaatgcggtccgacactgcagcggggagaagggctggctgcccccagagctctttaactgtaccaccatctccttcgtggacctcagggccatgaatgagaagctgagccgcaatgagacgcaggtggacggcgccagggccctgcagctggtgagggcgctgcgcagtgctacacagcacacgggcacgctctttggcaatgacgtgcgcacggcctaccagctgctgggccacgtccttcagcacgagagctggcagcagggcttcgacctggcagccacgcaggacgccgactttcacgaggacgtcatccactcgggcagcgccctcctggccccagccaccagggcggcgtgggagcagatccagcggagcgagggcggcacggcacagctgctccggcgcctcgagggctacttcagcaacgtggcacgcaacgtgcggcggacgtacctgcggcccttcgtcatcgtcaccgccaacatgattcttgctgtcgacatctttgacaagttcaactttacgggagccagggtcccgcgattcgacaccatccatgaagagttccccagggagctggagtcctccgtctccttcccagccgacttcttcagaccacctgaagaaaaagaaggccccctgctgaggccggctggccggaggaccaccccgcagaccacgcgcccggggcctggcaccgagagggaggccccgatcagcaggcggaggcgacaccctgatgacgctggccagttcgccgtcgctctggtcatcatttaccgcaccctggggcagctcctgcccgagcgctacgaccccgaccgtcgcagcctccggttgcctcaccggcccatcattaataccccgatggtgagcacgctggtgtacagcgagggggctccgctcccgagacccctggagaggcccgtcctggtggagttcgccctgctggaggtggaggagcgaaccaagcctgtctgcgtgttctggaaccactccctggccgttggtgggacgggagggtggtctgcccggggctgcgagctcctgtccaggaaccggacacatgtcgcctgccagtgcagccacacagccagctttgcggtgctcatggatatctccaggcgtgagaacggggaggtcctgcctctgaagattgtcacctatgccgctgtgtccttgtcactggcagccctgctggtggccttcgtcctcctgagcctggtccgcatgctgcgctccaacctgcacagcattcacaagcacctcgccgtggcgctcttcctctctcagctggtgttcgtgattgggatcaaccagacggaaaacccgtttctgtgcacagtggttgccatcctcctccactacatctacatgagcacctttgcctggaccctcgtggagagcctgcatgtctaccgcatgctgaccgaggtgcgcaacatcgacacggggcccatgcggttctactacgtcgtgggctggggcatcccggccattgtcacaggactggcggtcggcctggacccccagggctacgggaaccccgacttctgctggctgtcgcttcaagacaccctgatttggagctttgcggggcccatcggagctgttataatcatcaacacagtcacttctgtcctatctgcaaaggtttcctgccaaagaaagcaccattattatgggaaaaaagggatcgtctccctgctgaggaccgcattcctcctgctgctgctcatcagcgccacctggctgctggggctgctggctgtgaaccgcgatgcactgagctttcactacctcttcgccatcttcagcggcttacagggccccttcgtcctccttttccactgcgtgctcaaccaggaggtccggaagcacctgaagggcgtgctcggcgggaggaagctgcacctggaggactccgccaccaccagggccaccctgctgacgcgctccctcaactgcaacaccaccttcggtgacgggcctgacatgctgcgcacagacttgggcgagtccaccgcctcgctggacagcatcgtcagggatgaagggatccagaagctcggcgtgtcctctgggctggtgaggggcagccacggagagccagacgcgtccctcatgcccaggagctgcaaggatccccctggccacgattccgactcagatagcgagctgtccctggatgagcagagcagctcttacgcctcctcacactcgtcagacagcgaggacgatggggtgggagctgaggaaaaatgggacccggccaggggcgccgtccacagcacccccaaaggggacgctgtggccaaccacgttccggccggctggcccgaccagagcctggctgagagtgacagtgaggaccccagcggcaagccccgcctgaaggtggagaccaaggtcagcgtggagctgcaccgcgaggagcagggcagtcaccgtggagagtaccccccggaccaggagagcgggggcgcagccaggcttgctagcagccagcccccagagcagaggaaaggcatcttgaaaaataaagtcacctacccgccgccgctgacgctgacggagcagacgctgaagggccggctccgggagaagctggccgactgtgagcagagccccacatcctcgcgcacgtcttccctgggctctggcggccccgactgcgccatcacagtcaagagccctgggagggagccggggcgtgaccacctcaacggggtggccatgaatgtgcgcactgggagcgcccaggccgatggctccgactctgagaaaccgtgaggcaagcccgtcaccccacacaggctgcggcatcaccctcagaccttggagcccaaggggccactgcccttgaagtggagtgggcccagagtgtggcggtccccatggtggcagccccccgactgatcatccagacacaaaggtcttggttctcccaggagctcagggcctgtcagacctggtgacaagtgccaaaggccacaggcatgagggaggcgtggaccactgggccagcaccgctgagtcctaagactgcagtcaaagccagaactgagaggggaccccagactgggcccagaggctggccagagttcaggaacgccgggcacagaccaaagaccgcggtccagccccgcccaggcgggcatctcatggcagtgcggacccgtggctggcagcccgggcagtcctttgcaaaggcaccccttgtcttaaaatcacttcgctatgtgggaaaggtggagatacttttatatatttgtatgggactctgaggaggtgcaacctgtatatatattgcattcgtgctgactttgttatcccgagagatccatgcaatgatctcttgctgtcttctctgtcaagattgcacagttgtacttgaatctggcatgtgttgacgaaactggtgccccagcagatcaaaggtgggaaatacgtcagcagtggggctaaaaccaagcggctagaagccctacagctgccttcggccaggaagtgaggatggtgtgggccctccccgccggccccctgggtccccagtgttcgctgtgtgtgcgtttgtcctctgctgccatctgccccggctgtgtgaattcaagacagggcagtgcagcactaggcaggtgtgaggagccctgctgaggtcactgtggggcacggttgccacacggctgtcatttttcacctggtcattctgtgaccaccaccccctcccctcaccgcctcccaggtggcccgggagctgcaggtggggatggctttgtcctttgctcctgctccccgtgggacctgggaccttaaagcgttgcaggttcctgatttggacagaggtgtggggccttccaggccgttacatacctcctgccaattctctaactctctgagactgcgaggatctccaggcagggttctcccctctggagtctgaccaattacttcattttgcttcaaatggccaattgtgcagagggacaaagccacagccacactcttcaacggttaccaaactgtttttggaaattcacaccaaggtcgggcccactgcaggcagctggcacagcgtggcccgaggggctgtggaacgggtcccggaactgtcagacatgtttgattttagcgtttcctttgttcttcaaatcaggtgcccaaataagtgatcagcacagctgcttccaaataggagaaaccataaaataggatgaaaatcaagtaaaatgcaaagatgtccacactgttttaaacttgaccctgatgaaaatgtgagcactgttagcagatgcctatgggagaggaaaagcgtatctgaaaatggtccaggacaggaggatgaaatgagatcccagagtcctcacacctgaatgaattatacatgtgccttaccaggtgagtggtctttcgaagataaaaaactctagtccctttaaacgtttgcccctggcgtttcctaagtacgaaaaggtttttaagtcttcgaacagtctcctttcatgactttaacaggattctgccccctgaggtgtaatttttttgttctatttttttccacgtactccacagccaacatcacgaggtgtaatttttaatttgatcagaactgttaccaaaaaacaactgtcagttttattgagatgggaaaaatgtaaacctatttttattacttaagactttatgggagagattagacactggaggtttttaacagaacgtgtatttattaatgttcaaaacactggaattacaaatgagaagagtctacaataaattaagatttttgaatttgtacttctgcggtgctggtttttctccacaaacacccccgcccctccccatgcccagggtggccgtggaagggacggtttacggacgtgcagctgagctgtccgtgtcccatgctccctcagccagtggaacgtgccggaactttttgtccattccctagtaggcctgccacagcctagatgggcagtttttgtctttcaccaaatttgaggactttttttttttgccattatttcttcagttttcttttcttgcactgatctttctcctctccttctgtgactccagtgactcagacgttagacctcttgatgttttcccactggtccctgaggctctgttc

SEQ ID NO: 112863 - DNA, 2446 bp, Homo sapiens
  Payload ID: 2085
  Gene Symbol: CELSR1
  Gene Name: cadherin, EGF LAG seven-pass G-type receptor 1
  ENST ID: ENST00000454637
  CDS Start-End: 1-2318
ctgacttccccttccagatccacaacagctccggttggatcacagtgtgtgccgagctggaccgcgaggaggtggagcactacagcttcggggtggaggcggtggaccacggctcgccccccatgagctcctccaccagcgtgtccatcacggtgctggacgtgaatgacaacgacccggtgttcacgcagcccacctacgagcttcgtctgaatgaggatgcggccgtggggagcagcgtgctgaccctgcaggcccgcgaccgtgacgccaacagtgtgattacctaccagctcacaggcggcaacacccggaaccgctttgcactcagcagccagagagggggcggcctcatcaccctggcgctacctctggactacaagcaggagcagcagtacgtgctggcggtgacagcatccgacggcacacggtcgcacactgcgcatgtcctaatcaacgtcactgatgccaacacccacaggcctgtctttcagagctcccattacacagtgagtgtcagtgaggacaggcctgtgggcacctccattgctaccctcagtgccaacgatgaggacacaggagagaatgcccgcatcacctacgtgattcaggaccccgtgccgcagttccgcattgaccccgacagtggcaccatgtacaccatgatggagctggactatgagaaccaggtcgcctacacgctgaccatcatggcccaggacaacggcatcccgcagaaatcagacaccaccaccctagagatcctcatcctcgatgccaatgacaatgcaccccagttcctgtgggatttctaccagggttccatctttgaggatgctccaccctcgaccagcatcctccaggtctctgccacggaccgggactcaggtcccaatgggcgtctgctgtacaccttccagggtggggacgacggcgatggggacttctacatcgagcccacgtccggtgtgattcgcacccagcgccggctggaccgggagaatgtggccgtgtacaacctttgggctctggctgtggatcggggcagtcccactccccttagcgcctcggtagaaatccaggtgaccatcttggacattaatgacaatgcccccatgtttgagaaggacgaactggagctgtttgttgaggagaacaacccagtggggtcggtggtggcaaagattcgtgctaacgaccctgatgaaggccctaatgcccagatcatgtatcagattgtggaaggggacatgcggcatttcttccagctggacctgctcaacggggacctgcgtgccatggtggagctggactttgaggtccggcgggagtatgtgctggtggtgcaggccacgtcggctccgctggtgagccgagccacggtgcacatccttctcgtggaccagaatgacaacccgcctgtgctgcccgacttccagatcctcttcaacaactatgtcaccaacaagtccaacagtttccccaccggcgtgatcggctgcatcccggcccatgaccccgacgtgtcagacagcctcaactacaccttcgtgcagggcaacgagctgcgcctgttgctgctggaccccgccacgggcgaactgcagctcagccgcgacctggacaacaaccggccgctggaggcgctcatggaggtgtctgtgtctgatggcatccacagcgtcacggccttctgcaccctgcgtgtcaccatcatcacggacgacatgctgaccaacagcatcactgtccgcctggagaacatgtcccaggagaagttcctgtccccgctgctggccctcttcgtggagggggtggccgccgtgctgtccaccaccaaggacgacgtcttcgtcttcaacgtccagaacgacaccgacgtcagctccaacatcctgaacgtgaccttctcggcgctgctgcctggcggcgtccgcggccagttcttcccgtcggaggacctgcaggagcagatctacctgaatcggacgctgctgaccaccatctccacgcagcgcgtgctgcccttcgacgacaacatctgcctgcgcgagccctgcgagaactacatgaagtgcgtgtccgttctgcgattcgacagctccgcgcccttcctcagctccaccaccgtgctcttccggcccatccaccccatcaacggcctgcgctgccgctgcccgcccggcttcaccggcgactactgcgagacggagatcgacctctgctactccgacccgtgcggcgccaacggccgctgccgcagccgcgagggcggctacacctgcgagtgcttcgaggacttcactgaaatttcgtgactcatcctcccgcctctgaagatgctctttccttgatacctcctgactcatcaccaagatgaattactccaaatgtagccaacggtggtttttaaaaataaagagccaccccgagagcggtacagaaa

SEQ ID NO: 112864 - DNA, 10534 bp, Homo sapiens
  Payload ID: 2086
  Gene Symbol: CELSR2
  Gene Name: cadherin, EGF LAG seven-pass G-type receptor 2
  Uniprot ID: Q9HCU4
  ENST ID: ENST00000271332
  CDS Start-End: 62-8833
aggagccggaggaggagccgccgccgccgttgacccggccgccggccgggagctgggagagatgcggagcccggccaccggcgtccccctcccaacgccgccgccgccgctgctgctgctgttgctgctgctgctgccgccgccactattgggagaccaagtggggccctgtcgttccttggggtccaggggacgaggctcttcgggggcctgcgcccccatgggctggctctgtccatcctcagcgtcgaacctctggctctacaccagccgctgcagggatgcgggcactgagctgactggccacctggtaccccaccacgatggcctgagggtttggtgtccagaatccgaggcccatattcccctaccaccagctcctgaaggctgcccctggagctgtcgcctcctgggcattggaggccacctttccccacagggcaagctcacactgcccgaggagcacccgtgcttaaaggctccacggctcagatgccagtcctgcaagctggcacaggcccccgggctcagggcaggggaaaggtcaccagaagagtccctgggtgggcgtcggaaaaggaatgtaaatacagccccccagttccagccccccagctaccaggccacagtgccggagaaccagccagcaggcacccctgttgcatccctgagggccatcgacccggacgagggtgaggcaggtcgactggagtacaccatggatgccctctttgatagccgctccaaccagttcttctccctggacccagtcactggtgcagtaaccacagccgaggagctggatcgtgagaccaagagcacccacgtcttcagggtcacggcgcaggaccacggcatgccccgacgaagtgccctggctacactcaccatcttggttactgacaccaatgaccatgaccctgtgttcgagcagcaggagtacaaggagagcctcagggagaacctggaggttggctatgaggtgctcactgtcagggccacggatggtgatgcccctcccaatgccaatattctgtaccgcctgctggaggggtctgggggcagcccctctgaagtctttgagatcgaccctcgctctggggtgatccgaacccgtggccctgtggatcgggaagaggtggaatcctaccagctgacggtagaggcaagtgaccagggtcgggacccgggtcctcggagtaccacagccgctgttttcctttctgtggaggatgacaatgataatgccccccagtttagtgagaagcgctatgtggtccaggtgagggaggatgtgactccaggggccccagtactccgagtcacagcctcggatcgagacaaggggagcaatgccgtggtgcactatagcatcatgagtggcaatgctcggggacagttttatctggatgcccagactggagctctggatgtggtgagccctcttgactatgagacgaccaaggagtacaccctacgggtgcgagcacaggatggtggccgtcccccactctctaatgtctctggcttggtgacagtacaggtcctggatatcaacgacaatgcccccatcttcgtcagcacccctttccaggctactgtcctggagagtgtccccttaggctacctggttctccatgtccaggctatcgacgctgatgctggtgacaatgcccgcctggaataccgccttgctggggtgggacatgacttccccttcaccatcaacaatggcacaggctggatctctgtggctgctgaactggaccgggaggaagttgatttctacagctttggggtagaagctcgagaccatggcactccagcactcactgcctcggccagtgtcagcgtgactgtcctggatgtcaacgacaacaatccaacctttacccaaccagagtacacagtgcggctcaatgaggatgcagctgtgggcaccagcgtggtgacggtgtcagctgtggaccgtgatgctcatagtgtcatcacctaccagatcaccagtggcaatactcgaaaccgcttctccatcaccagccaaagtggtggtgggctggtatcccttgccctgccactggactacaaacttgagcggcagtatgtgttggctgttaccgcctccgatggcactcggcaggacacggcacagattgtggtgaatgtcaccgacgccaacacccatcgtcctgtctttcagagctcccactatacagtgaatgttaatgaggaccggccggcaggcaccacggtggtgctgatcagcgccacggatgaggacacaggtgagaatgcccgcatcacctacttcatggaggacagcatcccccagttccgcatcgatgcagacacgggggctgtcaccacccaggctgagctggactatgaagaccaagtgtcttacaccctggccattactgctcgggacaatggcattccccagaagtccgacaccacctacctggagatcctggtgaacgacgtgaatgacaatgcccctcagttcctgcgagactcctaccagggcagtgtctatgaggatgtgccacccttcactagcgtcctgcagatctcagccactgatcgtgattctggacttaatggcagggtcttctacaccttccaaggaggcgacgatggagacggtgactttattgttgagtccacgtcaggcatcgtgcgaacgctacggaggctggatcgagagaacgtggcccagtatgtcttgcgggcatatgcagtggacaaggggatgcccccagcccgcacacctatggaagtgacagtcactgtgttggatgtgaatgacaatccccctgtctttgagcaggatgagtttgatgtgtttgtggaagagaacagccccattgggctagccgtggcccgggtcacagccactgaccccgatgaaggcaccaatgcccagattatgtaccagattgtggagggcaacatccctgaggtctttcagctggacatcttctccggggagctgacagccctggtagacttagactacgaggaccggcctgagtacgtcctggtcatccaggccacgtcagctcctctggtgagccgggctacagtccacgtccgcctccttgaccgcaatgacaacccaccagtgctgggcaactttgagatccttttcaacaactatgtcaccaatcgctcaagcagcttccctgggggtgccattggccgagtacctgcccatgaccctgatatctcagatagtctgacttacagctttgagcggggaaatgaactcagcctggtcctgctcaatgcctccacgggtgagctgaagctaagccgcgcactggacaacaaccggcctctggaggccatcatgagcgtgctggtgtcagacggcgtacacagcgtgaccgcccagtgcgcgctgcgtgtgaccatcatcaccgatgagatgctcacccacagcatcacgctgcgcctggaggacatgtcacccgagcgcttcctgtcaccactgctaggcctcttcatccaggcggtggccgccacgctggccacgccaccggaccacgtggtggtcttcaacgtacagcgggacaccgacgcccccgggggccacatcctcaacgtgagcctgtcggtgggccagccgccagggcccgggggcgggccgcccttcctgccctctgaggacctgcaggagcgcctatacctcaaccgcagcctgctgacggccatctcggcacagcgcgtgctgcccttcgacgacaacatctgcctgcgggagccctgcgagaactacatgcgctgcgtgtcggtgctgcgcttcgactcctccgcgcccttcatcgcctcctcctccgtgctcttccggcccatccaccccgtcggagggctgcgctgccgctgcccgcccggcttcacgggtgactactgcgagaccgaggtggacctctgctactcgcggccctgtggcccccacgggcgctgccgcagccgcgagggcggctacacctgcctctgtcgtgatggctacacgggtgagcactgtgaggtgagtgctcgctcaggccgttgcaccccgggtgtctgcaagaatgggggcacctgtgtcaacctgctggtgggcggtttcaagtgcgattgcccatctggagacttcgagaagccctactgccaggtgaccacgcgcagcttccccgcccactccttcatcacctttcgcggcctgcgccagcgtttccacttcaccctggccctctcgtttgccacaaaggagcgcgacgggttgctgttgtacaatgggcgtttcaatgagaagcatgactttgtggccctcgaggtgatccaggagcaggtccagctcaccttctctgcaggggagtcaaccaccacggtgtccccattcgtgcccggaggagtcagtgatggccagtggcatacggtgcagctgaaatactacaataagccactgttgggtcagacagggctcccacagggcccatcagagcagaaggtggctgtggtgaccgtggatggctgtgacacaggagtggccttgcgcttcggatctgtcctgggcaactactcctgtgctgcccagggcacccagggtggcagcaagaagtctctggatctgacggggcccctgctactaggcggggtgcctgacctgcccgagagcttcccagtccgaatgcggcagttcgtgggctgcatgcggaacctgcaggtggacagccggcacatagacatggctgacttcattgccaacaatggcaccgtgcctggctgccctgccaagaagaacgtgtgtgacagcaacacttgccacaatgggggcacttgcgtgaaccagtgggacgcgttcagctgcgagtgccccctgggctttgggggcaagagctgcgcccaggaaatggccaatccacagcacttcctgggcagcagcctggtggcctggcatggcctctcgctgcccatctcccaaccctggtacctcagcctcatgttccgcacgcgccaggccgacggtgtcctgctgcaggccatcaccagggggcgcagcaccatcaccctacagctacgagagggccacgtgatgctgagcgtggagggcacagggcttcaggcctcctctctccgtctggagccaggccgggccaatgacggtgactggcaccatgcacagctggcactgggagccagcggggggcccggccatgccattctgtccttcgattatgggcagcagagagcagagggcaacctgggcccccggctgcatggtctgcacctgagcaacataacagtgggcggaatacctgggccagccggcggtgtggcccgtggctttcggggctgtttgcagggtgtgcgggtgagcgatacgccggagggggttaacagcctggatcccagccatggggagagcatcaacgtggagcaaggctgtagcctgcctgacccttgtgactcaaacccgtgtcctgctaacagctattgcagcaacgactgggacagctattcctgcagctgtgatccaggttactatggtgacaactgtactaatgtgtgtgacctgaacccgtgtgagcaccagtctgtgtgtacccgcaagcccagtgccccccatggctatacctgcgagtgtcccccaaattaccttgggccatactgtgagaccaggattgaccagccttgtccccgtggctggtggggacatcccacatgtggcccatgcaactgtgatgtcagcaaaggctttgacccagactgcaacaagacaagcggcgagtgccactgcaaggagaaccactaccggcccccaggcagccccacctgcctcttgtgtgactgctaccccacaggctccttgtccagagtctgtgaccctgaggatggccagtgtccatgcaagccaggtgtcatcgggcgtcagtgtgaccgctgtgacaacccttttgctgaggtcaccaccaatggctgtgaagtgaattatgacagctgcccacgagcgattgaggctgggatctggtggccccgtacccgcttcgggctgcctgctgctgctccctgtcccaaaggctcctttgggactgctgtgcgccactgtgatgagcacagggggtggctccccccaaacctcttcaactgcacgtccatcaccttctcagaactgaagggcttcgctgagcggctacagcggaatgagtcaggcctagactcagggcgctcccagcagctagccctgctcctgcgcaacgccacgcagcacacagctggctacttcggcagcgacgtcaaggtggcctaccagctggccacgcggctgctggcccacgagagcacccagcggggctttgggctgtctgccacacaggacgtgcacttcactgagaatctgctgcgggtgggcagcgccctcctggacacagccaacaagcggcactgggagctgatccagcagacagagggtggcaccgcctggctgctccagcactatgaggcctacgccagtgccctggcccagaacatgcggcacacctacctaagccccttcaccatcgtcacgcccaacattgtcatctccgtagtgcgcttggacaaagggaactttgctggggccaagctgccccgctacgaggccctgcgtggggagcagcccccggaccttgagacaacagtcattctgcctgagtctgtcttcagagagacgccccccgtggtcaggcccgcaggccccggagaggcccaggagccagaggagctggcacggcgacagcgacggcacccggagctgagccagggtgaggctgtggccagcgtcatcatctaccgcaccctggccgggctactgcctcataactatgaccctgacaagcgcagcttgagagtccccaaacgcccgatcatcaacacacccgtggtgagcatcagcgtccatgatgatgaggagcttctgccccgggccctggacaaacccgtcacggtgcagttccgcctgctggagacagaggagcggaccaagcccatctgtgtcttctggaaccattcaatcctggtcagtggcacaggtggctggtcggccagaggctgtgaagtcgtcttccgcaatgagagccacgtcagctgccagtgcaaccacatgacgagcttcgctgtgctcatggacgtttctcggcgggagaatggggagatcctgccactgaagacactgacatacgtggctctaggtgtcaccttggctgcccttctgctcaccttcttcttcctcactctcttgcgtatcctgcgctccaaccaacacggcatccgacgtaacctgacagctgccctgggcctggctcagctggtcttcctcctgggaatcaaccaggctgacctcccttttgcctgcacagtcattgccatcctgctgcacttcctgtacctctgcaccttttcctgggctctgctggaggccttgcacctgtaccgggcactcactgaggtgcgcgatgtcaacaccggccccatgcgcttctactacatgctgggctggggcgtgcctgccttcatcacagggctagccgtgggcctggaccccgagggctacgggaaccctgacttctgctggctctccatctatgacacgctcatctggagttttgctggcccggtggcctttgccgtctcgatgagtgtcttcctgtacatcctggcggcccgggcctcctgtgctgcccagcggcagggctttgagaagaaaggtcctgtctcgggcctgcagccctccttcgccgtcctcctgctgctgagcgccacgtggctgctggcactgctctctgtcaacagcgacaccctcctcttccactacctctttgctacctgcaattgcatccagggccccttcatcttcctctcctatgtggtgcttagcaaggaggtccggaaagcactcaagcttgcctgcagccgcaagcccagccctgaccctgctctgaccaccaagtccaccctgacctcgtcctacaactgccccagcccctacgcagatgggcggctgtaccagccctacggagactcggccggctctctgcacagcaccagtcgctcgggcaagagtcagcccagctacatccccttcttgctgagggaggagtccgcactgaaccctggccaagggccccctggcctgggggatccaggcagcctgttcctggaaggtcaagaccagcagcatgatcctgacacggactccgacagtgacctgtccttagaagacgaccagagtggctcctatgcctctacccactcatcagacagtgaggaggaagaagaggaggaggaagaggaggccgccttccctggagagcagggctgggatagcctgctggggcctggagcagagagactgcccctgcacagtactcccaaggatgggggcccagggcctggcaaggccccctggccaggagactttgggaccacagcaaaagagagtagtggcaacggggcccctgaggagcggctgcgggagaatggagatgccctgtctcgagaggggtccctaggcccccttccaggctcttctgcccagcctcacaaaggcatccttaagaagaagtgtctgcccaccatcagcgagaagagcagcctcctgcggctccccctggagcaatgcacagggtcttcccggggctcctccgctagtgagggcagccggggaggcccccctccccgcccaccgccccggcagagcctccaggagcagctgaacggggtcatgcccatcgccatgagcatcaaggcaggcacggtggatgaggactcgtcaggctccgaatttctcttctttaacttcctgcattaaccctgggccgtggttcctacgcccgaggctcccttcccttccccagccgcactcatgccctgctcctgtcttgtgctttatcctgccccgctccccatcgcctgcccgcagcagcgacgaaacgtccatctgaggagcctgggccttgccgggaggggtactcaccccacctaaggccatctagtgccaactccccccccaccattcccctcactgcactttggacccctggggccaacatctccaagacaaagtttttcagaaaagaggaaaaaaagaatttaaaaaaggatctccactcttcatgacttcagggattcattttttttatacgctggaaattgactcccctttcccttcccaaagaggataggacctcccaggatgcttcccagcctctcctcagtttcccatctgctgtgcctctgggaggagagggactcctggggggcctgcccctcatacgccatcaccaaaaggaaaggacaaagccacacgcagccagggcttcacacccttcaggctgcacccgggcaggcctcagaacggtgaggggccagggcaaagggtgtgcctcgtcctgcccgcactgcctctcccaggaactggaaaagccctgtccggtgagggggcagaaggactcagcgcccctggacccccaaatgctgcatgaacacattttcaggggagcctgtgcccccaggcgggggtcgggcagccccagcccctctccttttcctggactctggccgtgcgcggcagcccaggtgtttgctcagttgctgacccaaaagtgcttcatttttcgtgcccgccccgcgccccgggcaggccagtcatgtgttaagttgcgcttctttgctgtgatgtgggtgggggaggaagagtaaacacagtgctggctcggctgccctgagggtgctcaatcaagcacaggtttcaagtctgggttctggtgtccactcacccaccccaccccccaaaatcagacaaatgctactttgtctaacctgctgtggcctctgagacatgttctatttttaaccccttcttggaattggctctcttcttcaaaggaccaggtcctgttcctctttctccccgactccaccccagctccctgtgaagagagagttaatatatttgttttatttatttgctttttgtgttgggatgggttcgtgtccagtcccgggggtctgatatggccatcacaggctgggtgttcccagcagccctggcttgggggcttgacgcccttccccttgccccaggccatcatctccccacctctcctcccctctcctcagttttgccgactgcttttcatctgagtcaccatttactccaagcatgtattccagacttgtcactgactttccttctggagcaggtggctagaaaaagaggctgtgggcaggaaagaaaggctcctgtttctcatttgtgaggccagcctctggcttttctgccgtggattctcccccgtcttctcccctcagcaattcctgcaaagggttaaaaatttaactggtttttactactgatgacttgatttaaaaaaaatacaaagatgctggatgctaacttggtactaaccatcagattgtacagtttggttgttgctgtaaatagggtagcgttttgttgttgttgttttttcatgccccatactactgaataaactagttctgtgcgggt

SEQ ID NO: 112865 - DNA, 11956 bp, Homo sapiens
  Payload ID: 2087
  Gene Symbol: CELSR3
  Gene Name: cadherin, EGF LAG seven-pass G-type receptor 3
  Uniprot ID: Q9NYQ7
  ENST ID: ENST00000164024
  CDS Start-End: 282-10220
agcgaaccatcggggcggccgggagccatgttggagcggcgggaggcggcagcagcgtcggggatgctgtggtgggggcggaaaaagccagggccgcacgccggaggggctccggccgcggagtagatggtgcccagagggcggcgggggtgcggagagacaggcggaggggcgggggcccggggcggcggcaggggcccgggagggggcccgagcggcggggccagcccaaggcccggaccggggcggggggcggtggaggccgtgcagggaggcgggggatgatggcgaggcggccgccgtggcggggcctcgggggacggtcgacccccatactcctgctccttctcctctctttgttccccctcagccaggaggagctggggggcggtgggcaccagggctgggacccaggcttagctgccactacggggccaagggcgcatatcggtggcggagccttagctctttgtccggagtcttccggggtccgggaggatggggggcctggcctgggggtcagggagcctatcttcgtggggctccgagggagaaggcaaagcgcccggaatagtcgagggccccctgagcagccgaatgaggagctggggattgaacacggcgtccagccattgggcagccgcgaacgagagacaggacagggaccagggtctgtgttatactggcgcccagaggtctcctcttgcgggcggacaggacctttgcaaagaggtagtctgtcaccaggggctctgtcctcaggggtcccgggctcggggaacagctcgcccctcccttcagactttttgattcggcaccacggtcccaagccggtgtcctcccagcggaacgctgggacaggctcccgcaaaagagtgggcaccgcgcgctgctgtggggaattatgggcaacagggagcaagggtcagggcgagagagccacgacatccggagcagaaaggacagccccccggcggaactgtcttccaggggcctcgggatctggccccgagctggattcagcaccacgcacggcgaggacagctcctgcatcaggttcagcaccccgcgagtctcggacagctcccgagccggcgcccaagcgcatgcgctcccggggtctcttccgctgccgcttcctcccgcagcgccccgggccgcgtcccccgggactcccggcccgtcctgaagccaggaaagtaacctcggcgaaccgggcacgctttcgtcgcgccgcaaaccgccacccgcagtttccgcagtacaactaccagacgctggtgccggagaatgaggcagcaggcaccgcggtgctacgcgtggttgctcaggacccggacgccggcgaggccgggcgcctagtctactcgctggcggcactcatgaacagccgctcgctggagctgttcagcatcgacccgcagagcggccttatccgtacggcggcagctctggaccgcgagagcatggagcgtcactacctgcgtgtgaccgcgcaggaccacgggtcgccgcgcctctcggccaccacgatggtggccgtgacagtagccgaccgcaacgaccactcgccggtttttgagcaagcgcagtaccgggagacccttcgcgagaatgtggaggagggctaccctatcctgcagctgcgtgccactgacggcgacgcgccccccaacgccaacctgcgctaccgcttcgtggggccgccagctgcgcgcgctgcagctgccgccgccttcgagattgatccacgctccggcctcatcagcaccagcggccgagtggaccgcgagcacatggaaagctatgagctggtggtggaagccagcgaccagggccaggaacccgggccgcgctcggccactgtgcgcgtacacataactgtgctagacgagaacgacaatgctcctcagttcagcgagaagcgctacgtggcgcaggtgcgcgaggatgtgcgcccccacacagtcgtgctgcgcgtcacggccactgaccgggacaaggacgccaacggattggtgcactacaacatcatcagtggcaatagccgtggacactttgccatcgacagcctcactggcgagatccaggtggtggcacctctggacttcgaggcagagagagagtatgccttgcgcatcagggcgcaggatgctggccggccaccgctgtccaacaacacgggcctggccagcatccaggtggtggacatcaatgaccacattcctatttttgtcagcacgcccttccaagtttctgtcttggaaaatgctcccttgggtcactcagtcatccacattcaggcagtcgatgcagaccatggggagaatgccagattggagtactccctaactggtgtggcacctgatactccttttgtgataaacagcgccactggctgggtctctgtgagtggtcccctggaccgtgagtctgtggagcattacttctttggtgtggaggctcgagaccatggctcacccccactctctgcctcagccagtgtcaccgtgactgtgctggacgttaatgacaatcggcctgagttcacaatgaaggagtaccacctacgactgaatgaggatgcagctgtgggcaccagtgtggtcagcgtgaccgcagtagaccgtgatgccaacagtgccatcagctaccagatcacaggcggcaacacccggaatcgctttgccatcagcacccaggggggtgtgggtctggtgactctggctctgccactggactacaagcaggaacgctacttcaagctggtactaactgcatctgaccgtgcccttcatgatcactgctatgtgcacatcaacatcacagatgccaacactcatcggccggtctttcaaagtgcccactactcagtgagtgtgaatgaagatcggccaatgggtagcaccatagtggtcatcagtgcctctgatgatgacgtgggtgagaatgctcgtatcacctatctcctggaggacaacctgccccagttccgcattgatgcagactcaggagccattacattacaggccccattagactatgaggaccaggtgacctacaccctggctatcacagctcgggacaatggcatcccacagaaggcagacactacttatgtggaggtgatggtcaatgacgtgaatgacaatgctccacaatttgtggcctcccactatacagggctggtctctgaggatgccccacctttcaccagtgtcctgcagatctcagccactgaccgggatgctcatgccaatggccgggtccagtacactttccagaatggtgaagatggggatggagattttaccattgagcccacctctggaattgtccgtacagtaaggcggctagaccgggaggcagtatcagtgtatgagttgactgcctacgcagtggacagaggtgtgcccccactccggactccagtcagtatccaggtgatggtgcaggatgtgaacgacaatgcacctgtcttcccagctgaggagtttgaggtgcgggtgaaagagaatagcattgtgggctcagtggtggcccagatcactgcagtggaccctgacgaaggccccaatgcccatataatgtaccagatcgtggaggggaacatccctgagctgttccaaatggacatcttctctggagaactgacggcactcattgacctagactatgaggctcgccaagaatatgtgattgtggtgcaggccacatctgctcctttggtcagccgggccactgtgcacgtccgcctggttgaccagaatgacaacagccctgtgctcaacaacttccagatcctcttcaacaactatgtatccaaccgttcagacaccttcccgtcgggcattattgggcgcatcccagcttatgaccccgatgtctccgaccacctcttctactcctttgagcgtggcaatgagctgcagctgctggtagtcaaccagaccagtggggagctgcgactcagccgaaagctagacaataaccgcccactggtggcctccatgttggtgactgtcacagatggcctgcacagcgtgacggcgcagtgtgtgctgcgcgtggtcatcatcacggaggagttgctggccaacagcctgaccgtgcgccttgagaacatgtggcaggagcgcttcctgtcaccgctgctgggccgcttcctcgagggcgtggctgcggtgctcgctacgcccgctgaggacgtcttcatcttcaacatccagaacgacacagacgtagggggcaccgtgctcaatgtgagtttctcggcgctagctccacgtggggccggggcgggcgctgcagggccctggttcagctccgaggagctgcaggagcagttgtacgtgcgccgggcggcgctggcggctcgctccctgctcgacgtactgcccttcgacgacaacgtgtgcctgcgagagccctgtgagaactacatgaaatgcgtgtccgtgctccgctttgactcgtccgcgcccttcctggcctcggcctccacgctgttccgacccatccagcccatcgctggcctgcgctgccgctgcccgcccggattcacgggagacttttgcgagaccgagctcgacctctgctactccaacccatgtcgcaacggcggagcctgcgcgcggcgcgagggaggctacacgtgcgtctgccgcccgcgcttcaccggagaggactgcgagctggacaccgaggccggccgctgcgtgccgggcgtctgccgcaacgggggcacctgcaccgacgcgcccaacggcggctttcgctgccagtgcccggcaggcggcgccttcgagggcccgcgctgcgaggtggctgcgcgctccttcccgcccagttcgttcgtcatgtttcgcggcctgcggcagcgattccaccttacgctgtccctctcgttcgcgacagtgcagcagagcgggctgctcttctacaacgggcgcctgaacgagaagcacgacttcctggccctggaactcgtggctggccaagtgcggctcacatattccacgggtgaatccaacaccgtggtcagccccacagttccagggggcttgagtgacgggcaatggcatacagtgcatctgagatactacaacaagccccggacagatgccctagggggtgcacagggcccctccaaggacaaggtggctgtgctaagcgtggatgattgtgatgtggccgtggctctgcagtttggtgctgagattggcaactactcatgcgcggctgctggtgtgcaaacaagctccaagaagtccctggacctgacgggccctcttcttctgggaggtgtccccaacctccccgagaacttccccgtatcccataaggacttcatcggctgtatgcgggacctgcacattgatggccgccgagtggacatggcggcttttgtcgcaaataatggcaccatggcaggctgccaagccaagctacacttttgtgactcaggcccctgcaagaacagtggcttctgctcggagcgctggggcagcttcagctgcgactgccctgtgggcttcggcggcaaagactgtcagcttactatggcccatccccaccatttccgtggcaacggcacactgagctggaactttggaagtgacatggctgtgtctgtgccatggtacctggggctggcatttcggacacgggcaacgcagggggtcctgatgcaagtgcaggctgggccacacagcacgctcctttgccagctagatcgggggttactgtctgtgacagtgaccaggggctcgggccgtgcttcccatctccttctggaccaggtgactgtcagtgatggccggtggcacgatctgcggctggagttgcaggaggaaccaggtggccggcggggccaccatgtccttatggtctcactggactttagcctcttccaggacaccatggcggtggggagtgagctgcagggcctgaaggtaaagcagctccacgtgggaggcctgccccccggcagtgcagaggaggctcctcagggtctggttggctgcatccagggggtgtggctcggctccacaccctctggctccccggccctgctaccccccagccaccgagtgaatgcggagcctggctgtgttgtgaccaacgcctgtgcctctgggccctgcccacctcacgcagactgccgggacctctggcagaccttttcttgcacctgccagccaggttactacggcccaggctgtgtggatgcctgcctcctgaacccctgtcagaaccagggatcatgccggcacctgccaggagccccccatggctatacctgtgactgtgtgggtggctatttcgggcaccactgtgagcacaggatggaccagcagtgcccacggggctggtgggggagcccaacctgtggcccctgcaactgtgatgttcacaaaggttttgatcccaactgcaacaagacaaatgggcagtgtcactgcaaggagttccactaccgaccgcggggcagtgactcttgcctcccatgtgactgctaccctgtgggctccacctcgcgctcatgtgcaccccacagcgggcagtgcccctgtcgcccaggagcccttggccgccagtgcaacagctgtgacagtcccttcgcagaggtgacagccagcggctgccgggtgctctatgatgcctgccctaagtccctgagatctggtgtgtggtggccccagacaaagtttggcgtcctggccacagtgccctgtccccggggggccctgggtgctgctgtgcggctgtgtgatgaggcccagggttggctggagcccgacctcttcaactgtacctcccctgcctttcgagagctcagtctgctgctggatggcctagagctgaacaagacggcactggataccatggaggccaagaagctggctcagcggctacgggaggtgactggccacactgaccactattttagccaagatgttcgagtcactgcccgcctgctggcccacctgctggccttcgagagccatcagcagggcttcgggctgacagccacacaggatgcccacttcaatgagaatctgctgtgggccggctctgcactgcttgccccagagacaggggacttgtgggcggcgctggggcagcgggcccctgggggctccccaggcagcgcgggactggtgaggcacctggaggagtatgcagccacactcgcaaggaatatggaactcacatacctgaatcccatggggctggtgacgcctaatatcatgctcagcattgaccgcatggagcaccccagttctccccggggggcccgtcgctaccctcgctaccatagcaacctctttcgaggccaggatgcctgggatcctcacacccatgtgctgctgccttcccagtccccacggccatccccatctgaagttctgcccacaagcagcagcatagaaaactccaccacctcaagtgtggtccccccaccagccccgccagagccagagcctgggatctccattatcattctcctcgtttaccgcaccttagggggactgctccctgcccagttccaggcagaacgccgaggtgccaggcttcctcagaaccccgtcatgaactccccggtggtcagcgtggctgtgttccacggacgcaacttcctaaggggaatcctggagtcccccatcagcctagagtttcgcctgctacagacagcgaatcggagcaaggcgatctgtgtgcagtgggacccacctggcctggcggagcagcatggtgtgtggacagcacgggactgcgagctggtgcacaggaatgggtcccacgcacggtgtcgctgcagccggacagggacctttggggtcctcatggatgcctctccccgtgagaggctggagggcgacctggagctgctggctgtgttcacccacgtggtcgtggctgtgtctgtggctgcgctggtgctgactgcagccatcctgctgagcctgcgcagcctcaagtccaatgtgcgtgggatccatgccaatgtggcagccgccctgggggtggcagagctcctcttcctgctggggattcacaggacccacaatcagctggtgtgcactgcagtcgccatcctcctgcactacttcttcctcagcaccttcgcgtggctcttcgtgcaggggctgcacctctaccgcatgcaggttgagccacgcaacgtggaccgcggcgccatgcgcttctaccatgccctgggctggggcgtccctgctgtgctgctgggccttgctgtgggcctggaccctgagggctatgggaaccctgacttctgctggatctcagtccacgagcccctcatctggagctttgctggccctgttgtcctggtcatagtgatgaacgggaccatgtttctcctcgctgcccgcacatcctgctccacagggcagagggaggccaagaagacctctgcactgacccttcgcagctccttcctgctgcttctgctggtcagtgcctcctggctctttgggctcctggcagtcaaccacagcatcctagccttccactacctccatgctggactctgcggcctccagggcctggcggtgctgctgctcttctgtgtcctaaatgcagatgctcgggctgcctggatgccagcctgtctgggcaggaaggcagcgcctgaggaggcaaggccagcacctgggctgggacctggggcctacaacaacacggctctctttgaggagagtggcctcatccgcatcactctgggcgcctccaccgtctcctctgtgagcagtgcccgctccggccggacccaggaccaggacagccagcggggccgcagctacctcagggacaatgtcctggttcgacatggctcagccgctgaccacactgaccacagcctccaggctcatgctggccccactgacctggacgtggccatgttccatcgagatgctggcgcagactccgactctgacagtgacctgtccttggaggaggagaggagtctctccattccatcttcagaaagcgaggacaatggccggacgcgggggcgcttccaacggccactctgccgagcagcccagagtgagaggctcctcacccaccccaaagatgtggatggcaatgacctcctgtcctactggccagccctgggggagtgcgaggcagccccctgtgctctgcagacttggggctctgaaaggcgcctggggctggacaccagcaaggatgcagctaacaacaaccagccagacccggccctgaccagtggggatgagacttctctgggccgggcccagcgccagaggaaaggcatcctgaagaaccggttgcaatacccactggtgccacagacccgaggtgcccctgagctgtcctggtgccgtgcagccaccttgggccaccgtgctgtgccagctgcctcttacggtcgcatctatgctggcgggggcacgggcagcctttcacagccagccagccgctactcttctagagaacagctggacctgctcctccggcggcaactgagccgtgagcgactagaggaagcccctgcccctgttctacgtcccctgagccggccagggtcccaggaatgcatggatgctgcaccaggccgactggagcccaaagatcggggcagcaccctgccacggaggcagccacctcgggactaccctggcgccatggctggccgcttcgggtcacgggatgcgctcgacttaggggcacctcgagagtggttgagcacgctgcctccgccccgccgcacccgggaccttgacccacagcccccacctctgcccctgtctccccagcggcaactctcaagggaccccctcttgccatcccggccgctggactctctgtctaggagctcgaactctcgggagcagctggaccaggtgcctagccggcacccctcacgagaagcccttgggccactcccgcagctgctcagagctagggaggactcggtcagtggccccagccatggcccctccacagaacagttggacattctttcctccatccttgcctctttcaactcctcggccctctcctctgtgcaatcttcaagcacacccttgggccctcacaccactgccacaccttctgccacagcctctgtgcttgggccctccacgccacgttctgccacgtctcacagcatctcggagctgtcgccagactcagaagttcccagaagtgagggtcactcctgaggggatgacggcgtggacgaggaacagctgagggcgacagaggatctaggctaacaggagagactccaggagtgggggcagatcccaaggcagcctcctgctccccagtggtgggtgccccagctctacctggtgtggcagggctgaggctccatgtgcatctgtgagcatgcgtgtgacaggtgcagagacgggggactggagggagacttttatacgttttgtacctttgtaaccagagagatgcttatgttatttttcagcttttctgtctcctggggggtttgaggctgggctgggagggggagggagatagagggagagatgcagtttgaccccatttgggtcctgagcaaaccctatgctcatctctctctccttcctggggtggactcagatgggtgggacacatgccttcctccccctattccacccccaagttgatctgagtatcgtcaggggcccaaagtacagaattgttctttgctttttattgaatgctccaaaggccaaacttctggggctgggggttggtcttggaaacaggggtcctctgacttcctcatgggggcttgctcataccgcccctcctggtggatgtgtgtgtttattatgtggagtccctgccacttactgccttatgacctaggactgatgctgtggggtgctggtggagcagctgatgtcgtgtttacagagcaaggcttccctgtctcccacggggaggggctcgggcctctagtcagacattcctgcagagggtcggtggaggggtcattcacctgcccctgcagcaagcaaaagttgtctgtggtgccatttgattccctgacactgccccctgcttgaattgattccgaagggtagggtgggaaggtgagcaaagggagcagaaacaagggaattcaagacccagaatgtaggtgccactgcctcctatgtttacaggatcctccgtggccctaggcacctgggctgcaggaagtgactccgttccactcctcctttattcccttaaaaagggaaaaatgactgttacgaccctgttcacaaaactcttacttttgctattttgtctgctgtccagaactgaagactttaaaattttgttactgtttacaagtccagattcaaaaaatgtttttactttgtttacaactcaaaactttgagttttacactttgtttacagtagataattttttttcctttgtttccaagtgaaaggtagggaaagtgggagagggacttggaggacccacctgtgaggaccctgacctggccatcttgaggggttttctaacccccaggtctcccaggccgaaggtcagccttgagtcccgtttaacagcagatccagaagaccttgagagtaggcgtcctctaaccacgggggagagtggctgtgcagggctggggggtggtctgtgcagacacctcctcacccaccaccccatgcatactcttgggaagcagcttcctgggagattagaaattctacttccctgactggagctaaatcccaccagccaggacccaaactctccttaccgagaaggaccccagctcttgaagggctgagtggcctgctgggggtgggagggtgtctttactatgtcctaggtttcgtagatgcccctctctggggttcccctcctccagcccagcggccctctttcctgtctgtgtaaattgttccgtgaagccgcgctctgttttgggaataaacttctatag

SEQ ID NO: 112866 - DNA, 5340 bp, Homo sapiens
  Payload ID: 2088
  Gene Symbol: CPED1
  Gene Name: cadherin-like and PC-esterase domain containing 1
  Uniprot ID: A4D0V7
  ENST ID: ENST00000310396
  CDS Start-End: 468-3548
ctgcccggccccgggtggctgcgatgccgaggtcctctgctcccgccgggcgtgcagcgggcgcgcgcgcgtgtgtttatgtgtctgtgtgcgtgtgtgtgtgtgtctctctctgtgtgtgtgtgagatgaattggagtcatacgactgggtgtttccttccgagtggttttcatcagcaatccattaggaaatcatggaaactttttttttcctggctaaaaggatgaaaactgagtcatccacttttgactgtcatccatggaagagctcttattaaaagcctcagactttcgggacctatgattctttggcacaaccttttggaaaattcttaagcagggatgaagcaaacttgattggagttggggaaaaagaagacagattagtatttttcatgctgacaaaaaatagctgctatgacttttcccgcaacgtggacaggggccaagtgaagctgaactggtcatggtctgtcgcccagtgttcccttgtcgtcggcgattttgcccccgacccttcttggtgggcttagtggtggcaatctgtctcttctaccagactctgaccctccgagggtcgaggaagctcacagccgctgcccctggggctgtcccacacacatccactgaaacccaggcaagcagatgcaagaaaggattctctcaggacaaacagtgcttccttctctctggtaatgcccaggaaaccagaaaggtcaaagaatcaatggagacacactttggcagccatggccgaagggccatactctacaggcctcctttctacagcaaaacagagcttcagctacaccagcacattctgactcaacatggctatacggttgtcatcgctgaagaaaggctcaatgctggcctagggccggggctactagaacaaggtgatctgggctcttgggatctgctcatttgcctgtcttctaagaaagcagaaggaacaccctgtatatccaaggaagtcatgtgccagttaggtttacatcaaaaggcaaacagattaccagaaatacagcagccactttgcagaaaggaaggattatgtcaaatagttagaagattcccagaactgcaacttccagtgagtccctctgtgtgtctggatcagggaatgcaattaaagccgagtacttcgagtcaccttttaaaaacagtgaagccacgtgtgtggaaaccaggggactggagtcgtgaacagctgaatgaaacgacagtccttgctccacatgaaacaatctttcgagccgaagatctatctgtgattcttaaagcgtatgtgttggtgacgtccttaacccctttgcgtgcattcattcattcgacgggcacagtttggaatccaccaaagaaaaaacgcttcactgtcaagctgcaaacattttttgagacattcctgagagccagttcacctcaacaggcttttgacattatgaaggaagcaattggcaaactactgctagcggctgaagtattcagtgaaacatctactctgggaccaaagaccttccatagatgcagattctgctttcaacttctaacttttgatattggttatggcagtttcatgtaccctgtagtgctccaggtacacgagcatttaaattttcaagattatgataatatggattttgaggaccaaaatacagaagaattccttttaaatgacactttcaattttctcttccctaatgaatcatcactttccatattttctgagatatttcagagactttatagatcagatgttttcaagggtgaaaactatcaaaaggaactaaatcagtgtctgtccttagaagaaattaactcaattatgactttcataaaggaacttggaagtctgggacaattccaactgctcttcccatctactactcctgggattcagtcactgatgcatgaattttatgatgtggcaaatcctgtgggaaatcctggctcagtcctgacccaatactggtctcttttaaatgtatttgaacaatttcagttcatgaataaaaagacacagccacatccactggaatggaattctttcacagaagataagaacattgaaaaaccacaagtgccatttgatgcaatagaaaataaaaaagctgcagttccacaaattaaaaatgaaaataaagaaatacattgcagtgatgatgaaaacacaccatgtcatatcaagcagatcttcacacatccacatttggaactaaatcctgactttcatccaaagatcaaagattattactgtgaagtcccatttgatgtggtaacagtgacaattggagtggaaactcctaagtgtctgtgcaaggtgcacctgtacgagcaggcagggccaagctttgccagctaccctctgggcttaggaatgaacaaaatctcaatatttgttgtggatgaatctccagcacacggtgagactctgatcacgtacaaactcaccatctatagagaagaccgcccaagtctgcccttgtttgaggccttcacagcatgtggttttgtgcaggattgtggtttgctgattcatccagaggaaacctgtgggttacagcctatttcttctgactacattgaagccattttacagtctgaactaaaaagatgtccatctggggacatgaaaggccagtggattgtgccttgccttagttgttcggacaacaggacgtgtgactggagagaaataacctggcagccccacaactgccaatatggtgtcctaactaagcctcaactccagcagtgcctgggaggaaggaagattctgttcattggagattcaaccaacagagggatcatgtactatcttattgaaaggctgaatgaaacgttgcaggaatggcagaaagtacatggcactaaattctatcacaacgtcaatggtgggaagactttgatcagttattcctactatccccagttctggataagcccttcattgagaccaacatttgaaaatgcacttgaacacctcttgcaaagatcacgtcccctagagaatactggccagactgtattggttgttggtggtgttcagtggcttaattccaatcacctgcaaattattcacaaagttttgaagagggaaaatttactcaatatcctagtgatcatcaaaactttgggaattggatttcatctgccagtggatggagtacatttcttaacacagagtgaagtacagaacttatggaaagaaaatttgattattctggatactgcaaaaaaacatggctatgaagtagttgacacattcactataacaatggggcgttacaaagagtttctacaggggaagtgtggatgtcatttccatgaggtagtgaaatcaaagttatccaaagaatataactttattaaaatgaaaagatcaagaaatcatatcatgggaagatatttcagcaatcaaagcaaactacaacaaggcactgtaacaaattttcgatcgccatatcatgtcagaggtccaataaatcaggtttgttctgaaatccttctcagcaggatgtgtgcaaataaaaggactatgtaggctccctgcaggagagctgaatctggagctggagacgagctagtcacccggacaatggtctaggagccaagcgctgcacatcgcacacatttgggatcgaccacacacacttgtgcacaccagcacatgcatgcacaccagtacacacacagttaaataatgataacacttcttacagctttatgaattcaagatgtgaccttgaacaccagtccatttcacagtgaaagatatacctagagaaacgttacttgaagcataattattaaccagaaccactgtgggccaggtatggcattgtgataataaagagaaatatagacacttaaaattatgtgaaaaaaaggataatgctctttcatgttgtcttaccatatctataggtacatcaatattgaaaaggagaaaaaccaatgacattccactggcaagtagaagttgtcctttcattctttaccaggagaaaatgtgatgtttatgatggcttaggctttgtgaatctaatgcttatgaaaaacatttcttcctatactttttaaattttattactgaaaggaaaagaacaggaatgttccacaagggaatttgaagagattctgtgagagagatatgaaatattttatagttaaaacaccaatatattcaactttacacttcttgtgtttttcataaacattccctcttgtcttatctgtgtacttcgatgggtaactgcagtctgaattaatgaaatatgtaattttaaagtaagtaacaaaatgtagttcctcatgtattactgtactatgtttcattgatgatattacttaaatcttgtgtttgccattacagccctatgtaacttaaaattacaattatattttatgtaaatattttgcaaaggactatgcattctgaaatgcataggtgctttttcccaccaagcatttgcatatgtccacaaatagtattatgttactagtatctatattttgattttcctgagcaactgtatcaaatccaaatttagattagacaaaaaattattattttaattaaactgtggcatacatataatacatacctaattatagtagtgagaactatttcttttatctctttaggttcaaaatggtgaatttctttattatatgaatgctttgttgtgagataacatcacactgttacaatggattttagaggtttgtcttttttgggtggggtgggaagctgagagggttaattcaatacatggctgaaattaccaaatgtataaatacctcattttcactaccatacaagaaaaaaacacctattttgattgatcagttcttttgtatgaatatccacctcctttaaatactctatttttatatatatttttatatgaagataaacatgaatttatatttaactgtcttaaattatatttacataaatgcaaatatcacttgatataaacaatacaaatctgcatcttacagatgataatttttttagaagaatgatacagaattaactttaaaaataaaacttttctaatatacacttaaatgcaaacatcatttttaaattttcagtgatttttttaatgacataaaacgttaccaatgtgtgcagcctctccatcatgttttaacatactgtatactctatagcagtattacagtcagtatttcatataattttctttagacctaactgttaccatctgactgaggttactctggtatttatctcttcgctgctgaaataataatggattttagaaacaattgtaataatatcattaataaatgtcttactagtaata

SEQ ID NO: 112867 - DNA, 1056 bp, Homo sapiens
  Payload ID: 2088
  Gene Symbol: CPED1
  Gene Name: cadherin-like and PC-esterase domain containing 1
  ENST ID: ENST00000340646
  CDS Start-End: 448-1056
gcgatgccgaggtcctctgctcccgccgggcgtgcagcgggcgcgcgcgcgtgtgtttatgtgtctgtgtgcgtgtgtgtgtgtgtctctctctgtgtgtgtgtgagatgaattggagtcatacgactgggtgtttccttccgagtggttttcatcagcaatccattaggaaatcatggaaactttttttttcctggctaaaaggatgaaaactgagtcatccacttttgactgtcatccatggaagagctcttattaaaagcctcagactttcgggacctatgattctttggcacaaccttttggaaaattcttaagcagggatgaagcaaacttgattggagttggggaaaaagaagacagattagtatttttcatgctgacaaaaaatagctgctatgacttttcccgcaacgtggacaggggccaagtgaagctgaactggtcatggtctgtcgcccagtgttcccttgtcgtcggcgattttgcccccgacccttcttggtgggcttagtggtggcaatctgtctcttctaccagactctgaccctccgagggtcgaggaagctcacagccgctgcccctggggctgtcccacacacatccactgaaacccaggcaagcagatgcaagaaaggattctctcaggacaaacagtgcttccttctctctggtaatgcccaggaaaccagaaaggtcaaagaatcaatggagacacactttggcagccatggccgaagggccatactctacaggcctcctttctacagcaaaacagagcttcagctacaccagcacattctgactcaacatggctatacggttgtcatcgctgaagaaaggctcaatgctggcctagggccggggctactagaacaaggtgatctgggctcttgggatctgctcatttgcctgtcttctaagaaagcagaaggaacaccctgtatatccaaggaagtcatgtgccagttaggtttacatcaaaagcagctcaggcggcgggaggagcggcagcggccaggcagcccagcttcgcgaaggctctcggtacgatga

SEQ ID NO: 112868 - DNA, 1118 bp, Homo sapiens
  Payload ID: 2088
  Gene Symbol: CPED1
  Gene Name: cadherin-like and PC-esterase domain containing 1
  ENST ID: ENST00000443817
  CDS Start-End: 116-1118
agtattcgttcacctttcatttgaggagaagctaagtgctgactgccagaggatggaataggaagacaatgaactgcaacttccagtgagtccctctgtgtgtctggatcagggaatgcaattaaagccgagtacttcgagtcaccttttaaaaacagtgaagccacgtgtgtggaaaccaggggactggagtcgtgaacagctgaatgaaacgacagtccttgctccacatgaaacaatctttcgagccgaagatctatctgtgattcttaaagcgtatgtgttggtgacgtccttaacccctttgcgtgcattcattcattcgacgggcacagtttggaatccaccaaagaaaaaacgcttcactgtcaagctgcaaacattttttgagacattcctgagagccagttcacctcaacaggcttttgacattatgaaggaagcaattggcaaactactgctagcggctgaagtattcagtgaaacatctactctgggaccaaagaccttccatagatgcagattctgctttcaacttctaacttttgatattggttatggcagtttcatgtaccctgtagtgctccaggtacacgagcatttaaattttcaagattatgataatatggattttgaggaccaaaatacagaagaattccttttaaatgacactttcaattttctcttccctaatgaatcatcactttccatattttctgagatatttcagagactttatagatcagatgttttcaagggtgaaaactatcaaaaggaactaaatcagtgtctgtccttagaagaaattaactcaattatgactttcataaaggaacttggaagtctgggacaattccaactgctcttcccatctactactcctgggattcagtcactgatgcatgaattttatgatgtggcaaatcctgtgggaaatcctggctcagtcctgacccaatactggtctcttttaaatgtatttgaacaatttcagttcatgaataaaaagacacagccacatccactggaatggaattctttcacagaagataagaacattgaaaaaccacaagtgccatttgatgcaatagaaaataaaaaagctgcagttccacaaa

SEQ ID NO: 112869 - DNA, 2219 bp, Homo sapiens
  Payload ID: 2088
  Gene Symbol: CPED1
  Gene Name: cadherin-like and PC-esterase domain containing 1
  ENST ID: ENST00000428526
  CDS Start-End: 572-2219
aaaactaaatgaagggaagcatacaaaaggctgaaagcaagactgctttaaaaccggaggaaaattgaggaactgctaaggcaacctggcctgagttcagctgtgcaacaggcactttgggttttaatcttttgcgttcttcaatgctgttttcagactccagatatactttggtattgttttctctcttcctgcaaagctgaggcagagtcggactcctttactgtgagttgaaagatgtgagaataaggcattgctggaagcaacagtttggcagcctggggtacactcaggttattcgttacaactattattatttgatgtctttttttaaactcaggtcatccacttttgactgtcatccatggaagagctcttattaaaagcctcagactttcgggacctatgattctttggcacaaccttttggaaaattcttaagcagggatgaagcaaacttgattggagttggggaaaaagaagacagattagtatttttcatgctgacaaaaaatagctgctatgacttttcccgcaacgtggacaggggccaagtgaagctgaactggtcatggtctgtcgcccagtgttcccttgtcgtcggcgattttgcccccgacccttcttggtgggcttagtggtggcaatctgtctcttctaccagactctgaccctccgagggtcgaggaagctcacagccgctgcccctggggctgtcccacacacatccactgaaacccaggcaagcagatgcaagaaaggattctctcaggacaaacagtgcttccttctctctggtaatgcccaggaaaccagaaaggtcaaagaatcaatggagacacactttggcagccatggccgaagggccatactctacaggcctcctttctacagcaaaacagagcttcagctacaccagcacattctgactcaacatggctatacggttgtcatcgctgaagaaaggctcaatgctggcctagggccggggctactagaacaaggtgatctgggctcttgggatctgctcatttgcctgtcttctaagaaagcagaaggaacaccctgtatatccaaggaagtcatgtgccagttaggtttacatcaaaaggcaaacagattaccagaaatacagcagccactttgcagaaaggaaggattatgtcaaatagttagaagattcccagaactgcaacttccagtgagtccctctgtgtgtctggatcagggaatgcaattaaagccgagtacttcgagtcaccttttaaaaacagtgaagccacgtgtgtggaaaccaggggactggagtcgtgaacagctgaatgaaacgacagtccttgctccacatgaaacaatctttcgagccgaagatctatctgtgattcttaaagcgtatgtgttggtgacgtccttaacccctttgcgtgcattcattcattcgacgggcacagtttggaatccaccaaagaaaaaacgcttcactgtcaagctgcaaacattttttgagacattcctgagagccagttcacctcaacaggcttttgacattatgaaggaagcaattggcaaactactgctagcggctgaagtattcagtgaaacatctactctgggaccaaagaccttccatagatgcagattctgctttcaacttctaacttttgatattggttatggcagtttcatgtaccctgtagtgctccaggtacacgagcatttaaattttcaagattatgataatatggattttgaggaccaaaatacagaagaattccttttaaatgacactttcaattttctcttccctaatgaatcatcactttccatattttctgagatatttcagagactttatagatcagatgttttcaagggtgaaaactatcaaaaggaactaaatcagtgtctgtccttagaagaaattaactcaattatgactttcataaaggaacttggaagtctgggacaattccaactgctcttcccatctactactcctgggattcagtcactgatgcatgaattttatgatgtggcaaatcctgtgggaaatcctggctcagtcctgacccaatactggtctcttttaaatgtatttgaacaatttcagttcatgaataaaaagacacagccacatccactggaatggaattctttcacagaagataagaacattgaaaaaccacaagtgccatttgatgcaatagaaaataaaaaag

SEQ ID NO: 112870 - DNA, 2501 bp, Homo sapiens
  Payload ID: 2088
  Gene Symbol: CPED1
  Gene Name: cadherin-like and PC-esterase domain containing 1
  Uniprot ID: A4D0V7
  ENST ID: ENST00000450913
  CDS Start-End: 24-2375
ggccaagtgaagctgaactggtcatggtctgtcgcccagtgttcccttgtcgtcggcgattttgcccccgacccttcttggtgggcttagtggtggcaatctgtctcttctaccagactctgaccctccgagggtcgaggaagctcacagccgctgcccctggggctgtcccacacacatccactgaaacccaggcaagcagatgcaagaaaggattctctcaggacaaacagtgcttccttctctctggtaatgcccaggaaaccagaaaggtcaaagaatcaatggagacacactttggcagccatggccgaagggccatactctacaggcctcctttctacagcaaaacagagcttcagctacaccagcacattctgactcaacatggctatacggttgtcatcgctgaagaaaggctcaatgctggcctagggccggggctactagaacaaggtgatctgggctcttgggatctgctcatttgcctgtcttctaagaaagcagaaggaacaccctgtatatccaaggaagtcatgtgccagttaggtttacatcaaaaggcaaacagattaccagaaatacagcagccactttgcagaaaggaaggattatgtcaaatagttagaagattcccagaactgcaacttccagtgagtccctctgtgtgtctggatcagggaatgcaattaaagccgagtacttcgagtcaccttttaaaaacagtgaagccacgtgtgtggaaaccaggggactggagtcgtgaacagctgaatgaaacgacagtccttgctccacatgaaacaatctttcgagccgaagatctatctgtgattcttaaagcgtatgtgttggtgacgtccttaacccctttgcgtgcattcattcattcgacgggcacagtttggaatccaccaaagaaaaaacgcttcactgtcaagctgcaaacattttttgagacattcctgagagccagttcacctcaacaggcttttgacattatgaaggaagcaattggcaaactactgctagcggctgaagtattcagtgaaacatctactctgggaccaaagaccttccatagatgcagattctgctttcaacttctaacttttgatattggttatggcagtttcatgtaccctgtagtgctccaggtacacgagcatttaaattttcaagattatgataatatggattttgaggaccaaaatacagaagaattccttttaaatgacactttcaattttctcttccctaatgaatcatcactttccatattttctgagatatttcagagactttatagatcagatgttttcaagggtgaaaactatcaaaaggaactaaatcagtgtctgtccttagaagaaattaactcaattatgactttcataaaggaacttggaagtctgggacaattccaactgctcttcccatctactactcctgggattcagtcactgatgcatgaattttatgatgtggcaaatcctgtgggaaatcctggctcagtcctgacccaatactggtctcttttaaatgtatttgaacaatttcagttcatgaataaaaagacacagccacatccactggaatggaattctttcacagaagataagaacattgaaaaaccacaagtgccatttgatgcaatagaaaataaaaaagctgcagttccacaaattaaaaatgaaaataaagaaatacattgcagtgatgatgaaaacacaccatgtcatatcaagcagatcttcacacatccacatttggaactaaatcctgactttcatccaaagatcaaagattattactgtgaagtcccatttgatgtggtaacagtgacaattggagtggaaactcctaagtgtctgtgcaaggtgcacctgtacgagcaggcagggccaagctttgccagctaccctctgggcttaggaatgaacaaaatctcaatatttgttgtggatgaatctccagcacacggtgagactctgatcacgtacaaactcaccatctatagagaagaccgcccaagtctgcccttgtttgaggccttcacagcatgtggttttgtgcaggattgtggtttgctgattcatccagaggaaacctgtgggttacagcctatttcttctgactacattgaagccattttacagtctgaactaaaaagatgtccatctggggacatgaaaggccagtggattgtgccttgccttagttgttcggacaacaggacgtgtgactggagagaaataacctggcagccccacaactgccaatatggtgtcctaactaagcctcaactccagcagtgcctgggaggaaggaagttgggtgtcgatgtccagagagttcctagaagccgtaattgaagacacaatccagtcatcctgggaccctaaatgacctccctgccccacccctgcacataaacctgacttgaatcacctggactatttttctgagagagtaataaactttaattgggtttgacctat

SEQ ID NO: 112871 - DNA, 2189 bp, Homo sapiens
  Payload ID: 2088
  Gene Symbol: CPED1
  Gene Name: cadherin-like and PC-esterase domain containing 1
  ENST ID: ENST00000423795
  CDS Start-End: 253-1944
aattgaatcatgggtgcggtttcccccatcctattctcgtggtagtgagtaagtctcacgagatctgatggttttataagggattttccctttcacttggccctcattcgctcctgcctgccaccatgtaaggcaaacagattaccagaaatacagcagccactttgcagaaaggaaggattatgtcaaatagttagaagattcccagaactgcaacttccagtgagtccctctgtgtgtctggatcagggaatgcaattaaagccgagtacttcgagtcaccttttaaaaacagtgaagccacgtgtgtggaaaccaggggactggagtcgtgaacagctgaatgaaacgacagtccttgctccacatgaaacaatctttcgagccgaagatctatctgtgattcttaaagcgtatgtgttggtgacgtccttaacccctttgcgtgcattcattcattcgacgggcacagtttggaatccaccaaagaaaaaacgcttcactgtcaagctgcaaacattttttgagacattcctgagagccagttcacctcaacaggcttttgacattatgaaggaagcaattggcaaactactgctagcggctgaagtattcagtgaaacatctactctgggaccaaagaccttccatagatgcagattctgctttcaacttctaacttttgatattggttatggcagtttcatgtaccctgtagtgctccaggtacacgagcatttaaattttcaagattatgataatatggattttgaggaccaaaatacagaagaattccttttaaatgacactttcaattttctcttccctaatgaatcatcactttccatattttctgagatatttcagagactttatagatcagatgttttcaagggtgaaaactatcaaaaggaactaaatcagtgtctgtccttagaagaaattaactcaattatgactttcataaaggaacttggaagtctgggacaattccaactgctcttcccatctactactcctgggattcagtcactgatgcatgaattttatgatgtggcaaatcctgtgggaaatcctggctcagtcctgacccaatactggtctcttttaaatgtatttgaacaatttcagttcatgaataaaaagacacagccacatccactggaatggaattctttcacagaagataagaacattgaaaaaccacaagtgccatttgatgcaatagaaaataaaaaagctgcagttccacaaattaaaaatgaaaataaagaaatacattgcagtgatgatgaaaacacaccatgtcatatcaagcagatcttcacacatccacatttggaactaaatcctgactttcatccaaagatcaaagattattactgtgaagtcccatttgatgtggtaacagtgacaattggagtggaaactcctaagtgtctgtgcaaggtgcacctgtacgagcaggcagggccaagctttgccagctaccctctgggcttaggaatgaacaaaatctcaatatttgttgtggatgaatctccagcacacggtgagactctgatcacgtacaaactcaccatctatagagaagaccgcccaagtctgcccttgtttgaggccttcacagcatgtggttttgtgcaggattgtggtttgctgattcatccagaggaaacctgtgggttacagcctatttcttctgactacattgaagccattttacagtctgaactaaaaagatgtccatctggggacatgaaaggccagtggattgtgccttgccttagttgttcggacaacaggacgtgtgactggagagaaataacctggcagccccacaactgccaatatggtgtcctaactaagcctcaactccagcagtgcctgggaggaaggaagttgggtgtcgatgtccagagagttcctagaagccgtaattgaagacacaatccagtcatcctgggaccctaaatgacctccctgccccacccctgcacataaacctgacttgaatcacctggactatttttctgagagagtaataaactttaattgggtttgacctattccaagttttttgggctatctgttacagtgcttagcttatctcacctaatacagggactatgcaaccaagaaactggaaataaaaacaaagataattaaaccattttataataagccta

SEQ ID NO: 112872 - DNA, 553 bp, Homo sapiens
  Payload ID: 2088
  Gene Symbol: CPED1
  Gene Name: cadherin-like and PC-esterase domain containing 1
  ENST ID: ENST00000520801
  CDS Start-End: 1-183
agatgcaagaaaggattctctcaggacaaacagtgcttccttctctctggtaatgcccaggaaaccagaaaggttgagttttttggcttctcagggcagccactagagaagctcgcccctgggtgggggtcgtcctgcaggtgcaaaggtgaagtggactctccttttcaatcagtactgtgagtaggagcttccaggtctgtgcttcagagacagtgaaaacgctgtccttagtttgatgaccacaacaatggtgatctgggctcttgggatctgctcatttgcctgtcttctaagaaagcagaaggaacaccctgtatatccaaggaagtcatgtgccagttaggtttacatcaaaaggcaaacagattaccagaaatacagcagccactttgcagaaaggaaggattatgtcaaatagttagaagattcccagaactgcaacttccagtgagtccctctgtgtgtctggatcagggaatgcaattaaagccgagtacttcgagtcaccttttaaaaacagtgaagccacgtgtgtggaaaccaggggact

SEQ ID NO: 112873 - DNA, 11139 bp, Homo sapiens
  Payload ID: 2089
  Gene Symbol: CDH23
  Gene Name: cadherin-related 23
  ENST ID: ENST00000224721
  CDS Start-End: 391-10470
gcggcggcggcggctcgggagagagggacgcgggctgcaggcgcgatgcttggctagaggacgcgtccgacggcggccggacgctgaggtggtcggggctagtcagcccggcctgggcatggagcgcggggtggcagagcctctggacgtttggggcgcgcccagtccgagcccccggcgcgcctgaagttgcgagcggcgagcggcgagcggcgagcggcccgcggagacccaggagctgccggcacgccgcggatgagccttcgcgccggcgggaagacgcggcggtggccagggccagagcaggcggcccgcgggggccgatccggcggagagcagagcccgaggcgaggcgaggcgcggcgccgctgcacacacgcacacggagccatggggcgccatgttgccaccagctgccacgtggcctggcttttggtgctgatctctggatgctggggccaggtgaaccggctgcccttcttcaccaaccacttctttgatacatacctgctgatcagcgaggacacgcctgtgggttcttctgtgacccagttgctggcccaagacatggacaatgaccccctggtgtttggcgtgtctggggaggaggcctctcgcttctttgcagtggagcctgacactggcgtggtgtggctccggcagccactggacagagagaccaagtcagagttcaccgtggagttctctgtcagcgaccaccagggggtgatcacacggaaggtgaacatccaggttggggatgtgaatgacaacgcgcccacatttcacaatcagccctacagcgtccgcatccctgaggtaggagccactgggaatacaccagtggggacgcccatcttcatcgtgaatgccacagaccccgacttgggggcagggggcagcgtcctctactccttccagcccccctcccaattcttcgccattgacagcgcccgcggtatcgtcacagtgatccgggagctggactacgagaccacacaggcctaccagctcacggtcaacgccacagatcaagacaagaccaggcctctgtccaccctggccaacttggccatcatcatcacagatgtccaggacatggaccccatcttcatcaacctgccttacagcaccaacatctacgagcattctcctccgggcacgacggtgcgcatcatcaccgccatagaccaggataaaggacgtccccggggcattggctacaccatcgtttcagggaataccaacagcatctttgccctggactacatcagcggagtgctgaccttgaatggcctgctggaccgggagaaccccctgtacagccatggcttcatcctgactgtgaagggcacggagctgaacgatgaccgcaccccatctgacgctacagtcaccacgaccttcaatatcctggttattgacatcaatgacaatgccccggagttcaacagctccgagtacagcgtggccatcactgagctggcacaggtcggctttgcccttccactcttcatccaggtggtggacaaggatgagaatttgggcctgaacagcatgtttgaggtgtacttggtggggaacaactcccaccacttcatcatctccccgacctccgtccaggggaaggcggacattcgtattcgggtggccatcccactggactacgagaccgtggaccgctacgactttgatctctttgccaatgagagtgtgcctgaccatgtgggctatgccaaggtgaagatcactctcatcaatgaaaatgacaaccggcccatcttcagccagccactgtacaacatcagcctgtacgagaacgtcaccgtggggacctctgtgctgacagtcctggcaactgacaatgatgcaggcacctttggggaagtcagctacttcttcagtgatgaccctgacaggttctcgctggacaaggacacgggactcatcatgctgattgccaggctggactatgagctcatccagcgcttcaccctgacgatcattgcccgggacgggggcggcgaggagaccacaggccgggtcaggatcaatgtgttggatgtcaacgacaacgtgcccaccttccagaaggatgcctacgtgggtgctctgcgggagaacgagccttctgtcacacagctggtgcggctccgggcaacagatgaagactcccctcccaacaaccagatcacctacagcattgtcagtgcatctgcctttggcagctacttcgacatcagcctgtacgagggctatggagtgatcagcgtcagtcgccccctggattatgaacagatatccaatgggctgatttatctgacggtcatggccatggatgctggcaacccccctctcaacagcaccgtccctgtcaccatcgaggtgtttgatgagaatgacaaccctcccaccttcagcaagcccgcctacttcgtctccgtggtggagaacatcatggcaggagccacggtgctgttcctgaatgccacagacctggaccgctcccgggagtacggccaggagtccatcatctactccttggaaggctccacccagtttcggatcaatgcccgctcaggggaaatcaccaccacgtctctgcttgaccgagagaccaagtctgaatacatcctcatcgttcgcgcagtggacgggggtgtgggccacaaccagaaaactggcatcgccaccgtaaacatcaccctcctggacatcaatgacaaccaccccacgtggaaggacgcaccctactacatcaacctggtggagatgacccctccagactctgatgtgaccacggtggtggctgttgacccagacctgggggagaatggcaccctggtgtacagcatccagccacccaacaagttctacagcctcaacagcaccacgggcaagatccgcaccacccacgccatgctggaccgggagaaccccgacccccatgaggccgagctgatgcgcaaaatcgtcgtctctgttactgactgtggcaggccccctctgaaagccaccagcagtgccacagtgtttgtgaacctcttggatctcaatgacaatgaccccacctttcagaacctgccttttgtggccgaggtgcttgaaggcatcccggcgggggtctccatctaccaagtggtggccatcgacctcgatgagggcctgaacggcctggtgtcctaccgcatgccggtgggcatgccccgcatggacttcctcatcaacagcagcagcggcgtggtggtcaccaccaccgagctggaccgcgagcgcatcgcggagtaccagctgcgggtggtggccagtgatgcaggcacgcccaccaagagctccaccagcacgctcaccatccatgtgctggatgtgaacgacgagacgcccaccttcttcccggccgtgtacaatgtgtctgtgtccgaggacgtgccacgcgagttccgggtggtctggctgaactgcacggacaacgacgtgggcctcaatgcagagctcagctacttcatcacaggtggcaacgtggatgggaagttcagcgtgggttaccgcgatgccgttgtgagaaccgtggtgggcctggaccgggagaccacagccgcctacatgctcatcctggaggccatcgacaacggccctgtagggaagcgacacacgggcacagccaccgtgttcgtcactgtcctggatgtgaatgacaaccggcccatctttctgcagagcagctatgaggccagcgtccctgaggacatccctgaaggccacagcatcttgcagctgaaagccacggacgcagatgagggcgagtttgggcgtgtgtggtaccgcatcctccatggtaaccatggcaacaacttccggatccatgtcagcaatgggctcctgatgcgagggccccggcccctggaccgggagcggaactcatcccacgtgctgatagtggaggcctacaaccacgacctgggccccatgcggagctccgtcagggtgattgtgtacgtggaggacatcaacgatgaggcccccgtgttcacacagcagcagtacagccgtctggggcttcgagagaccgcaggcattggaacgtcagtcatcgtggtccaagccacagaccgagactctggggatggtggcctggtgaactaccgcatcctgtcgggcgcagaggggaagtttgagattgacgagagcacagggcttatcatcaccgtgaattacctggactacgagaccaagaccagctacatgatgaatgtgtcggccactgaccaggccccgcccttcaaccagggcttctgcagcgtctacatcactctgctcaacgagctggacgaggccgtgcagttctccaatgcctcatacgaggctgccatcctggagaatctggcactgggtactgagattgtgcgggtccaggcctactccatcgacaacctcaaccaaatcacgtaccgcttcaacgcctacaccagcacccaggccaaagccctcttcaagatagacgccatcacgggtgtgatcacagtccagggcctggtggaccgtgagaagggcgacttctataccttgacagtggtggcagatgacggcggccccaaggtggactccaccgtgaaggtctacatcactgtgctggacgagaatgacaacagcccccggtttgacttcacctccgactcggcggtcagcatacccgaggactgccctgtgggccagcgagtggctactgtcaaggcctgggaccctgatgctggcagcaatgggcaggtggtcttctccctggcctctggcaacatcgcgggggcctttgagatcgtcaccaccaatgactccattggcgaagtgtttgtggccaggcccctggacagagaagagctggatcactacatcctccaggttgtggcttctgaccgaggcacccctccacggaagaaggaccacatcctgcaggtgaccatcctggacatcaatgacaaccctccagtcatcgagagcccctttggatacaatgtcagtgtgaatgagaacgtgggtggaggtactgctgtggtccaggtgagagccactgaccgtgacatcgggatcaacagtgttctgtcctactacatcaccgagggcaacaaggacatggccttccgcatggaccgcatcagcggtgagatcgccacacggcctgccccgcctgaccgcgagcgccagagcttctaccacctggtggccactgtggaggacgagggcaccccaaccctgtcggccaccacgcacgtgtacgtgaccattgtggatgagaatgataacgcgcccatgttccagcagccccactatgaggtgctgctggatgagggcccagacacgctcaacaccagcctcatcaccatccaggcactggacctggatgagggtcccaacggcacagtcacctatgccatcgtcgcaggcaacatcgtcaacaccttccgcatcgacagacacatgggtgtcatcactgctgccaaagagctggactacgagatcagccacggccgctacaccctgatcgtcactgccacagaccagtgccccatcttatcccaccgcctcacctctaccaccacggtgcttgtgaatgtgaatgacatcaacgacaatgtgcctaccttcccccgggactatgagggaccatttgaagtcactgagggccagccggggcccagagtgtggaccttcctggcccatgaccgagactcaggacccaacgggcaggtggagtacagcatcatggatggagaccctctgggggagtttgtgatctctcctgtggagggggtgctaagggtccggaaggacgtggagctggaccgggagaccatcgccttctacaacctgaccatctgtgcccgtgaccgggggatgcccccactcagctccacaatgctggtggggatccgggtgctggacatcaacgacaacgaccctgtgctgctgaacctgcccatgaacatcaccatcagcgagaacagccctgtctccagctttgtcgcccatgtcctggccagtgacgctgacagtggctgcaatgcacgcctcaccttcaacatcactgcgggcaaccgcgagcgggccttcttcatcaatgccacgacagggatcgtcactgtgaaccggcccctggaccgcgagcggatcccagagtacaagctgaccatttctgtgaaggacaacccggagaatccacgcatagccaggagggattatgacttgcttctgatcttcctttctgatgagaatgacaaccaccccctcttcactaaaagcacctaccaggcagaggtgatggaaaactctcccgctggcacccctctcacggtgctcaatgggcccatcctggccctggatgcagaccaagacatctacgccgtggtgacctaccagctgctgggtgcccagagtggcctctttgacatcaacagcagcaccggtgtggtgaccgtgaggtcaggtgtcatcattgaccgggaggcattctcgccacccatcctggagctgctgctgctggctgaggacatcgggctgctcaacagcacggcccacctgctcatcaccatcctggatgacaatgacaaccggcccacctttagccctgccaccctcactgtccatctgctagagaactgcccgcctggattctcagtccttcaagtcacagccacagatgaggacagtggcctcaatggggagctggtctaccgaatagaagctggggctcaggaccgcttcctcattcatctggtcaccggggtcatccgtgttggtaatgccaccatcgacagagaggagcaggagtcctacaggctaacggtggtggccaccgaccggggcaccgttcctctctcgggcacagccattgtcaccattctgatcgatgacatcaatgactcccgccccgagttcctcaaccccatccagacagtgagcgtgctggagtcggctgagccaggcactgtcattgccaatatcacggccattgaccacgacctcaacccaaagctagagtaccacattgtcggcattgtggccaaggacgacactgatcgcctggtgcccaaccaggaggacgcctttgctgtgaatatcaacacaggatctgtaatggtgaagtcccccatgaatcgggagctggttgccacctatgaggtcactctctcagtgattgacaatgccagcgacctaccagagcgctctgtcagtgtgccaaatgccaagctgactgtcaacgtcctggacgtcaatgacaatacgccccagttcaagccctttgggatcacctactacatggagcggatcctggagggggccacccctgggaccacactcattgctgtggcagccgtggaccctgacaagggccttaatgggctggtcacctacaccctgctggacctggtgcccccagggtatgtccagctggaggactcctcggcagggaaggtcattgccaaccggacagtggactacgaggaggtgcactggctcaactttaccgtgagggcctcagacaacgggtccccgccccgggcagctgagatccctgtctacctggaaatcgtggacatcaatgacaacaaccccatctttgaccagccctcctaccaggaggctgtctttgaggatgtgcctgtgggcacaatcatcctgacagtcactgccactgatgctgactcaggcaactttgcactcattgagtacagccttggagatggagagagcaagtttgccatcaaccccaccacgggtgacatctatgtgctgtcttctctggaccgggagaagaaggaccactatatcctgactgccttggccaaagacaaccctggggatgtagccagcaaccgtcgcgaaaattcagtgcaggtggtgatccaagtgctggatgtcaatgactgccggccacagttctccaagccccagttcagcacaagcgtgtatgagaatgagccggcgggcacctcggtcatcaccatgatggccactgaccaggatgaaggtcccaatggagagttgacctactcacttgagggccctggcgtggaggccttccatgtggacatggactcgggcttggtgaccacacagcggccactgcagtcctacgagaagttcagtctgaccgtggtggccacagatggtggagagcccccactctggggcaccaccatgctcctggtggaggtcatcgacgtcaatgacaaccgccctgtctttgtgcgcccacccaacggcaccatcctccacatcagagaggagatcccgctgcgctccaacgtgtacgaggtctacgccacggacaaggatgagggcctcaacggggcggtgcgctacagcttcctgaagactgcgggcaaccgggactgggagttcttcatcatcgacccaatcagcggcctcatccagactgctcagcgcctggaccgcgagtcgcaggcggtgtacagcctcatcttggtggccagcgacctgggccagccagtgccatacgagactatgcagccgctgcaggtggccctggaggacatcgatgacaacgaaccccttttcgtgaggcctccaaaaggcagcccccagtaccagctgctgacagtgcctgagcactcaccacgcggcaccctcgtgggcaacgtgacaggcgcagtggatgcagatgagggccccaacgcgatcgtgtactacttcatcgcagccggcaacgaagagaagaacttccatctgcagcccgatgggtgtctgctggtgctgcgggacctggaccgggagcgagaagccatcttctccttcatcgtcaaggcctccagcaatcgcagctggacacctccccgtggaccctccccaaccctcgacctggttgctgacctcacactgcaggaggtgcgcgttgtgctagaggacatcaacgaccagccaccacgcttcaccaaggctgagtacactgcaggggtggccaccgacgccaaggtgggctcagagttgatccaggtgctggccctggatgcagacattggcaacaacagccttgtcttctacagcattctggccatccactacttccgggcccttgccaacgactctgaagatgtgggccaggtcttcaccatggggagcatggacggcattctgcgcaccttcgacctcttcatggcctacagccccggctacttcgtggtggacattgtggcccgagacctggcaggccacaacgacacggccatcatcggcatctacatcctgagggacgaccagcgcgtcaagatcgtcattaacgagatccccgaccgtgtgcgcggcttcgaggaggagttcatccacctgctctccaacatcactggggccattgtcaatactgacaatgtgcagttccatgtggacaagaagggccgggtgaactttgcgcagacagaactgcttatccacgtggtgaaccgcgataccaaccgcatcctggacgtggaccgggtgatccagatgatcgatgagaacaaggagcagctacggaatcttttccggaactacaacgtcctggacgtgcagcctgccatctctgtccggctgccggatgacatgtctgccctgcagatggcgatcatcgtcctggctatcctcctgttcctggccgccatgctctttgtcctcatgaactggtactacaggactgtacacaagaggaagctcaaggccattgtggctggctcagctgggaatcgtggcttcatcgacatcatggacatgcctaacaccaacaagtactcctttgatggagccaaccctgtgtggctggatcccttctgtcggaacctggagctggccgcccaggcggagcatgaggatgacctaccggagaacctgagtgagatcgccgacctgtggaacagccccacgcgcacccatggaacttttgggcgtgagccagcagctgtcaagcctgatgatgaccgatacctgcgggctgccatccaggagtatgacaacattgccaagctgggccagatcattcgtgaggggccaatcaagggctcgctgctgaaggtggtcctggaggattacctgcggctcaaaaagctctttgcacagcggatggtgcaaaaagcctcctcctgccactcctccatctctgagctgatacagactgagctggacgaggagccaggagaccacagcccagggcagggtagcctgcgcttccgccacaagccaccagtggagctcaaggggcccgatgggatccatgtggtgcacggcagcacgggcacgctgctggccaccgacctcaacagcctgcccgaggaagaccagaagggcctgggccgctcgctggagacgctgaccgctgccgaggccactgccttcgagcgcaacgcccgcacagaatccgccaaatccacacccctgcacaaacttcgcgacgtgatcatggagacccccctggagatcacagagctgtgactagacagggaagccttgtgggtgtgagcagcacccatccaccgtcccctcccagggagcaagggcagggacagggccggtcgggggggaccctccaaggccaggccttggggacaaccttggcttggccctggcagcccgcatcagctgctcagatcccacttttgccagacgctcattcagcatctgacctctaccttcataagatctgttatttttataagaaaaccaaacaaaaatgttaagcatctaaggacaaggtaaggagggtcactggggcccaagagtctggggaccagcttggctcaggctgagctgaaagaggccaaacaggccctcctccctcccagctccaccccgcaagcaccatcccctccggctaagcaggcgcaagggaggcccagcgcggacatcccctgctggccggacacccgactccagtccaagtctcgctacatttccgccacatccctctctgctggacgtccaggtggaggtggcatccccacgtggacaagaaagtcaatgtcaatgaacaagcattctctccatttcactggcttcccaaatgtgtgcccagcttataaacagaagtgactgatgttccctccggttttgaatgtggagtgtttgtgtgtgttccttttttaaattaagttattccctcaa

SEQ ID NO: 112874 - DNA, 3954 bp, Homo sapiens
  Payload ID: 2089
  Gene Symbol: CDH23
  Gene Name: cadherin-related 23
  ENST ID: ENST00000299366
  CDS Start-End: 388-3573
gcggcggcggctcgggagagagggacgcgggctgcaggcgcgatgcttggctagaggacgcgtccgacggcggccggacgctgaggtggtcggggctagtcagcccggcctgggcatggagcgcggggtggcagagcctctggacgtttggggcgcgcccagtccgagcccccggcgcgcctgaagttgcgagcggcgagcggcgagcggcgagcggcccgcggagacccaggagctgccggcacgccgcggatgagccttcgcgccggcgggaagacgcggcggtggccagggccagagcaggcggcccgcgggggccgatccggcggagagcagagcccgaggcgaggcgaggcgcggcgccgctgcacacacgcacacggagccatggggcgccatgttgccaccagctgccacgtggcctggcttttggtgctgatctctggatgctggggccaggtgaaccggctgcccttcttcaccaaccacttctttgatacatacctgctgatcagcgaggacacgcctgtgggttcttctgtgacccagttgctggcccaagacatggacaatgaccccctggtgtttggcgtgtctggggaggaggcctctcgcttctttgcagtggagcctgacactggcgtggtgtggctccggcagccactggacagagagaccaagtcagagttcaccgtggagttctctgtcagcgaccaccagggggtgatcacacggaaggtgaacatccaggttggggatgtgaatgacaacgcgcccacatttcacaatcagccctacagcgtccgcatccctgagaatacaccagtggggacgcccatcttcatcgtgaatgccacagaccccgacttgggggcagggggcagcgtcctctactccttccagcccccctcccaattcttcgccattgacagcgcccgcggtatcgtcacagtgatccgggagctggactacgagaccacacaggcctaccagctcacggtcaacgccacagatcaagacaagaccaggcctctgtccaccctggccaacttggccatcatcatcacagatgtccaggacatggaccccatcttcatcaacctgccttacagcaccaacatctacgagcattctcctccgggcacgacggtgcgcatcatcaccgccatagaccaggataaaggacgtccccggggcattggctacaccatcgtttcagggaataccaacagcatctttgccctggactacatcagcggagtgctgaccttgaatggcctgctggaccgggagaaccccctgtacagccatggcttcatcctgactgtgaagggcacggagctgaacgatgaccgcaccccatctgacgctacagtcaccacgaccttcaatatcctggttattgacatcaatgacaatgccccggagttcaacagctccgagtacagcgtggccatcactgagctggcacaggtcggctttgcccttccactcttcatccaggtggtggacaaggatgagaatttgggcctgaacagcatgtttgaggtgtacttggtggggaacaactcccaccacttcatcatctccccgacctccgtccaggggaaggcggacattcgtattcgggtggccatcccactggactacgagaccgtggaccgctacgactttgatctctttgccaatgagagtgtgcctgaccatgtgggctatgccaaggtgaagatcactctcatcaatgaaaatgacaaccggcccatcttcagccagccactgtacaacatcagcctgtacgagaacgtcaccgtggggacctctgtgctgacagtcctggcaactgacaatgatgcaggcacctttggggaagtcagctacttcttcagtgatgaccctgacaggttctcgctggacaaggacacgggactcatcatgctgattgccaggctggactatgagctcatccagcgcttcaccctgacgatcattgcccgggacgggggcggcgaggagaccacaggccgggtcaggatcaatgtgttggatgtcaacgacaacgtgcccaccttccagaaggatgcctacgtgggtgctctgcgggagaacgagccttctgtcacacagctggtgcggctccgggcaacagatgaagactcccctcccaacaaccagatcacctacagcattgtcagtgcatctgcctttggcagctacttcgacatcagcctgtacgagggctatggagtgatcagcgtcagtcgccccctggattatgaacagatatccaatgggctgatttatctgacggtcatggccatggatgctggcaacccccctctcaacagcaccgtccctgtcaccatcgaggtgtttgatgagaatgacaaccctcccaccttcagcaagcccgcctacttcgtctccgtggtggagaacatcatggcaggagccacggtgctgttcctgaatgccacagacctggaccgctcccgggagtacggccaggagtccatcatctactccttggaaggctccacccagtttcggatcaatgcccgctcaggggaaatcaccaccacgtctctgcttgaccgagagaccaagtctgaatacatcctcatcgttcgcgcagtggacgggggtgtgggccacaaccagaaaactggcatcgccaccgtaaacatcaccctcctggacatcaatgacaaccaccccacgtggaaggacgcaccctactacatcaacctggtggagatgacccctccagactctgatgtgaccacggtggtggctgttgacccagacctgggggagaatggcaccctggtgtacagcatccagccacccaacaagttctacagcctcaacagcaccacgggcaagatccgcaccacccacgccatgctggaccgggagaaccccgacccccatgaggccgagctgatgcgcaaaatcgtcgtctctgttactgactgtggcaggccccctctgaaagccaccagcagtgccacagtgtttgtgaacctcttggatctcaatgacaatgaccccacctttcagaacctgccttttgtggccgaggtgcttgaaggcatcccggcgggggtctccatctaccaagtggtggccatcgacctcgatgagggcctgaacggcctggtgtcctaccgcatgccggtgggcatgccccgcatggacttcctcatcaacagcagcagcggcgtggtggtcaccaccaccgagctggaccgcgagcgcatcgcggagtaccagctgcgggtggtggccagtgatgcaggcacgcccaccaagagctccaccagcacgctcaccatccatgtgctggatgtgaacgacgagacgcccaccttcttcccggccgtgtacaatgtgtctgtgtccgaggacgtgccacgcgagttccgggtggtctggctgaactgcacggacaacgacgtgggcctcaatgcagagctcagctacttcatcacaggtgctgccccggcctccgcccacctgtgcaggcctcctggggccctgcctccacccctcccagatggacagccagactaggtgggggcaggtgagggtggaaaagaggtcagggctctactgttgggctttagcctctggtggtgcctcccgaggatttgctcctggctcttcccaagggctttgcagctggatcactctggactggctccctggggacctcctgaacctgttggttgcagggacggggagcatctaccaaggttcattctagagggaggtaaggccccatgattcctagggaggagccctgagccccactccccgccccaagtctgggtgacagagcagtgacttggaggaatgtggcctcatccttccttggggacctgttgagaattcccacctgtttagaggcagatggttttgatctccctaaatgaaatggttttagctcaaaaa

SEQ ID NO: 112875 - DNA, 4329 bp, Homo sapiens
  Payload ID: 2089
  Gene Symbol: CDH23
  Gene Name: cadherin-related 23
  Uniprot ID: Q9H251
  ENST ID: ENST00000398788
  CDS Start-End: 318-3662
ccctgctgcaccctgaactaactgatgttaaccctcttctctcttcctcatggctggcaggcccacaggtttgagctctgtttctctgtcacttcccacctcatctcttctctgcctcaccccattgccttcctccatgcccaccacacccccaccacccttcctgtcctgtggggcctgggccaaggccgtggcccagcctttgcagactgaatgcagccgccctctccccatcctcgctccccagcctgggggacagggagcgagagtaggaagaggaggaggaggaggaggaggaggcggcccagggatctgtaatggtgaagtcccccatgaatcgggagctggttgccacctatgaggtcactctctcagtgattgacaatgccagcgacctaccagagcgctctgtcagtgtgccaaatgccaagctgactgtcaacgtcctggacgtcaatgacaatacgccccagttcaagccctttgggatcacctactacatggagcggatcctggagggggccacccctgggaccacactcattgctgtggcagccgtggaccctgacaagggccttaatgggctggtcacctacaccctgctggacctggtgcccccagggtatgtccagctggaggactcctcggcagggaaggtcattgccaaccggacagtggactacgaggaggtgcactggctcaactttaccgtgagggcctcagacaacgggtccccgccccgggcagctgagatccctgtctacctggaaatcgtggacatcaatgacaacaaccccatctttgaccagccctcctaccaggaggctgtctttgaggatgtgcctgtgggcacaatcatcctgacagtcactgccactgatgctgactcaggcaactttgcactcattgagtacagccttggagatggagagagcaagtttgccatcaaccccaccacgggtgacatctatgtgctgtcttctctggaccgggagaagaaggaccactatatcctgactgccttggccaaagacaaccctggggatgtagccagcaaccgtcgcgaaaattcagtgcaggtggtgatccaagtgctggatgtcaatgactgccggccacagttctccaagccccagttcagcacaagcgtgtatgagaatgagccggcgggcacctcggtcatcaccatgatggccactgaccaggatgaaggtcccaatggagagttgacctactcacttgagggccctggcgtggaggccttccatgtggacatggactcgggcttggtgaccacacagcggccactgcagtcctacgagaagttcagtctgaccgtggtggccacagatggtggagagcccccactctggggcaccaccatgctcctggtggaggtcatcgacgtcaatgacaaccgccctgtctttgtgcgcccacccaacggcaccatcctccacatcagagaggagatcccgctgcgctccaacgtgtacgaggtctacgccacggacaaggatgagggcctcaacggggcggtgcgctacagcttcctgaagactgcgggcaaccgggactgggagttcttcatcatcgacccaatcagcggcctcatccagactgctcagcgcctggaccgcgagtcgcaggcggtgtacagcctcatcttggtggccagcgacctgggccagccagtgccatacgagactatgcagccgctgcaggtggccctggaggacatcgatgacaacgaaccccttttcgtgaggcctccaaaaggcagcccccagtaccagctgctgacagtgcctgagcactcaccacgcggcaccctcgtgggcaacgtgacaggcgcagtggatgcagatgagggccccaacgcgatcgtgtactacttcatcgcagccggcaacgaagagaagaacttccatctgcagcccgatgggtgtctgctggtgctgcgggacctggaccgggagcgagaagccatcttctccttcatcgtcaaggcctccagcaatcgcagctggacacctccccgtggaccctccccaaccctcgacctggttgctgacctcacactgcaggaggtgcgcgttgtgctagaggacatcaacgaccagccaccacgcttcaccaaggctgagtacactgcaggggtggccaccgacgccaaggtgggctcagagttgatccaggtgctggccctggatgcagacattggcaacaacagccttgtcttctacagcattctggccatccactacttccgggcccttgccaacgactctgaagatgtgggccaggtcttcaccatggggagcatggacggcattctgcgcaccttcgacctcttcatggcctacagccccggctacttcgtggtggacattgtggcccgagacctggcaggccacaacgacacggccatcatcggcatctacatcctgagggacgaccagcgcgtcaagatcgtcattaacgagatccccgaccgtgtgcgcggcttcgaggaggagttcatccacctgctctccaacatcactggggccattgtcaatactgacaatgtgcagttccatgtggacaagaagggccgggtgaactttgcgcagacagaactgcttatccacgtggtgaaccgcgataccaaccgcatcctggacgtggaccgggtgatccagatgatcgatgagaacaaggagcagctacggaatcttttccggaactacaacgtcctggacgtgcagcctgccatctctgtccggctgccggatgacatgtctgccctgcagatggcgatcatcgtcctggctatcctcctgttcctggccgccatgctctttgtcctcatgaactggtactacaggactgtacacaagaggaagctcaaggccattgtggctggctcagctgggaatcgtggcttcatcgacatcatggacatgcctaacaccaacaagtactcctttgatggagccaaccctgtgtggctggatcccttctgtcggaacctggagctggccgcccaggcggagcatgaggatgacctaccggagaacctgagtgagatcgccgacctgtggaacagccccacgcgcacccatggaacttttgggcgtgagccagcagctgtcaagcctgatgatgaccgatacctgcgggctgccatccaggagtatgacaacattgccaagctgggccagatcattcgtgaggggccaatcaagggctcgctgctgaaggtggtcctggaggattacctgcggctcaaaaagctctttgcacagcggatggtgcaaaaagcctcctcctgccactcctccatctctgagctgatacagactgagctggacgaggagccaggagaccacagcccagggcagggtagcctgcgcttccgccacaagccaccagtggagctcaaggggcccgatgggatccatgtggtgcacggcagcacgggcacgctgctggccaccgacctcaacagcctgcccgaggaagaccagaagggcctgggccgctcgctggagacgctgaccgctgccgaggccactgccttcgagcgcaacgcccgcacagaatccgccaaatccacacccctgcacaaacttcgcgacgtgatcatggagacccccctggagatcacagagctgtgactagacagggaagccttgtgggtgtgagcagcacccatccaccgtcccctcccagggagcaagggcagggacagggccggtcgggggggaccctccaaggccaggccttggggacaaccttggcttggccctggcagcccgcatcagctgctcagatcccacttttgccagacgctcattcagcatctgacctctaccttcataagatctgttatttttataagaaaaccaaacaaaaatgttaagcatctaaggacaaggtaaggagggtcactggggcccaagagtctggggaccagcttggctcaggctgagctgaaagaggccaaacaggccctcctccctcccagctccaccccgcaagcaccatcccctccggctaagcaggcgcaagggaggcccagcgcggacatcccctgctggccggacacccgactccagtccaagtctcgctacatttccgccacatccctctctgctggacgtccaggtggaggtggcatccccacgtggacaagaaagtcaatgtcaatgaacaagcattctctccatttcactggcttcccaaatgtgtgcccagcttataaacagaagtgactgatgttccctccggttttgaatgtggagtgtttgtgtgtgttccttttttaaattaagttattccctc

SEQ ID NO: 112876 - DNA, 4533 bp, Homo sapiens
  Payload ID: 2089
  Gene Symbol: CDH23
  Gene Name: cadherin-related 23
  ENST ID: ENST00000398809
  CDS Start-End: 391-4533
gcggcggcggcggctcgggagagagggacgcgggctgcaggcgcgatgcttggctagaggacgcgtccgacggcggccggacgctgaggtggtcggggctagtcagcccggcctgggcatggagcgcggggtggcagagcctctggacgtttggggcgcgcccagtccgagcccccggcgcgcctgaagttgcgagcggcgagcggcgagcggcgagcggcccgcggagacccaggagctgccggcacgccgcggatgagccttcgcgccggcgggaagacgcggcggtggccagggccagagcaggcggcccgcgggggccgatccggcggagagcagagcccgaggcgaggcgaggcgcggcgccgctgcacacacgcacacggagccatggggcgccatgttgccaccagctgccacgtggcctggcttttggtgctgatctctggatgctggggccaggtgaaccggctgcccttcttcaccaaccacttctttgatacatacctgctgatcagcgaggacacgcctgtgggttcttctgtgacccagttgctggcccaagacatggacaatgaccccctggtgtttggcgtgtctggggaggaggcctctcgcttctttgcagtggagcctgacactggcgtggtgtggctccggcagccactggacagagagaccaagtcagagttcaccgtggagttctctgtcagcgaccaccagggggtgatcacacggaaggtgaacatccaggttggggatgtgaatgacaacgcgcccacatttcacaatcagccctacagcgtccgcatccctgagaatacaccagtggggacgcccatcttcatcgtgaatgccacagaccccgacttgggggcagggggcagcgtcctctactccttccagcccccctcccaattcttcgccattgacagcgcccgcggtatcgtcacagtgatccgggagctggactacgagaccacacaggcctaccagctcacggtcaacgccacagatcaagacaagaccaggcctctgtccaccctggccaacttggccatcatcatcacagatgtccaggacatggaccccatcttcatcaacctgccttacagcaccaacatctacgagcattctcctccgggcacgacggtgcgcatcatcaccgccatagaccaggataaaggacgtccccggggcattggctacaccatcgtttcagggaataccaacagcatctttgccctggactacatcagcggagtgctgaccttgaatggcctgctggaccgggagaaccccctgtacagccatggcttcatcctgactgtgaagggcacggagctgaacgatgaccgcaccccatctgacgctacagtcaccacgaccttcaatatcctggttattgacatcaatgacaatgccccggagttcaacagctccgagtacagcgtggccatcactgagctggcacaggtcggctttgcccttccactcttcatccaggtggtggacaaggatgagaatttgggcctgaacagcatgtttgaggtgtacttggtggggaacaactcccaccacttcatcatctccccgacctccgtccaggggaaggcggacattcgtattcgggtggccatcccactggactacgagaccgtggaccgctacgactttgatctctttgccaatgagagtgtgcctgaccatgtgggctatgccaaggtgaagatcactctcatcaatgaaaatgacaaccggcccatcttcagccagccactgtacaacatcagcctgtacgagaacgtcaccgtggggacctctgtgctgacagtcctggcaactgacaatgatgcaggcacctttggggaagtcagctacttcttcagtgatgaccctgacaggttctcgctggacaaggacacgggactcatcatgctgattgccaggctggactatgagctcatccagcgcttcaccctgacgatcattgcccgggacgggggcggcgaggagaccacaggccgggtcaggatcaatgtgttggatgtcaacgacaacgtgcccaccttccagaaggatgcctacgtgggtgctctgcgggagaacgagccttctgtcacacagctggtgcggctccgggcaacagatgaagactcccctcccaacaaccagatcacctacagcattgtcagtgcatctgcctttggcagctacttcgacatcagcctgtacgagggctatggagtgatcagcgtcagtcgccccctggattatgaacagatatccaatgggctgatttatctgacggtcatggccatggatgctggcaacccccctctcaacagcaccgtccctgtcaccatcgaggtgtttgatgagaatgacaaccctcccaccttcagcaagcccgcctacttcgtctccgtggtggagaacatcatggcaggagccacggtgctgttcctgaatgccacagacctggaccgctcccgggagtacggccaggagtccatcatctactccttggaaggctccacccagtttcggatcaatgcccgctcaggggaaatcaccaccacgtctctgcttgaccgagagaccaagtctgaatacatcctcatcgttcgcgcagtggacgggggtgtgggccacaaccagaaaactggcatcgccaccgtaaacatcaccctcctggacatcaatgacaaccaccccacgtggaaggacgcaccctactacatcaacctggtggagatgacccctccagactctgatgtgaccacggtggtggctgttgacccagacctgggggagaatggcaccctggtgtacagcatccagccacccaacaagttctacagcctcaacagcaccacgggcaagatccgcaccacccacgccatgctggaccgggagaaccccgacccccatgaggccgagctgatgcgcaaaatcgtcgtctctgttactgactgtggcaggccccctctgaaagccaccagcagtgccacagtgtttgtgaacctcttggatctcaatgacaatgaccccacctttcagaacctgccttttgtggccgaggtgcttgaaggcatcccggcgggggtctccatctaccaagtggtggccatcgacctcgatgagggcctgaacggcctggtgtcctaccgcatgccggtgggcatgccccgcatggacttcctcatcaacagcagcagcggcgtggtggtcaccaccaccgagctggaccgcgagcgcatcgcggagtaccagctgcgggtggtggccagtgatgcaggcacgcccaccaagagctccaccagcacgctcaccatccatgtgctggatgtgaacgacgagacgcccaccttcttcccggccgtgtacaatgtgtctgtgtccgaggacgtgccacgcgagttccgggtggtctggctgaactgcacggacaacgacgtgggcctcaatgcagagctcagctacttcatcacaggtggcaacgtggatgggaagttcagcgtgggttaccgcgatgccgttgtgagaaccgtggtgggcctggaccgggagaccacagccgcctacatgctcatcctggaggccatcgacaacggccctgtagggaagcgacacacgggcacagccaccgtgttcgtcactgtcctggatgtgaatgacaaccggcccatctttctgcagagcagctatgaggccagcgtccctgaggacatccctgaaggccacagcatcttgcaggcagccacggacgcagatgagggcgagtttgggcgtgtgtggtaccgcatcctccatggtaaccatggcaacaacttccggatccatgtcagcaatgggctcctgatgcgagggccccggcccctggaccgggagcggaactcatcccacgtgctgatagtggaggcctacaaccacgacctgggccccatgcggagctccgtcagggtgattgtgtacgtggaggacatcaacgatgaggcccccgtgttcacacagcagcagtacagccgtctggggcttcgagagaccgcaggcattggaacgtcagtcatcgtggtccaagccacagaccgagactctggggatggtggcctggtgaactaccgcatcctgtcgggcgcagaggggaagtttgagattgacgagagcacagggcttatcatcaccgtgaattacctggactacgagaccaagaccagctacatgatgaatgtgtcggccactgaccaggccccgcccttcaaccagggcttctgcagcgtctacatcactctgctcaacgagctggacgaggccgtgcagttctccaatgcctcatacgaggctgccatcctggagaatctggcactgggtactgagattgtgcgggtccaggcctactccatcgacaacctcaaccaaatcacgtaccgcttcaacgcctacaccagcacccaggccaaagccctcttcaagatagacgccatcacggtgaggggctgggggcagggagcaccatttcttccaatctaa

SEQ ID NO: 112877 - DNA, 1759 bp, Homo sapiens
  Payload ID: 2089
  Gene Symbol: CDH23
  Gene Name: cadherin-related 23
  ENST ID: ENST00000398842
  CDS Start-End: 403-1740
cgggagagagggacgcgggctgcaggcgcgatgcttggctagaggacgcgtccgacggcggccggacgctgaggtggtcggggctagtcagcccggcctgggcatggagcgcggggtggcagagcctctggacgtttggggcgcgcccagtccgagcccccggcgcgcctgaagttgcgagcggcgagcggcgagcggcgagcggcccgcggagacccaggagctgccggcacgccgcggatgagccttcgcgccggcgggaagacgcggcggtggccagggccagagcaggcggcccgcgggggccgatccggcggagagcagagcccgaggcgaggcgaggcgcggcgccgctgcacacacgcacacggttcttctgtgacccagttgctggcccaagacatggacaatgaccccctggtgtttggcgtgtctggggaggaggcctctcgcttctttgcagtggagcctgacactggcgtggtgtggctccggcagccactggacagagagaccaagtcagagttcaccgtggagttctctgtcagcgaccaccagggggtgatcacacggaaggtgaacatccaggttggggatgtgaatgacaacgcgcccacatttcacaatcagccctacagcgtccgcatccctgagaatacaccagtggggacgcccatcttcatcgtgaatgccacagaccccgacttgggggcagggggcagcgtcctctactccttccagcccccctcccaattcttcgccattgacagcgcccgcggtatcgtcacagtgatccgggagctggactacgagaccacacaggcctaccagctcacggtcaacgccttggccatcatcatcaccaacctgccttacagcaccaacatctacgagcattctcctccgggcacgacggtgcgcatcatcaccgccatagaccaggataaaggacgtccccggggcattggctacaccatcgtttcagggaataccaacagcatctttgccctggactacatcagcggagtgctgaccttgaatggcctgctggaccgggagaaccccctgtacagccatggcttcatcctgactgtgaagggcacggagctgaacgatgaccgcaccccatctgacgctacagtcaccacgaccttcaatatcctggttattgacatcaatgacaatgccccggagttcaacagctccgagtacagcgtggccatcactgagctggcacaggtcggctttgcccttccactcttcatccaggtggtggacaaggatgagggcctgaacagcatgtttgaggtgtacttggtggggaacaactcccaccacttcatcatctccccgacctccgtccaggggaaggcggacattcgtattcgggtggccatcccactggactacgagaccgtggaccgctacgactttgatctctttgccaatgagagtgtgcctgaccatgtgggctatgccaaggtgaagatcactctcatcaatgaaaatgacaaccggcccatcttcagccagccactgtacaacatcagcctgtacgagaacgtcaccgtggggacctctgtgctgacagtcctggtgagtccccgcttcactgcagggccactgagctctccagggccgactgtggtgaggcacccagagggattttgtccaagggacctcagcaatcagggaaggaggcacccccaaatccctgagctgtgtttgttggtgtattaaataaagtttttggactctt

SEQ ID NO: 112878 - DNA, 7000 bp, Homo sapiens
  Payload ID: 2089
  Gene Symbol: CDH23
  Gene Name: cadherin-related 23
  ENST ID: ENST00000442677
  CDS Start-End: 1-2411
cggacattcgtattcgggtggccatcccactggactacgagaccgtggaccgctacgactttgatctctttgccaatgagagtgtgcctgaccatgtgggctatgccaaggtgaagatcactctcatcaatgaaaatgacaaccggcccatcttcagccagccactgtacaacatcagcctgtacgagaacgtcaccgtggggacctctgtgctgacagtcctggcaactgacaatgatgcaggcacctttggggaagtcagctacttcttcagtgatgaccctgacaggttctcgctggacaaggacacgggactcatcatgctgattgccaggctggactatgagctcatccagcgcttcaccctgacgatcattgcccgggacgggggcggcgaggagaccacaggccgggtcaggatcaatgtgttggatgtcaacgacaacgtgcccaccttccagaaggatgcctacgtgggtgctctgcgggagaacgagccttctgtcacacagctggtgcggctccgggcaacagatgaagactcccctcccaacaaccagatcacctacagcattgtcagtgcatctgcctttggcagctacttcgacatcagcctgtacgagggctatggagtgatcagcgtcagtcgccccctggattatgaacagatatccaatgggctgatttatctgacggtcatggccatggatgctggcaacccccctctcaacagcaccgtccctgtcaccatcgaggtgtttgatgagaatgacaaccctcccaccttcagcaagcccgcctacttcgtctccgtggtggagaacatcatggcaggagccacggtgctgttcctgaatgccacagacctggaccgctcccgggagtacggccaggagtccatcatctactccttggaaggctccacccagtttcggatcaatgcccgctcaggggaaatcaccaccacgtctctgcttgaccgagagaccaagtctgaatacatcctcatcgttcgcgcagtggacgggggtgtgggccacaaccagaaaactggcatcgccaccgtaaacatcaccctcctggacatcaatgacaaccaccccacgtggaaggacgcaccctactacatcaacctggtggagatgacccctccagactctgatgtgaccacggtggtggctgttgacccagacctgggggagaatggcaccctggtgtacagcatccagccacccaacaagttctacagcctcaacagcaccacgggcaagatccgcaccacccacgccatgctggaccgggagaaccccgacccccatgaggccgagctgatgcgcaaaatcgtcgtctctgttactgactgtggcaggccccctctgaaagccaccagcagtgccacagtgtttgtgaacctcttggatctcaatgacaatgaccccacctttcagaacctgccttttgtggccgaggtgcttgaaggcatcccggcgggggtctccatctaccaagtggtggccatcgacctcgatgagggcctgaacggcctggtgtcctaccgcatgccggtgggcatgccccgcatggacttcctcatcaacagcagcagcggcgtggtggtcaccaccaccgagctggaccgcgagcgcatcgcggagtaccagctgcgggtggtggccagtgatgcaggcacgcccaccaagagctccaccagcacgctcaccatccatgtgctggatgtgaacgacgagacgcccaccttcttcccggccgtgtacaatgtgtctgtgtccgaggacgtgccacgcgagttccgggtggtctggctgaactgcacggacaacgacgtgggcctcaatgcagagctcagctacttcatcacaggtggcaacgtggatgggaagttcagcgtgggttaccgcgatgccgttgtgagaaccgtggtgggcctggaccgggagaccacagccgcctacatgctcatcctggaggccatcgacaacggccctgtagggaagcgacacacgggcacagccaccgtgttcgtcactgtcctggatgtgaatgacaaccggcccatctttctgcagagcagctatgaggccagcgtccctgaggacatccctgaaggccacagcatcttgcaggaagacttggcctccccctgcatatctcccgccccacccagaagggcctttcagagtagcggggagaaagagacgtcacaatttcccggaaaggagttgagaagagagccagggcccagcaaggcccagaacagagctgctttcacagagcccttggccgaggctcccctcttgggaagtaaacaggcacaagaagaaagggctcctttgcccagggagcaggcgcaacagctccaaggctcagagggagagaagggaggaccctgaaaacaatttgggtgtgcacccacacctctgcccagaggcctcagttgctgggtggggagggaggcccggagtgaatgagtctctttaccaactatggggtttccgactcggaggctgagccaaacagggaatctgggcctgcccactggggcaggctcccgggcttgggagggacagaagcgtgggaggctggcaatgctcccctccctgcatcgggaccaggaggcgggcaggaaagggctggggagcagggagctgactcccagaaacacagagagcccagaaagccctgaggatttgcgagagtgtggtggctagctccagaaggaggaagtagagggttctctcgatcagggcctcagcttgtgaggacttggagcatacccccctggcctggtgcctgaaacccaattgagagccctccccctcctggacttttccttcttcaggcctcagggcagcctcaacccccaccccaacctccaggaagacagtgcctagtggccagcagggcctgctggtgaggtggatggctacaggctgaatccagcctaggatttgcagggaggccccaggggaagcaaaccaggaagaggttactgagcaggaagggaggaaggaacaaaacccttagggaggaggcctgccccactttctaaacccaaagacttggtttctatttacacaatactactcttactgaaatcctagagccagcgagttaatatagggcagccctgagttctcccatttctcagggagaaatgcagcgtctcaggatgacttctccaaggtcctcttggtaagtttcttgtgaagccggactcactttttgagatcagattgacttggaaggaagggacagtgggcttctccaatagagcctgcttggagagaaatctttctagagtcatctgagggaagatgaggctctgtgttatgccagcttccaccaagactcctgcctcagagggtggggacacacccaggctgggccacgcttcactctgtacacagaagcctcatacttctgtgcacagaactggggagtcaaagtgaggggctggacaatgtctggctctctgcaagctcccaagctggtaggaaagagaagacatagacaaaaaggacccatgctgccaagagaatgttccttttcctccccaagagaggtaggagacagtaggggcggctccaggcaggagggcttcacagagtgggtgtgtgtgaagcataagccacagttagtgggtgacaggtctttcagttttcctggagttttggatcaagatgaggctagaaagattaattggagccagctcccagagggcactgcacactgcgctgaggagctttggctatatccatttggcattagggagccagtgaaggttttggagctggggagtggcaagccagagctcactccttggggagacgtggctggctgcactgtgggtcacagcaggatgggggtggggcagctttgtggtgggatcctggccagctgactgggacaggagctgggcagcccaggtcctccctctgcccacccttcaaatttgggacctgaccaaagtgtttaaccctcgcgttgtgaggagaggtcaagggtttgggattctgagaagcccatcctggggtgggactgctttgacgggtcatcagcaaagcactcaccaaaaccacagatagcatccctagtgtgggcaggacttgggaccccacagctgtcctggagaggtccagaccatcccaccctcggggaggctgccgctttccctgggtgaggtgtggagctgctgtgagctgtcctcctccgagtccaggtggcatcacctccagctgctggaaatgccctgcctcttgccactctgtcacagcacccgccctggcctctgaagggagcctcctcgatcatcttcaatcccttcctgattgatcccaacgtgggtgccctgaagaggggccaccaagacggctgccaagaccatgcttggagagccctgtttgctcctcctcccagctggcacccaggcatctgttccaccaggagggaggcagctgctcccacagggcaccaggcagatgctggcagcacccgggaaacccaaggaagagagccccgaggttttgccccagcactgggccagcacagatgccaggacagtgtcttggccccggtgtaggctgagcatttcacttgactaaagggaacctttgccatttggcaacttctccatgctgggctttggcacctggagggcaaggcttctgtggcgagcgagggtgctgcttctaggaggtggttacgagccccaggttgtaccctgtggagcctcaggccaaaggcccagatgaccacgagtgcacatctcttgaccagaagtctttcatcaagcagcagcgagggggtctgcagagaggaaggtgctcttctgaggatcatctttgggaaagggcgctggcctgggcatgcaaggagcttcggggggtgagtgtgtgtcccagactgcttgggccactgtcttcctgcagcctgcagcaccggtctctgaagcaggaggatctacaggtagacctagggggatgtgggggcatgtttgtggacaccccattacatcttggtagattccatgtagtcacagtggctgcggttgtcctcggggcccggcaggggctgtcgagggacggtgggccggccatggcggaagctgtgcagggagaggcgcaaggagcccaggcgcttccagagccggagctggggctcactggggctcccagggtggtggggcatgcactcgtgagccctgcggcggctcgggtccagcgcggccggcttgcagagcgtcatgaacagcagacaggtggccagcaggaggaagatgcaggccagggcgatgagcatggggagggggtcagttgcctctgcaagggtcccgggagtgacgggagctgagagaaaggcgagggggctgatggctggggagctggcgaggctggggccctctgtgctcatggctcctgcaacagcaacaagacagaagctcaaaggcagatcagctggacccagggcagcgggtatagggaagacttacctagggaatgtggatgggggcaaggcactgttaaactggacagcatcatggccacatcacaggttaagacagcaaggtccagagacatcacaagtctaagtgtacacacagctgagcagtgatggagctgggcccaagctcaggccctcttcctgttccaccctgtgcccatctgccatgcagacaagagggcggtggcctgtccgcattttcaaatcaatcctcatgaatcatcacagggtcttaggcctggaaacttaagaccaactctgtcaataacttgctctgtggccaggaacgagttatggatggtaagaggccgcagctgccagggtccctagcagtaatctaataccaaagctgcaaactgggggcccacgggtgtgtttagttgggtccttgccatgtttttatcaatgtaattatgaatattttcaaaataataacagatttcacaaaaatatatgggtgcctgaattctcttgaaatgtcagaatttcaccactggcattggcccatgttcctgcctcatccctgtgtctggggctgagcagccgctgccccctgtagacagggcactgacctccagctccccaccctcccccacaggcccaccacacaccttatttcacctgcctggccccgtggggattcctgtgactgcttccccatgcagtccaacttgctcccacgacaggtgggaaactgaggtccgaagaggggatttggcattagggagccagtgaaggttttagaggtggggagtgacaagccagagctcactccttgggaaggcttggctggctgcattgtgggtcacagtagggtggggtggggcagcttggtggtgggaaggccaaggccacattgtgagccaatggccaagtgaaggtcagaagcaggtctcctgactcctggccccatggccttgccacccctctggcccccagccctttcggagctcagtgagctgctctgggaacaggtgggaaataaacccacaaggagttgacaagggggctggaaaccccccagggacatcatacacctgacagggcatttcctttcccactgaagatcatcccattagacgcagtgcagcagacggtccttgtcgatggaaaaccaggctgagcttttggctcaatatgtctggggttgtaataaaaatgctcacagatcctggccagcagataacacatgaccagagggtacagatgagcagggccacctggagagcactggctgggccctctcaaggaagtggaggggcctcagcccagaatggtgctgtcagtgccggagtgcaggcccagtgtggtcagctctgtcagtttcccaagagaagccagaaatctggatttttttaaaggcaaacattctagacgtttaaatgttggcagctaattcaaatttgttgaaggcaagaaagaagagaggtggggtgggggagaacacagcaaaagccaaataaacttgatttcaaaataa

SEQ ID NO: 112879 - DNA, 2000 bp, Homo sapiens
  Payload ID: 2089
  Gene Symbol: CDH23
  Gene Name: cadherin-related 23
  ENST ID: ENST00000461841
  CDS Start-End: 389-1981
ggcggcggcggctcgggagagagggacgcgggctgcaggcgcgatgcttggctagaggacgcgtccgacggcggccggacgctgaggtggtcggggctagtcagcccggcctgggcatggagcgcggggtggcagagcctctggacgtttggggcgcgcccagtccgagcccccggcgcgcctgaagttgcgagcggcgagcggcgagcggcgagcggcccgcggagacccaggagctgccggcacgccgcggatgagccttcgcgccggcgggaagacgcggcggtggccagggccagagcaggcggcccgcgggggccgatccggcggagagcagagcccgaggcgaggcgaggcgcggcgccgctgcacacacgcacacggagccatggggcgccatgttgccaccagctgccacgtggcctggcttttggtgctgatctctggatgctggggccaggtgaaccggctgcccttcttcaccaaccacttctttgatacatacctgctgatcagcgaggacacgcctgtgggttcttctgtgacccagttgctggcccaagacatggacaatgaccccctggtgtttggcgtgtctggggaggaggcctctcgcttctttgcagtggagcctgacactggcgtggtgtggctccggcagccactggacagagagaccaagtcagagttcaccgtggagttctctgtcagcgaccaccagggggtgatcacacggaaggtgaacatccaggttggggatgtgaatgacaacgcgcccacatttcacaatcagccctacagcgtccgcatccctgagaatacaccagtggggacgcccatcttcatcgtgaatgccacagaccccgacttgggggcagggggcagcgtcctctactccttccagcccccctcccaattcttcgccattgacagcgcccgcggtatcgtcacagtgatccgggagctggactacgagaccacacaggcctaccagctcacggtcaacgccacagatcaagacaagaccaggcctctgtccaccctggccaacttggccatcatcatcacagatgtccaggacatggaccccatcttcatcaacctgccttacagcaccaacatctacgagcattctcctccgggcacgacggtgcgcatcatcaccgccatagaccaggataaaggacgtccccggggcattggctacaccatcgtttcagggaataccaacagcatctttgccctggactacatcagcggagtgctgaccttgaatggcctgctggaccgggagaaccccctgtacagccatggcttcatcctgactgtgaagggcacggagctgaacgatgaccgcaccccatctgacgctacagtcaccacgaccttcaatatcctggttattgacatcaatgacaatgccccggagttcaacagctccgagtacagcgtggccatcactgagctggcacaggtcggctttgcccttccactcttcatccaggtggtggacaaggatgagaatttgggcctgaacagcatgtttgaggtgtacttggtggggaacaactcccaccacttcatcatctccccgacctccgtccaggggaaggcggacattcgtattcgggtggccatcccactggactacgagaccgtggaccgctacgactttgatctctttgccaatgagagtgtgcctgaccatgtgggctatgccaaggtgaagatcactctcatcaatgaaaatgacaaccggcccatcttcagccagccactgtacaacatcagcctgtacgagaacgtcaccgtggggacctctgtgctgacagtcctggtgagtccccgcttcactgcagggccactgagctctccagggccgactgtggtgaggcacccagagggattttgtccaagggacctcagcaatcagggaaggaggcacccccaaatccctgagctgtgtttgttggtgtattaaataaagtttttggactctt

SEQ ID NO: 112880 - DNA, 4475 bp, Homo sapiens
  Payload ID: 2089
  Gene Symbol: CDH23
  Gene Name: cadherin-related 23
  ENST ID: ENST00000466757
  CDS Start-End: 1-2863
agacaagaccaggcctctgtccaccctggccaacttggccatcatcatcacagatgtccaggacatggaccccatcttcatcaacctgccttacagcaccaacatctacgagcattctcctccgggcacgacggtgcgcatcatcaccgccatagaccaggataaaggacgtccccggggcattggctacaccatcgtttcagggaataccaacagcatctttgccctggactacatcagcggagtgctgaccttgaatggcctgctggaccgggagaaccccctgtacagccatggcttcatcctgactgtgaagggcacggagctgaacgatgaccgcaccccatctgacgctacagtcaccacgaccttcaatatcctggttattgacatcaatgacaatgccccggagttcaacagctccgagtacagcgtggccatcactgagctggcacaggtcggctttgcccttccactcttcatccaggtggtggacaaggatgaggagaacggaggctggcttcagggccgaccggagggagtgggggaaggtctgcacgtgcagaatttgggcctgaacagcatgtttgaggtgtacttggtggggaacaactcccaccacttcatcatctccccgacctccgtccaggggaaggcggacattcgtattcgggtggccatcccactggactacgagaccgtggaccgctacgactttgatctctttgccaatgagagtgtgcctgaccatgtgggctatgccaaggtgaagatcactctcatcaatgaaaatgacaaccggcccatcttcagccagccactgtacaacatcagcctgtacgagaacgtcaccgtggggacctctgtgctgacagtcctggcaactgacaatgatgcaggcacctttggggaagtcagctacttcttcagtgatgaccctgacaggttctcgctggacaaggacacgggactcatcatgctgattgccaggctggactatgagctcatccagcgcttcaccctgacgatcattgcccgggacgggggcggcgaggagaccacaggccgggtcaggatcaatgtgttggatgtcaacgacaacgtgcccaccttccagaaggatgcctacgtgggtgctctgcgggagaacgagccttctgtcacacagctggtgcggctccgggcaacagatgaagactcccctcccaacaaccagatcacctacagcattgtcagtgcatctgcctttggcagctacttcgacatcagcctgtacgagggctatggagtgatcagcgtcagtcgccccctggattatgaacagatatccaatgggctgatttatctgacggtcatggccatggatgctggcaacccccctctcaacagcaccgtccctgtcaccatcgaggtgtttgatgagaatgacaaccctcccaccttcagcaagcccgcctacttcgtctccgtggtggagaacatcatggcaggagccacggtgctgttcctgaatgccacagacctggaccgctcccgggagtacggccaggagtccatcatctactccttggaaggctccacccagtttcggatcaatgcccgctcaggggaaatcaccaccacgtctctgcttgaccgagagaccaagtctgaatacatcctcatcgttcgcgcagtggacgggggtgtgggccacaaccagaaaactggcatcgccaccgtaaacatcaccctcctggacatcaatgacaaccaccccacgtggaaggacgcaccctactacatcaacctggtggagatgacccctccagactctgatgtgaccacggtggtggctgttgacccagacctgggggagaatggcaccctggtgtacagcatccagccacccaacaagttctacagcctcaacagcaccacgggcaagatccgcaccacccacgccatgctggaccgggagaaccccgacccccatgaggccgagctgatgcgcaaaatcgtcgtctctgttactgactgtggcaggccccctctgaaagccaccagcagtgccacagtgtttgtgaacctcttggatctcaatgacaatgaccccacctttcagaacctgccttttgtggccgaggtgcttgaaggcatcccggcgggggtctccatctaccaagtggtggccatcgacctcgatgagggcctgaacggcctggtgtcctaccgcatgccggtgggcatgccccgcatggacttcctcatcaacagcagcagcggcgtggtggtcaccaccaccgagctggaccgcgagcgcatcgcggagtaccagctgcgggtggtggccagtgatgcaggcacgcccaccaagagctccaccagcacgctcaccatccatgtgctggatgtgaacgacgagacgcccaccttcttcccggccgtgtacaatgtgtctgtgtccgaggacgtgccacgcgagttccgggtggtctggctgaactgcacggacaacgacgtgggcctcaatgcagagctcagctacttcatcacaggtggcaacgtggatgggaagttcagcgtgggttaccgcgatgccgttgtgagaaccgtggtgggcctggaccgggagaccacagccgcctacatgctcatcctggaggccatcgacaacggccctgtagggaagcgacacacgggcacagccaccgtgttcgtcactgtcctggatgtgaatgacaaccggcccatctttctgcagagcagctatgaggccagcgtccctgaggacatccctgaaggccacagcatcttgcaggcagcacccgccctggcctctgaagggagcctcctcgatcatcttcaatcccttcctgattgatcccaacgtgggtgccctgaagaggggccaccaagacggctgccaagaccatgcttggagagccctgtttgctcctcctcccagctggcacccaggcatctgttccaccaggagggaggcagctgctcccacagggcaccaggcagatgctggcagcacccgggaaacccaaggaagagagccccgaggttttgccccagcactgggccagcacagatgccaggacagtgtcttggccccggtgtaggctgagcatttcacttgactaaagggaacctttgccatttggcaacttctccatgctgggctttggcacctggagggcaaggcttctgtggcgagcgagggtgctgcttctaggaggtggttacgagccccaggttgtaccctgtggagcctcaggccaaaggcccagatgaccacgagtgcacatctcttgaccagaagtctttcatcaagcagcagcgagggggtctgcagagaggaaggtgctcttctgaggatcatctttgggaaagggcgctggcctgggcatgcaaggagcttcggggggtgagtgtgtgtcccagactgcttgggccactgtcttcctgcagcctgcagcaccggtctctgaagcaggaggatctacaggtagacctagggggatgtgggggcatgtttgtggacaccccattacatcttggtagattccatgtagtcacagtggctgcggttgtcctcggggcccggcaggggctgtcgagggacggtgggccggccatggcggaagctgtgcagggagaggcgcaaggagcccaggcgcttccagagccggagctggggctcactggggctcccagggtggtggggcatgcactcgtgagccctgcggcggctcgggtccagcgcggccggcttgcagagcgtcatgaacagcagacaggtggccagcaggaggaagatgcaggccagggcgatgagcatggggagggggtcagttgcctctgcaagggtcccgggagtgacgggagctgagagaaaggcgagggggctgatggctggggagctggcgaggctggggccctctgtgctcatggctcctgcaacagcaacaagacagaagctcaaaggcagatcagctggacccagggcagcgggtatagggaagacttacctagggaatgtggatgggggcaaggcactgttaaactggacagcatcatggccacatcacaggttaagacagcaaggtccagagacatcacaagtctaagtgtacacacagctgagcagtgatggagctgggcccaagctcaggccctcttcctgttccaccctgtgcccatctgccatgcagacaagagggcggtggcctgtccgcattttcaaatcaatcctcatgaatcatcacagggtcttaggcctggaaacttaagaccaactctgtcaataacttgctctgtggccaggaacgagttatggatggtaagaggccgcagctgccagggtccctagcagtaatctaataccaaagctgcaaactgggggcccacgggtgtgtttagttgggtccttgccatgtttttatcaatgtaattatgaatattttcaaaataataacagatttcac

SEQ ID NO: 112881 - DNA, 4224 bp, Homo sapiens
  Payload ID: 2089
  Gene Symbol: CDH23
  Gene Name: cadherin-related 23
  Uniprot ID: Q9H251
  ENST ID: ENST00000619887
  CDS Start-End: 318-3557
ccctgctgcaccctgaactaactgatgttaaccctcttctctcttcctcatggctggcaggcccacaggtttgagctctgtttctctgtcacttcccacctcatctcttctctgcctcaccccattgccttcctccatgcccaccacacccccaccacccttcctgtcctgtggggcctgggccaaggccgtggcccagcctttgcagactgaatgcagccgccctctccccatcctcgctccccagcctgggggacagggagcgagagtaggaagaggaggaggaggaggaggaggaggcggcccagggatctgtaatggtgaagtcccccatgaatcgggagctggttgccacctatgaggtcactctctcagtgattgacaatgccagcgacctaccagagcgctctgtcagtgtgccaaatgccaagctgactgtcaacgtcctggacgtcaatgacaatacgccccagttcaagccctttgggatcacctactacatggagcggatcctggagggggccacccctgggaccacactcattgctgtggcagccgtggaccctgacaagggccttaatgggctggtcacctacaccctgctggacctggtgcccccagggtatgtccagctggaggactcctcggcagggaaggtcattgccaaccggacagtggactacgaggaggtgcactggctcaactttaccgtgagggcctcagacaacgggtccccgccccgggcagctgagatccctgtctacctggaaatcgtggacatcaatgacaacaaccccatctttgaccagccctcctaccaggaggctgtctttgaggatgtgcctgtgggcacaatcatcctgacagtcactgccactgatgctgactcaggcaactttgcactcattgagtacagccttggagatggagagagcaagtttgccatcaaccccaccacgggtgacatctatgtgctgtcttctctggaccgggagaagaaggaccactatatcctgactgccttggccaaagacaaccctggggatgtagccagcaaccgtcgcgaaaattcagtgcaggtggtgatccaagtgctggatgtcaatgactgccggccacagttctccaagccccagttcagcacaagcgtgtatgagaatgagccggcgggcacctcggtcatcaccatgatggccactgaccaggatgaaggtcccaatggagagttgacctactcacttgagggccctggcgtggaggccttccatgtggacatggactcgggcttggtgaccacacagcggccactgcagtcctacgagaagttcagtctgaccgtggtggccacagatggtggagagcccccactctggggcaccaccatgctcctggtggaggtcatcgacgtcaatgacaaccgccctgtctttgtgcgcccacccaacggcaccatcctccacatcagagaggagatcccgctgcgctccaacgtgtacgaggtctacgccacggacaaggatgagggcctcaacggggcggtgcgctacagcttcctgaagactgcgggcaaccgggactgggagttcttcatcatcgacccaatcagcggcctcatccagactgctcagcgcctggaccgcgagtcgcaggcggtgtacagcctcatcttggtggccagcgacctgggccagccagtgccatacgagactatgcagccgctgcaggtggccctggaggacatcgatgacaacgaaccccttttcgtgaggcctccaaaaggcagcccccagtaccagctgctgacagtgcctgagcactcaccacgcggcaccctcgtgggcaacgtgacaggcgcagtggatgcagatgagggccccaacgcgatcgtgtactacttcatcgcagccggcaacgaagagaagaacttccatctgcagcccgatgggtgtctgctggtgctgcgggacctggaccgggagcgagaagccatcttctccttcatcgtcaaggcctccagcaatcgcagctggacacctccccgtggaccctccccaaccctcgacctggttgctgacctcacactgcaggaggtgcgcgttgtgctagaggacatcaacgaccagccaccacgcttcaccaaggctgagtacactgcaggggtggccaccgacgccaaggtgggctcagagttgatccaggtgctggccctggatgcagacattggcaacaacagccttgtcttctacagcattctggccatccactacttccgggcccttgccaacgactctgaagatgtgggccaggtcttcaccatggggagcatggacggcattctgcgcaccttcgacctcttcatggcctacagccccggctacttcgtggtggacattgtggcccgagacctggcaggccacaacgacacggccatcatcggcatctacatcctgagggacgaccagcgcgtcaagatcgtcattaacgagatccccgaccgtgtgcgcggcttcgaggaggagttcatccacctgctctccaacatcactggggccattgtcaatactgacaatgtgcagttccatgtggacaagaagggccgggtgaactttgcgcagacagaactgcttatccacgtggtgaaccgcgataccaaccgcatcctggacgtggaccgggtgatccagatgatcgatgagaacaaggagcagctacggaatcttttccggaactacaacgtcctggacgtgcagcctgccatctctgtccggctgccggatgacatgtctgccctgcagatggcgatcatcgtcctggctatcctcctgttcctggccgccatgctctttgtcctcatgaactggtactacaggactgtacacaagaggaagctcaaggccattgtggctggctcagctgggaatcgtggcttcatcgacatcatggacatgcctaacaccaacaagtactcctttgatggagccaaccctgtgtggctggatcccttctgtcggaacctggagctggccgcccaggcggagcatgaggatgacctaccggagaacctgagtgagatcgccgacctgtggaacagccccacgcgcacccatggaacttttgggcgtgagccagcagctgtcaagcctgatgatgaccgatacctgcgggctgccatccaggagtatgacaacattgccaagctgggccagatcattcgtgaggggccaatcaagctgatacagactgagctggacgaggagccaggagaccacagcccagggcagggtagcctgcgcttccgccacaagccaccagtggagctcaaggggcccgatgggatccatgtggtgcacggcagcacgggcacgctgctggccaccgacctcaacagcctgcccgaggaagaccagaagggcctgggccgctcgctggagacgctgaccgctgccgaggccactgccttcgagcgcaacgcccgcacagaatccgccaaatccacacccctgcacaaacttcgcgacgtgatcatggagacccccctggagatcacagagctgtgactagacagggaagccttgtgggtgtgagcagcacccatccaccgtcccctcccagggagcaagggcagggacagggccggtcgggggggaccctccaaggccaggccttggggacaaccttggcttggccctggcagcccgcatcagctgctcagatcccacttttgccagacgctcattcagcatctgacctctaccttcataagatctgttatttttataagaaaaccaaacaaaaatgttaagcatctaaggacaaggtaaggagggtcactggggcccaagagtctggggaccagcttggctcaggctgagctgaaagaggccaaacaggccctcctccctcccagctccaccccgcaagcaccatcccctccggctaagcaggcgcaagggaggcccagcgcggacatcccctgctggccggacacccgactccagtccaagtctcgctacatttccgccacatccctctctgctggacgtccaggtggaggtggcatccccacgtggacaagaaagtcaatgtcaatgaacaagcattctctccatttcactggcttcccaaatgtgtgcccagcttataaacagaagtgactgatgttccctccggttttgaatgtggagtgtttgtgtgtgttccttttttaaattaagttattccctc

SEQ ID NO: 112882 - DNA, 704 bp, Homo sapiens
  Payload ID: 2089
  Gene Symbol: CDH23
  Gene Name: cadherin-related 23
  ENST ID: ENST00000470494
  CDS Start-End: 1-496
tgacaatgccccggagttcaacagctccgagtacagcgtggccatcactgagctggcacaggtcggctttgcccttccactcttcatccaggtggtggacaaggatgagggcctgaacagcatgtttgaggtgtacttggtggggaacaactcccaccacttcatcatctccccgacctccgtccaggggaaggcggacattcgtattcgggtggccatcccactggactacgagaccgtggaccgctacgactttgatctctttgccaatgagagtgtgcctgaccatgtgggctatgccaaggtgaagatcactctcatcaatgaaaatgacaaccggcccatcttcagccagccactgtacaacatcagcctgtacgagaacgtcaccgtggggacctctgtgctgacagtcctgtgggaaaagttcttttgcagtaattccagcagattctcatcggcccagttggttgtgtcatcctggaaccaattgtgattctggtatgccggggagggatcacactccccctagtggacccaggggttggggtcagccccgcctgaattacaccgtctgagaatggggaaggggcttctattctaagacaagggattgaatgctaagcagatccaagtggtagatgtgtgctacacaagctcagagtcttgcccagtcggtgctcaataaatgtcacggagtttaa

SEQ ID NO: 112883 - DNA, 4814 bp, Homo sapiens
  Payload ID: 2089
  Gene Symbol: CDH23
  Gene Name: cadherin-related 23
  ENST ID: ENST00000616684
  CDS Start-End: 363-4508
cgcgggctgcaggcgcgatgcttggctagaggacgcgtccgacggcggccggacgctgaggtggtcggggctagtcagcccggcctgggcatggagcgcggggtggcagagcctctggacgtttggggcgcgcccagtccgagcccccggcgcgcctgaagttgcgagcggcgagcggcgagcggcgagcggcccgcggagacccaggagctgccggcacgccgcggatgagccttcgcgccggcgggaagacgcggcggtggccagggccagagcaggcggcccgcgggggccgatccggcggagagcagagcccgaggcgaggcgaggcgcggcgccgctgcacacacgcacacggagccatggggcgccatgttgccaccagctgccacgtggcctggcttttggtgctgatctctggatgctggggccaggtgaaccggctgcccttcttcaccaaccacttctttgatacatacctgctgatcagcgaggacacgcctgtgggttcttctgtgacccagttgctggcccaagacatggacaatgaccccctggtgtttggcgtgtctggggaggaggcctctcgcttctttgcagtggagcctgacactggcgtggtgtggctccggcagccactggacagagagaccaagtcagagttcaccgtggagttctctgtcagcgaccaccagggggtgatcacacggaaggtgaacatccaggttggggatgtgaatgacaacgcgcccacatttcacaatcagccctacagcgtccgcatccctgagaatacaccagtggggacgcccatcttcatcgtgaatgccacagaccccgacttgggggcagggggcagcgtcctctactccttccagcccccctcccaattcttcgccattgacagcgcccgcggtatcgtcacagtgatccgggagctggactacgagaccacacaggcctaccagctcacggtcaacgccacagatcaagacaagaccaggcctctgtccaccctggccaacttggccatcatcatcacagatgtccaggacatggaccccatcttcatcaacctgccttacagcaccaacatctacgagcattctcctccgggcacgacggtgcgcatcatcaccgccatagaccaggataaaggacgtccccggggcattggctacaccatcgtttcagggaataccaacagcatctttgccctggactacatcagcggagtgctgaccttgaatggcctgctggaccgggagaaccccctgtacagccatggcttcatcctgactgtgaagggcacggagctgaacgatgaccgcaccccatctgacgctacagtcaccacgaccttcaatatcctggttattgacatcaatgacaatgccccggagttcaacagctccgagtacagcgtggccatcactgagctggcacaggtcggctttgcccttccactcttcatccaggtggtggacaaggatgagaatttgggcctgaacagcatgtttgaggtgtacttggtggggaacaactcccaccacttcatcatctccccgacctccgtccaggggaaggcggacattcgtattcgggtggccatcccactggactacgagaccgtggaccgctacgactttgatctctttgccaatgagagtgtgcctgaccatgtgggctatgccaaggtgaagatcactctcatcaatgaaaatgacaaccggcccatcttcagccagccactgtacaacatcagcctgtacgagaacgtcaccgtggggacctctgtgctgacagtcctggcaactgacaatgatgcaggcacctttggggaagtcagctacttcttcagtgatgaccctgacaggttctcgctggacaaggacacgggactcatcatgctgattgccaggctggactatgagctcatccagcgcttcaccctgacgatcattgcccgggacgggggcggcgaggagaccacaggccgggtcaggatcaatgtgttggatgtcaacgacaacgtgcccaccttccagaaggatgcctacgtgggtgctctgcgggagaacgagccttctgtcacacagctggtgcggctccgggcaacagatgaagactcccctcccaacaaccagatcacctacagcattgtcagtgcatctgcctttggcagctacttcgacatcagcctgtacgagggctatggagtgatcagcgtcagtcgccccctggattatgaacagatatccaatgggctgatttatctgacggtcatggccatggatgctggcaacccccctctcaacagcaccgtccctgtcaccatcgaggtgtttgatgagaatgacaaccctcccaccttcagcaagcccgcctacttcgtctccgtggtggagaacatcatggcaggagccacggtgctgttcctgaatgccacagacctggaccgctcccgggagtacggccaggagtccatcatctactccttggaaggctccacccagtttcggatcaatgcccgctcaggggaaatcaccaccacgtctctgcttgaccgagagaccaagtctgaatacatcctcatcgttcgcgcagtggacgggggtgtgggccacaaccagaaaactggcatcgccaccgtaaacatcaccctcctggacatcaatgacaaccaccccacgtggaaggacgcaccctactacatcaacctggtggagatgacccctccagactctgatgtgaccacggtggtggctgttgacccagacctgggggagaatggcaccctggtgtacagcatccagccacccaacaagttctacagcctcaacagcaccacgggcaagatccgcaccacccacgccatgctggaccgggagaaccccgacccccatgaggccgagctgatgcgcaaaatcgtcgtctctgttactgactgtggcaggccccctctgaaagccaccagcagtgccacagtgtttgtgaacctcttggatctcaatgacaatgaccccacctttcagaacctgccttttgtggccgaggtgcttgaaggcatcccggcgggggtctccatctaccaagtggtggccatcgacctcgatgagggcctgaacggcctggtgtcctaccgcatgccggtgggcatgccccgcatggacttcctcatcaacagcagcagcggcgtggtggtcaccaccaccgagctggaccgcgagcgcatcgcggagtaccagctgcgggtggtggccagtgatgcaggcacgcccaccaagagctccaccagcacgctcaccatccatgtgctggatgtgaacgacgagacgcccaccttcttcccggccgtgtacaatgtgtctgtgtccgaggacgtgccacgcgagttccgggtggtctggctgaactgcacggacaacgacgtgggcctcaatgcagagctcagctacttcatcacaggtggcaacgtggatgggaagttcagcgtgggttaccgcgatgccgttgtgagaaccgtggtgggcctggaccgggagaccacagccgcctacatgctcatcctggaggccatcgacaacggccctgtagggaagcgacacacgggcacagccaccgtgttcgtcactgtcctggatgtgaatgacaaccggcccatctttctgcagagcagctatgaggccagcgtccctgaggacatccctgaaggccacagcatcttgcagctgaaagccacggacgcagatgagggcgagtttgggcgtgtgtggtaccgcatcctccatggtaaccatggcaacaacttccggatccatgtcagcaatgggctcctgatgcgagggccccggcccctggaccgggagcggaactcatcccacgtgctgatagtggaggcctacaaccacgacctgggccccatgcggagctccgtcagggtgattgtgtacgtggaggacatcaacgatgaggcccccgtgttcacacagcagcagtacagccgtctggggcttcgagagaccgcaggcattggaacgtcagtcatcgtggtccaagccacagaccgagactctggggatggtggcctggtgaactaccgcatcctgtcgggcgcagaggggaagtttgagattgacgagagcacagggcttatcatcaccgtgaattacctggactacgagaccaagaccagctacatgatgaatgtgtcggccactgaccaggccccgcccttcaaccagggcttctgcagcgtctacatcactctgctcaacgagctggacgaggccgtgcagttctccaatgcctcatacgaggctgccatcctggagaatctggcactgggtactgagattgtgcgggtccaggcctactccatcgacaacctcaaccaaatcacgtaccgcttcaacgcctacaccagcacccaggccaaagccctcttcaagatagacgccatcacggtgaggggctgggggcagggagcaccatttcttccaatctaaccaacattggttgagctccttctgtgtgcacagcactctcctctttgtcataaaatgtccttgagatggccaagtgtggtgttaggtacctgtagtcccagctgcttgagaggctggggcaggaagattgcttcagctcaggagtttggaggctgcagtgagctgcgtttgcaccactgcactccagcccgggcaacagagtgagaccttgtctcttacaaagaaacaaaaaaaagtccccgagatcaatatccctgtaacacatccattttcatatgtaggagtaagataaagtttatacctatg

SEQ ID NO: 112884 - DNA, 11122 bp, Homo sapiens
  Payload ID: 2089
  Gene Symbol: CDH23
  Gene Name: cadherin-related 23
  ENST ID: ENST00000622827
  CDS Start-End: 391-10455
gcggcggcggcggctcgggagagagggacgcgggctgcaggcgcgatgcttggctagaggacgcgtccgacggcggccggacgctgaggtggtcggggctagtcagcccggcctgggcatggagcgcggggtggcagagcctctggacgtttggggcgcgcccagtccgagcccccggcgcgcctgaagttgcgagcggcgagcggcgagcggcgagcggcccgcggagacccaggagctgccggcacgccgcggatgagccttcgcgccggcgggaagacgcggcggtggccagggccagagcaggcggcccgcgggggccgatccggcggagagcagagcccgaggcgaggcgaggcgcggcgccgctgcacacacgcacacggagccatggggcgccatgttgccaccagctgccacgtggcctggcttttggtgctgatctctggatgctggggccaggtgaaccggctgcccttcttcaccaaccacttctttgatacatacctgctgatcagcgaggacacgcctgtgggttcttctgtgacccagttgctggcccaagacatggacaatgaccccctggtgtttggcgtgtctggggaggaggcctctcgcttctttgcagtggagcctgacactggcgtggtgtggctccggcagccactggacagagagaccaagtcagagttcaccgtggagttctctgtcagcgaccaccagggggtgatcacacggaaggtgaacatccaggttggggatgtgaatgacaacgcgcccacatttcacaatcagccctacagcgtccgcatccctgagaatacaccagtggggacgcccatcttcatcgtgaatgccacagaccccgacttgggggcagggggcagcgtcctctactccttccagcccccctcccaattcttcgccattgacagcgcccgcggtatcgtcacagtgatccgggagctggactacgagaccacacaggcctaccagctcacggtcaacgccacagatcaagacaagaccaggcctctgtccaccctggccaacttggccatcatcatcacagatgtccaggacatggaccccatcttcatcaacctgccttacagcaccaacatctacgagcattctcctccgggcacgacggtgcgcatcatcaccgccatagaccaggataaaggacgtccccggggcattggctacaccatcgtttcagggaataccaacagcatctttgccctggactacatcagcggagtgctgaccttgaatggcctgctggaccgggagaaccccctgtacagccatggcttcatcctgactgtgaagggcacggagctgaacgatgaccgcaccccatctgacgctacagtcaccacgaccttcaatatcctggttattgacatcaatgacaatgccccggagttcaacagctccgagtacagcgtggccatcactgagctggcacaggtcggctttgcccttccactcttcatccaggtggtggacaaggatgagacccagggcctgaacagcatgtttgaggtgtacttggtggggaacaactcccaccacttcatcatctccccgacctccgtccaggggaaggcggacattcgtattcgggtggccatcccactggactacgagaccgtggaccgctacgactttgatctctttgccaatgagagtgtgcctgaccatgtgggctatgccaaggtgaagatcactctcatcaatgaaaatgacaaccggcccatcttcagccagccactgtacaacatcagcctgtacgagaacgtcaccgtggggacctctgtgctgacagtcctggcaactgacaatgatgcaggcacctttggggaagtcagctacttcttcagtgatgaccctgacaggttctcgctggacaaggacacgggactcatcatgctgattgccaggctggactatgagctcatccagcgcttcaccctgacgatcattgcccgggacgggggcggcgaggagaccacaggccgggtcaggatcaatgtgttggatgtcaacgacaacgtgcccaccttccagaaggatgcctacgtgggtgctctgcgggagaacgagccttctgtcacacagctggtgcggctccgggcaacagatgaagactcccctcccaacaaccagatcacctacagcattgtcagtgcatctgcctttggcagctacttcgacatcagcctgtacgagggctatggagtgatcagcgtcagtcgccccctggattatgaacagatatccaatgggctgatttatctgacggtcatggccatggatgctggcaacccccctctcaacagcaccgtccctgtcaccatcgaggtgtttgatgagaatgacaaccctcccaccttcagcaagcccgcctacttcgtctccgtggtggagaacatcatggcaggagccacggtgctgttcctgaatgccacagacctggaccgctcccgggagtacggccaggagtccatcatctactccttggaaggctccacccagtttcggatcaatgcccgctcaggggaaatcaccaccacgtctctgcttgaccgagagaccaagtctgaatacatcctcatcgttcgcgcagtggacgggggtgtgggccacaaccagaaaactggcatcgccaccgtaaacatcaccctcctggacatcaatgacaaccaccccacgtggaaggacgcaccctactacatcaacctggtggagatgacccctccagactctgatgtgaccacggtggtggctgttgacccagacctgggggagaatggcaccctggtgtacagcatccagccacccaacaagttctacagcctcaacagcaccacgggcaagatccgcaccacccacgccatgctggaccgggagaaccccgacccccatgaggccgagctgatgcgcaaaatcgtcgtctctgttactgactgtggcaggccccctctgaaagccaccagcagtgccacagtgtttgtgaacctcttggatctcaatgacaatgaccccacctttcagaacctgccttttgtggccgaggtgcttgaaggcatcccggcgggggtctccatctaccaagtggtggccatcgacctcgatgagggcctgaacggcctggtgtcctaccgcatgccggtgggcatgccccgcatggacttcctcatcaacagcagcagcggcgtggtggtcaccaccaccgagctggaccgcgagcgcatcgcggagtaccagctgcgggtggtggccagtgatgcaggcacgcccaccaagagctccaccagcacgctcaccatccatgtgctggatgtgaacgacgagacgcccaccttcttcccggccgtgtacaatgtgtctgtgtccgaggacgtgccacgcgagttccgggtggtctggctgaactgcacggacaacgacgtgggcctcaatgcagagctcagctacttcatcacaggtggcaacgtggatgggaagttcagcgtgggttaccgcgatgccgttgtgagaaccgtggtgggcctggaccgggagaccacagccgcctacatgctcatcctggaggccatcgacaacggccctgtagggaagcgacacacgggcacagccaccgtgttcgtcactgtcctggatgtgaatgacaaccggcccatctttctgcagagcagctatgaggccagcgtccctgaggacatccctgaaggccacagcatcttgcagctgaaagccacggacgcagatgagggcgagtttgggcgtgtgtggtaccgcatcctccatggtaaccatggcaacaacttccggatccatgtcagcaatgggctcctgatgcgagggccccggcccctggaccgggagcggaactcatcccacgtgctgatagtggaggcctacaaccacgacctgggccccatgcggagctccgtcagggtgattgtgtacgtggaggacatcaacgatgaggcccccgtgttcacacagcagcagtacagccgtctggggcttcgagagaccgcaggcattggaacgtcagtcatcgtggtccaagccacagaccgagactctggggatggtggcctggtgaactaccgcatcctgtcgggcgcagaggggaagtttgagattgacgagagcacagggcttatcatcaccgtgaattacctggactacgagaccaagaccagctacatgatgaatgtgtcggccactgaccaggccccgcccttcaaccagggcttctgcagcgtctacatcactctgctcaacgagctggacgaggccgtgcagttctccaatgcctcatacgaggctgccatcctggagaatctggcactgggtactgagattgtgcgggtccaggcctactccatcgacaacctcaaccaaatcacgtaccgcttcaacgcctacaccagcacccaggccaaagccctcttcaagatagacgccatcacgggtgtgatcacagtccagggcctggtggaccgtgagaagggcgacttctataccttgacagtggtggcagatgacggcggccccaaggtggactccaccgtgcaggtctacatcactgtgctggacgagaatgacaacagcccccggtttgacttcacctccgactcggcggtcagcatacccgaggactgccctgtgggccagcgagtggctactgtcaaggcctgggaccctgatgctggcagcaatgggcaggtggtcttctccctggcctctggcaacatcgcgggggcctttgagatcgtcaccaccaatgactccattggcgaagtgtttgtggccaggcccctggacagagaagagctggatcactacatcctccaggttgtggcttctgaccgaggcacccctccacggaagaaggaccacatcctgcaggtgaccatcctggacatcaatgacaaccctccagtcatcgagagcccctttggatacaatgtcagtgtgaatgagaacgtgggtggaggtactgctgtggtccaggtgagagccactgaccgtgacatcgggatcaacagtgttctgtcctactacatcaccgagggcaacaaggacatggccttccgcatggaccgcatcagcggtgagatcgccacacggcctgccccgcctgaccgcgagcgccagagcttctaccacctggtggccactgtggaggacgagggcaccccaaccctgtcggccaccacgcacgtgtacgtgaccattgtggatgagaatgataacgcgcccatgttccagcagccccactatgaggtgctgctggatgagggcccagacacgctcaacaccagcctcatcaccatccaggcactggacctggatgagggtcccaacggcacagtcacctatgccatcgtcgcaggcaacatcgtcaacaccttccgcatcgacagacacatgggtgtcatcactgctgccaaagagctggactacgagatcagccacggccgctacaccctgatcgtcactgccacagaccagtgccccatcttatcccaccgcctcacctctaccaccacggtgcttgtgaatgtgaatgacatcaacgacaatgtgcctaccttcccccgggactatgagggaccatttgaagtcactgagggccagccggggcccagagtgtggaccttcctggcccatgaccgagactcaggacccaacgggcaggtggagtacagcatcatggatggagaccctctgggggagtttgtgatctctcctgtggagggggtgctaagggtccggaaggacgtggagctggaccgggagaccatcgccttctacaacctgaccatctgtgcccgtgaccgggggatgcccccactcagctccacaatgctggtggggatccgggtgctggacatcaacgacaacgaccctgtgctgctgaacctgcccatgaacatcaccatcagcgagaacagccctgtctccagctttgtcgcccatgtcctggccagtgacgctgacagtggctgcaatgcacgcctcaccttcaacatcactgcgggcaaccgcgagcgggccttcttcatcaatgccacgacagggatcgtcactgtgaaccggcccctggaccgcgagcggatcccagagtacaagctgaccatttctgtgaaggacaacccggagaatccacgcatagccaggagggattatgacttgcttctgatcttcctttctgatgagaatgacaaccaccccctcttcactaaaagcacctaccaggcagaggtgatggaaaactctcccgctggcacccctctcacggtgctcaatgggcccatcctggccctggatgcagaccaagacatctacgccgtggtgacctaccagctgctgggtgcccagagtggcctctttgacatcaacagcagcaccggtgtggtgaccgtgaggtcaggtgtcatcattgaccgggaggcattctcgccacccatcctggagctgctgctgctggctgaggacatcgggctgctcaacagcacggcccacctgctcatcaccatcctggatgacaatgacaaccggcccacctttagccctgccaccctcactgtccatctgctagagaactgcccgcctggattctcagtccttcaagtcacagccacagatgaggacagtggcctcaatggggagctggtctaccgaatagaagctggggctcaggaccgcttcctcattcatctggtcaccggggtcatccgtgttggtaatgccaccatcgacagagaggagcaggagtcctacaggctaacggtggtggccaccgaccggggcaccgttcctctctcgggcacagccattgtcaccattctgatcgatgacatcaatgactcccgccccgagttcctcaaccccatccagacagtgagcgtgctggagtcggctgagccaggcactgtcattgccaatatcacggccattgaccacgacctcaacccaaagctagagtaccacattgtcggcattgtggccaaggacgacactgatcgcctggtgcccaaccaggaggacgcctttgctgtgaatatcaacacaggatctgtaatggtgaagtcccccatgaatcgggagctggttgccacctatgaggtcactctctcagtgattgacaatgccagcgacctaccagagcgctctgtcagtgtgccaaatgccaagctgactgtcaacgtcctggacgtcaatgacaatacgccccagttcaagccctttgggatcacctactacatggagcggatcctggagggggccacccctgggaccacactcattgctgtggcagccgtggaccctgacaagggccttaatgggctggtcacctacaccctgctggacctggtgcccccagggtatgtccagctggaggactcctcggcagggaaggtcattgccaaccggacagtggactacgaggaggtgcactggctcaactttaccgtgagggcctcagacaacgggtccccgccccgggcagctgagatccctgtctacctggaaatcgtggacatcaatgacaacaaccccatctttgaccagccctcctaccaggaggctgtctttgaggatgtgcctgtgggcacaatcatcctgacagtcactgccactgatgctgactcaggcaactttgcactcattgagtacagccttggagatggagagagcaagtttgccatcaaccccaccacgggtgacatctatgtgctgtcttctctggaccgggagaagaaggaccactatatcctgactgccttggccaaagacaaccctggggatgtagccagcaaccgtcgcgaaaattcagtgcaggtggtgatccaagtgctggatgtcaatgactgccggccacagttctccaagccccagttcagcacaagcgtgtatgagaatgagccggcgggcacctcggtcatcaccatgatggccactgaccaggatgaaggtcccaatggagagttgacctactcacttgagggccctggcgtggaggccttccatgtggacatggactcgggcttggtgaccacacagcggccactgcagtcctacgagaagttcagtctgaccgtggtggccacagatggtggagagcccccactctggggcaccaccatgctcctggtggaggtcatcgacgtcaatgacaaccgccctgtctttgtgcgcccacccaacggcaccatcctccacatcagagaggagatcccgctgcgctccaacgtgtacgaggtctacgccacggacaaggatgagggcctcaacggggcggtgcgctacagcttcctgaagactgcgggcaaccgggactgggagttcttcatcatcgacccaatcagcggcctcatccagactgctcagcgcctggaccgcgagtcgcaggcggtgtacagcctcatcttggtggccagcgacctgggccagccagtgccatacgagactatgcagccgctgcaggtggccctggaggacatcgatgacaacgaaccccttttcgtgaggcctccaaaaggcagcccccagtaccagctgctgacagtgcctgagcactcaccacgcggcaccctcgtgggcaacgtgacaggcgcagtggatgcagatgagggccccaacgcgatcgtgtactacttcatcgcagccggcaacgaagagaagaacttccatctgcagcccgatgggtgtctgctggtgctgcgggacctggaccgggagcgagaagccatcttctccttcatcgtcaaggcctccagcaatcgcagctggacacctccccgtggaccctccccaaccctcgacctggttgctgacctcacactgcaggaggtgcgcgttgtgctagaggacatcaacgaccagccaccacgcttcaccaaggctgagtacactgcaggggtggccaccgacgccaaggtgggctcagagttgatccaggtgctggccctggatgcagacattggcaacaacagccttgtcttctacagcattctggccatccactacttccgggcccttgccaacgactctgaagatgtgggccaggtcttcaccatggggagcatggacggcattctgcgcaccttcgacctcttcatggcctacagccccggctacttcgtggtggacattgtggcccgagacctggcaggccacaacgacacggccatcatcggcatctacatcctgagggacgaccagcgcgtcaagatcgtcattaacgagatccccgaccgtgtgcgcggcttcgaggaggagttcatccacctgctctccaacatcactggggccattgtcaatactgacaatgtgcagttccatgtggacaagaagggccgggtgaactttgcgcagacagaactgcttatccacgtggtgaaccgcgataccaaccgcatcctggacgtggaccgggtgatccagatgatcgatgagaacaaggagcagctacggaatcttttccggaactacaacgtcctggacgtgcagcctgccatctctgtccggctgccggatgacatgtctgccctgcagatggcgatcatcgtcctggctatcctcctgttcctggccgccatgctctttgtcctcatgaactggtactacaggactgtacacaagaggaagctcaaggccattgtggctggctcagctgggaatcgtggcttcatcgacatcatggacatgcctaacaccaacaagtactcctttgatggagccaaccctgtgtggctggatcccttctgtcggaacctggagctggccgcccaggcggagcatgaggatgacctaccggagaacctgagtgagatcgccgacctgtggaacagccccacgcgcacccatggaacttttgggcgtgagccagcagctgtcaagcctgatgatgaccgatacctgcgggctgccatccaggagtatgacaacattgccaagctgggccagatcattcgtgaggggccaatcaagggctcgctgctgaaggtggtcctggaggattacctgcggctcaaaaagctctttgcacagcggatggtgcaaaaagcctcctcctgccactcctccatctctgagctgatacagactgagctggacgaggagccaggagaccacagcccagggcagggtagcctgcgcttccgccacaagccaccagtggagctcaaggggcccgatgggatccatgtggtgcacggcagcacgggcacgctgctggccaccgacctcaacagcctgcccgaggaagaccagaagggcctgggccgctcgctggagacgctgaccgctgccgaggccactgccttcgagcgcaacgcccgcacagaatccgccaaatccacacccctgcacaaacttcgcgacgtgatcatggagacccccctggagatcacagagctgtgactagacagggaagccttgtgggtgtgagcagcacccatccaccgtcccctcccagggagcaagggcagggacagggccggtcgggggggaccctccaaggccaggccttggggacaaccttggcttggccctggcagcccgcatcagctgctcagatcccacttttgccagacgctcattcagcatctgacctctaccttcataagatctgttatttttataagaaaaccaaacaaaaatgttaagcatctaaggacaaggtaaggagggtcactggggcccaagagtctggggaccagcttggctcaggctgagctgaaagaggccaaacaggccctcctccctcccagctccaccccgcaagcaccatcccctccggctaagcaggcgcaagggaggcccagcgcggacatcccctgctggccggacacccgactccagtccaagtctcgctacatttccgccacatccctctctgctggacgtccaggtggaggtggcatccccacgtggacaagaaagtcaatgtcaatgaacaagcattctctccatttcactggcttcccaaatgtgtgcccagcttataaacagaagtgactgatgttccctccggttttgaatgtggagtgtttgtgtgtgttccttttttaaattaagttattccctc

SEQ ID NO: 112885 - DNA, 2694 bp, Homo sapiens
  Payload ID: 2090
  Gene Symbol: CDHR1
  Gene Name: cadherin-related family member 1
  Uniprot ID: Q96JP9
  ENST ID: ENST00000332904
  CDS Start-End: 112-2349
gtcgccgctacccccattgtggtctctgccctccccgcgggcccagggcatgctccgtgcccctgcgcccggtctcggcggcggcaggcgacactccgcgccggcggagacatgaggcgctgccggtgggccgccctggccctggggctgctgcgcctctgcttggctcaggccaacttcgccccgcacttcttcgacaacggggtcggcagcaccaacggaaacatggctctgttcagcctcccagaggacacccctgtaggctctcacgtatacaccctgaatgggacagaccctgagggagaccccatctcctaccacatcagctttgaccccagcactagaagcgtcttttctgttgaccccacttttggaaacatcaccctggttgaagagctggacagagagagggaagatgagattgaagccatcatcagcatttctgatggcctgaatctggtggccgaaaaagtcgtgatcctggtgaccgatgccaatgatgaggcgcccaggttcatccaggagccttatgttgccctggttcccgaggacatacctgctgggagcatcatctttaaggtccatgcagtggacagggacacaggctctggagggagtgtcacctacttcctgcagaacctgcactccccatttgccgtggaccgccacagcggtgtgctgcgcctccaggctggggccactctggactacgagaggtcccggacccactacatcaccgtggtcgccaaggatggcggtgggaggcttcatggggctgatgtggtgttctcagccaccaccacggtcacggtcaatgtggaggatgttcaggacatggcccctgtcttcgtgggcacaccctactatggctatgtgtacgaggacacccttccgggctcggaggtactgaaggtggtcgccatggatggagaccggggcaaacccaatcgaattctctacagccttgtaaatgggaacgatggagcctttgaaattaatgagacatctggagccatctccatcactcagagcccggcccagctccagagagaggtgtatgagctgcatgtacaggtgactgaaatgagccctgcggggagcccagctgcccaggccaccgtcccagtcaccatcaggattgtggacctcaacaaccacccgccaacattctatggagagagcggaccccaaaacaggtttgagctgtccatgaatgagcacccaccccagggagagatcctgcggggcctcaagatcaccgtcaatgactccgaccagggagccaatgccaaattcaacttgcagctggtgggacccaggggcatcttccgagtggttccacagacagtcctgaatgaagcccaagtcacaatcattgtggagaactcagctgccattgactttgaaaagtccaaagtattaaccttcaagctcctggctgttgaagtgaacaccccagagaagttcagttccacagcggatgttgtgatccagctcctggacaccaatgacaatgtccccaagttcgactccctctactacgttgccaggattcctgagaacgccccagggggctccagcgtggtggctgtcacagctgtggatccagatacaggaccctggggcgaagtgaaatattccacctatgggactggggcagacctcttcctgatccacccatccactgggcttatctacacccagccctgggctagcctggacgctgaggccactgccaggtacaacttctatgtgaaggcagaggacatggaaggcaagtacagcgtagctgaggtgtttatcacactgctggatgtcaatgaccacccccctcagtttggaaagagcgttcagaagaagacgatggtgctagggaccccagtgaaaattgaggccatagacgaggatgcagaggaacccaacaacctggtggactattccatcacccatgcagagcccgccaacgtgttcgacatcaattcccacacgggggagatctggctcaagaattccatccgctccctggatgccctgcacaacatcacacctggaagggactgcctatggtccctagaggtgcaggccaaggaccggggctccccatccttcagcaccacagccttactcaagattgacatcacagatgctgaggtgagaagactaaggtacatgaaaaatagtaacttccctggtacaacaaagtcagtaagaaaaccaaaatttaagcccaagaaaccacattccagccagggtctgttcttgcatccccactgcgaaattgccttattcaatctgagtaatgtgaatctgtactctagagtttttcaaggggcagcccaagcatcttaaaaagtatcagattctcagaaatcctccctagaccattttccctctccctaaatttctatgtttacagaagcaactgaatacttccctacccaccaacatgctcctggctctcccctgcactgcttgctgctcttccacagcccttctctcatcctgacccctctgtctcatgtgcaccaccaagcttcttttgcttggcttgaaggtctgaacatccactctcaccttcatggtagcccaggctatttcatgatggtgacaccctcaagatccgtagaccactgtattagttcgttctcatgctgctaataaagatacccgagactgggtaatttatagaggaaa

SEQ ID NO: 112886 - DNA, 4537 bp, Homo sapiens
  Payload ID: 2090
  Gene Symbol: CDHR1
  Gene Name: cadherin-related family member 1
  ENST ID: ENST00000372117
  CDS Start-End: 1-1795
catcaccgtggtcgccaaggatggcggtgggaggcttcatggggctgatgtggtgttctcagccaccaccacggtcacggtcaatgtggaggatgttcaggacatggcccctgtcttcgtgggcacaccctactatggctatgtgtacgaggacacccttccgggctcggaggtactgaaggtggtcgccatggatggagaccggggcaaacccaatcgaattctctacagccttgtaaatgggaacgatggagcctttgaaattaatgagacatctggagccatctccatcactcagagcccggcccagctccagagagaggtgtatgagctgcatgtacaggtgactgaaatgagccctgcggggagcccagctgcccaggccaccgtcccagtcaccatcaggattgtggacctcaacaaccacccgccaacattctatggagagagcggaccccaaaacaggtttgagctgtccatgaatgagcacccaccccagggagagatcctgcggggcctcaagatcaccgtcaatgactccgaccagggagccaatgccaaattcaacttgcagctggtgggacccaggggcatcttccgagtggttccacagacagtcctgaatgaagcccaagtcacaatcattgtggagaactcagctgccattgactttgaaaagtccaaagtattaaccttcaaggctgtggatccagatacaggaccctggggcgaagtgaaatattccacctatgggactggggcagacctcttcctgatccacccatccactgggcttatctacacccagccctgggctagcctggacgctgaggccactgccaggtacaacttctatgtgaaggcagaggacatggaaggcaagtacagcgtagctgaggtgtttatcacactgctggatgtcaatgaccacccccctcagtttggaaagagcgttcagaagaagacgatggtgctagggaccccagtgaaaattgaggccatagacgaggatgcagaggaacccaacaacctggtggactattccatcacccatgcagagcccgccaacgtgttcgacatcaattcccacacgggggagatctggctcaagaattccatccgctccctggatgccctgcacaacatcacacctggaagggactgcctatggtccctagaggtgcaggccaaggaccggggctccccatccttcagcaccacagccttactcaagattgacatcacagatgctgagaccctctcccggagccccatggctgccttcctgatacagaccaaggacaaccccatgaaggccgtgggtgtgctggccggcaccatggccaccgtcgtggccatcactgtcctcatctccaccgccaccttctggcgcaacaagaagtctaacaaggtcctgccaatgcggcgggtgctccgcaagcggcccagccctgcgccccgcaccatccgcattgagtggctcaagtccaagagcaccaaagccgctaccaagttcatgctcaaagagaaacctcccaatgagaactgtaacaacaacagcccagaaagctctctgctcccgagagctccggctctccctccaccacccagcgtggcgcccagcactggcgcagcccagtggaccgtgcctactgtctctggctctctcactccgcagccgacccaacccccgccaaaacccaaaactatgggaagccccgtccagtcaactctgatctctgagctcaagcaaaagtttgagaagaagagtgtgcacaacaaggcttacttctagtgtatgccctatgaccccccatctttcctccgcccctgacccccaccaccctgctgctcggactatgctccccttcctctgctccttaaggtcactgacccctgttttgcacaatggtataatccccactgtcctcatctctaccgccaccttctggcgcaacaagaagttgcgctctgacagggctctagtcagggccttgggcaagacattgggctctaggatgcaattggcaaatacgtccccgttactcaaatccttggcactactacaatgccctccattcttcagggctgagaattgacgagaagccagctcacccatcccagacctcacagtccctcaggttctactgggatctcatcatcatccttagtcaagcagcagggccctggccacgtggagcaacactgactagaatctggatcctgacgcctgcagctgagagcaggagcaggaaaaggaggctcagcactgtctcaggctggaggtcagcgaacctcgtgggctgtaggaaagcaaatgtaggtaaggggagagcaaggatgcacagaaaacacactgactgtgggactgtgccaggatgcatttggaaagatagagcattctgtctgggcagagactgtggaccctggtatgcccacgtgggacagaggacacagaggtggaagattgatcttgccaagagtgagggcagatgtctccagccaggactgccctgagccgcaaaatgtcaaagctggagctatagaggtagccctaaaggcaactagaagagcatcagggctgctctctgaggagctgccccaccagccatccttgaagagacaattcagggcagttgatgaatatcagggctgagatgtggtgagacttccgtttttatccagctcttttgctcacatcgcgtaaccttgggaaagctgtttaaagtcgctgatcatcctcttcctcatctgtaaatgaagaaagtaggccctgtctacctcacatgcaggtctagggtgaggattgaagaaaatagtggtgatgagggctttaaccaagtgcaaagcggcatgaatgcaaagtatttttctgcagcccagttctgtgggtgcagctcttccagaaagtattaggagcctcacatctactctgccaagcgccccagcaggcactgtgctgggcttaggggctaccactggatgatggcattgccgtgactcacacacctctacttctgttcttccctcactccatccccgctaccgtcctggccagctaccgtcagagagaaccagagctccaagtctttaatttgccaagatgaagaaaatgagttctcaaggagggaatgctttgcttgaggccacacagcaggttggtagcaaagatcttgtctagccagggcagcccttatcagcttgtgacaaccttccccaggacagaagtcatacaaggcctctggggttaatacaaataggttgtgccctgctttaaggaacctgctatcaggaaatctacatgtgtgcacagagagagaaaagtagaacagttctttgcatttggctctacttactaacaacccctctagaatacattggtgatttcatttaaagagattgtatgcatttgtggctttcctgatttctgagtctgtgtttggaggtgttactgagatgtgccagtgtgcagaatccttgctggggtttctacagtccccaacgtgaacagtattaagcaagaggtggactcgagcaatccaggagcccagactgagcaaataagtactttccagcctgtgtttcaggagaggactgtgctggatcatgcttgccctccacagggaatacagcatccttacagcttgcatgcaatcaacctcttttgtaaatggaaaataaagtctgttacccaaaggccatgctgatcccctgctccctgctttcatttatgtttgctgacctgtggagaccagtctttctgacacacagtgaagctcaacttgcctcctggctgcttcagcaggtggatccattcttcgacccccagatgtgactctaaagaaggctgaaaatttttgtccaaattgccatgcagatatcttgaacagcaggacatttgcaggccttgtctactggacttttctcccaaacaggacaagcccaggcagggctgcatggagaggaatggaacctggagctagaattaattgcccactctcccaccctaccagtgcagcccggcaagggcaggaattgggaggcctagggtgggcatgaaagcttgggaagcactgtcgtctctcagacaggcgtcctaaagacctctaggctggaagcttgggcttgcaagtggatccgggaccgagggtggtctcttggacaaccccaggaacttggaccaaggcagagccaatcttgcaaactggccatggatggggaagtgcccggtagccagcatgagccacactaggaaagaggaggagggtgcagccaaacttaaggcaccggcaagtgttgtcagcactggaggagaccccgccagtggggtgaggccagccaagtccctgtgttacgaatggtgggccaaggggctgtctgctaggtcccagtaggacaggcagagctccaggctggcaccatggtaggcctccagggaaagagctgggaggcaggaatggcacactgggcaggcttgcccattcctggccctgagaatggagctgtagcctcatggacaataaatggatgtgacacc

SEQ ID NO: 112887 - DNA, 700 bp, Homo sapiens
  Payload ID: 2090
  Gene Symbol: CDHR1
  Gene Name: cadherin-related family member 1
  ENST ID: ENST00000622973
  CDS Start-End: 1-407
tggagaactcagctgccattgactttgaaaagtccaaagtattaaccttcaagctcctggctgttgaagtgaacaccccagagaagttcagttccacagcggatgttgtgatccagctcctggacaccaatgacaatgtccccaagttcgactccctctactacgttgccaggattcctgagaacgccccagggggctccagcgtggtggctgtcacagctgtggatccagatacaggaccctggggcgaagtgaaatattccacctatgggactggggcagacctcttcctgatccacccatccactgggcttatctacacccagccctgggctagcctggacgctgaggccactgccaggtacaacttctatgtgaaggcagaggacatggaaggcaagccatagacgaggatgcagaggaacccaacaacctggtggactattccatcacccatgcagagcccgccaacgtgttcgacatcaattcccacacgggggagatctggctcaagaattccatccgctccctggatgccctgcacaacatcacacctggaagggactgcctatggtccctagaggtgcaggccaaggaccggggctccccatccttcagcaccacagccttactcaagattgacatcacagatgctgagaccctctcccggagccccatggctgccttcctgatacagacc

SEQ ID NO: 112888 - DNA, 503 bp, Homo sapiens
  Payload ID: 2090
  Gene Symbol: CDHR1
  Gene Name: cadherin-related family member 1
  ENST ID: ENST00000623399
  CDS Start-End: 1-235
catcacccatgcagagcccgccaacgtgttcgacatcaattcccacacgggggagatctggctcaagaattccatccgctccctggatgccctgcacaacatcacacctggaagggactgcctatggtccctagaggtgcaggccaaggaccggggctccccatccttcagcaccacagccttactcaagattgacatcacagatgctgaggtgagaagactaagaagcaactgaatacttccctacccaccaacatgctcctggctctcccctgcactgcttgctgctcttccacagcccttctctcatcctgacccctctgtctcatgtgcaccaccaagcttcttttgcttggcttgaaggtctgaacatccactctcaccttcatggtagcccaggctatttcatgatggtgacaccctcaagatccgtagaccactgtattagttcgttctcatgctgctaataaagatacccgagactgggtaatttatagaggaaa

SEQ ID NO: 112889 - DNA, 587 bp, Homo sapiens
  Payload ID: 2090
  Gene Symbol: CDHR1
  Gene Name: cadherin-related family member 1
  ENST ID: ENST00000624091
  CDS Start-End: 1-145
catggatggagaccggggcaaacccaatcgaattctctacagccttgtaaatgacttccctaggcaatgcaggacgatcctgtggcacgactcccctgcgcctccctgtggtcctgtgcagaacttcagggtgcatctcccttgacagggaacgatggagcctttgaaattaatgagacatctggagccatctccatcactcagagcccggcccagctccagagagaggtgtatgagctgcatgtacaggtgactgaaatgagccctgcggggagcccagctgcccaggccaccgtcccagtcaccatcaggattgtggacctcaacaaccacccgccaacattctatggagagagcggaccccaaaacaggtttgagctgtccatgaatgagcacccaccccagggagagatcctgcggggcctcaagatcaccgtcaatgactccgaccagggagccaatgccaaattcaacttgcagctggtgggacccaggggcatcttccgagtggttccacagacagtcctgaatgaagcccaagtcacaatcattgtggagaactcagctgccattgactttgaaaagtc

SEQ ID NO: 112890 - DNA, 6781 bp, Homo sapiens
  Payload ID: 2090
  Gene Symbol: CDHR1
  Gene Name: cadherin-related family member 1
  Uniprot ID: Q96JP9
  ENST ID: ENST00000623527
  CDS Start-End: 127-2706
cccgccgcggctgcagtcgccgctacccccattgtggtctctgccctccccgcgggcccagggcatgctccgtgcccctgcgcccggtctcggcggcggcaggcgacactccgcgccggcggagacatgaggcgctgccggtgggccgccctggccctggggctgctgcgcctctgcttggctcaggccaacttcgccccgcacttcttcgacaacggggtcggcagcaccaacggaaacatggctctgttcagcctcccagaggacacccctgtaggctctcacgtatacaccctgaatgggacagaccctgagggagaccccatctcctaccacatcagctttgaccccagcactagaagcgtcttttctgttgaccccacttttggaaacatcaccctggttgaagagctggacagagagagggaagatgagattgaagccatcatcagcatttctgatggcctgaatctggtggccgaaaaagtcgtgatcctggtgaccgatgccaatgatgaggcgcccaggttcatccaggagccttatgttgccctggttcccgaggacatacctgctgggagcatcatctttaaggtccatgcagtggacagggacacaggctctggagggagtgtcacctacttcctgcagaacctgcactccccatttgccgtggaccgccacagcggtgtgctgcgcctccaggctggggccactctggactacgagaggtcccggacccactacatcaccgtggtcgccaaggatggcggtgggaggcttcatggggctgatgtggtgttctcagccaccaccacggtcacggtcaatgtggaggatgttcaggacatggcccctgtcttcgtgggcacaccctactatggctatgtgtacgaggacacccttccgggctcggaggtactgaaggtggtcgccatggatggagaccggggcaaacccaatcgaattctctacagccttgtaaatgggaacgatggagcctttgaaattaatgagacatctggagccatctccatcactcagagcccggcccagctccagagagaggtgtatgagctgcatgtacaggtgactgaaatgagccctgcggggagcccagctgcccaggccaccgtcccagtcaccatcaggattgtggacctcaacaaccacccgccaacattctatggagagagcggaccccaaaacaggtttgagctgtccatgaatgagcacccaccccagggagagatcctgcggggcctcaagatcaccgtcaatgactccgaccagggagccaatgccaaattcaacttgcagctggtgggacccaggggcatcttccgagtggttccacagacagtcctgaatgaagcccaagtcacaatcattgtggagaactcagctgccattgactttgaaaagtccaaagtattaaccttcaagctcctggctgttgaagtgaacaccccagagaagttcagttccacagcggatgttgtgatccagctcctggacaccaatgacaatgtccccaagttcgactccctctactacgttgccaggattcctgagaacgccccagggggctccagcgtggtggctgtcacagctgtggatccagatacaggaccctggggcgaagtgaaatattccacctatgggactggggcagacctcttcctgatccacccatccactgggcttatctacacccagccctgggctagcctggacgctgaggccactgccaggtacaacttctatgtgaaggcagaggacatggaaggcaagtacagcgtagctgaggtgtttatcacactgctggatgtcaatgaccacccccctcagtttggaaagagcgttcagaagaagacgatggtgctagggaccccagtgaaaattgaggccatagacgaggatgcagaggaacccaacaacctggtggactattccatcacccatgcagagcccgccaacgtgttcgacatcaattcccacacgggggagatctggctcaagaattccatccgctccctggatgccctgcacaacatcacacctggaagggactgcctatggtccctagaggtgcaggccaaggaccggggctccccatccttcagcaccacagccttactcaagattgacatcacagatgctgagaccctctcccggagccccatggctgccttcctgatacagaccaaggacaaccccatgaaggccgtgggtgtgctggccggcaccatggccaccgtcgtggccatcactgtcctcatctccaccgccaccttctggcgcaacaagaagtctaacaaggtcctgccaatgcggcgggtgctccgcaagcggcccagccctgcgccccgcaccatccgcattgagtggctcaagtccaagagcaccaaagccgctaccaagttcatgctcaaagagaaacctcccaatgagaactgtaacaacaacagcccagaaagctctctgctcccgagagctccggctctccctccaccacccagcgtggcgcccagcactggcgcagcccagtggaccgtgcctactgtctctggctctctcactccgcagccgacccaacccccgccaaaacccaaaactatgggaagccccgtccagtcaactctgatctctgagctcaagcaaaagtttgagaagaagagtgtgcacaacaaggcttacttctagtgtatgccctatgaccccccatctttcctccgcccctgacccccaccaccctgctgctcggactatgctccccttcctctgctccttaaggtcactgacccctgttttgcacaatggtataatccccactgtcctcatctctaccgccaccttctggcgcaacaagaagttgcgctctgacagggctctagtcagggccttgggcaagacattgggctctaggatgcaattggcaaatacgtccccgttactcaaatccttggcactactacaatgccctccattcttcagggctgagaattgacgagaagccagctcacccatcccagacctcacagtccctcaggttctactgggatctcatcatcatccttagtcaagcagcagggccctggccacgtggagcaacactgactagaatctggatcctgacgcctgcagctgagagcaggagcaggaaaaggaggctcagcactgtctcaggctggaggtcagcgaacctcgtgggctgtaggaaagcaaatgtaggtaaggggagagcaaggatgcacagaaaacacactgactgtgggactgtgccaggatgcatttggaaagatagagcattctgtctgggcagagactgtggaccctggtatgcccacgtgggacagaggacacagaggtggaagattgatcttgccaagagtgagggcagatgtctccagccaggactgccctgagccgcaaaatgtcaaagctggagctatagaggtagccctaaaggcaactagaagagcatcagggctgctctctgaggagctgccccaccagccatccttgaagagacaattcagggcagttgatgaatatcagggctgagatgtggtgagacttccgtttttatccagctcttttgctcacatcgcgtaaccttgggaaagctgtttaaagtcgctgatcatcctcttcctcatctgtaaatgaagaaagtaggccctgtctacctcacatgcaggtctagggtgaggattgaagaaaatagtggtgatgagggctttaaccaagtgcaaagcggcatgaatgcaaagtatttttctgcagcccagttctgtgggtgcagctcttccagaaagtattaggagcctcacatctactctgccaagcgccccagcaggcactgtgctgggcttaggggctaccactggatgatggcattgccgtgactcacacacctctacttctgttcttccctcactccatccccgctaccgtcctggccagctaccgtcagagagaaccagagctccaagtctttaatttgccaagatgaagaaaatgagttctcaaggagggaatgctttgcttgaggccacacagcaggttggtagcaaagatcttgtctagccagggcagcccttatcagcttgtgacaaccttccccaggacagaagtcatacaaggcctctggggttaatacaaataggttgtgccctgctttaaggaacctgctatcaggaaatctacatgtgtgcacagagagagaaaagtagaacagttctttgcatttggctctacttactaacaacccctctagaatacattggtgatttcatttaaagagattgtatgcatttgtggctttcctgatttctgagtctgtgtttggaggtgttactgagatgtgccagtgtgcagaatccttgctggggtttctacagtccccaacgtgaacagtattaagcaagaggtggactcgagcaatccaggagcccagactgagcaaataagtactttccagcctgtgtttcaggagaggactgtgctggatcatgcttgccctccacagggaatacagcatccttacagcttgcatgcaatcaacctcttttgtaaatggaaaataaagtctgttacccaaaggccatgctgatcccctgctccctgctttcatttatgtttgctgacctgtggagaccagtctttctgacacacagtgaagctcaacttgcctcctggctgcttcagcaggtggatccattcttcgacccccagatgtgactctaaagaaggctgaaaatttttgtccaaattgccatgcagatatcttgaacagcaggacatttgcaggccttgtctactggacttttctcccaaacaggacaagcccaggcagggctgcatggagaggaatggaacctggagctagaattaattgcccactctcccaccctaccagtgcagcccggcaagggcaggaattgggaggcctagggtgggcatgaaagcttgggaagcactgtcgtctctcagacaggcgtcctaaagacctctaggctggaagcttgggcttgcaagtggatccgggaccgagggtggtctcttggacaaccccaggaacttggaccaaggcagagccaatcttgcaaactggccatggatggggaagtgcccggtagccagcatgagccacactaggaaagaggaggagggtgcagccaaacttaaggcaccggcaagtgttgtcagcactggaggagaccccgccagtggggtgaggccagccaagtccctgtgttacgaatggtgggccaaggggctgtctgctaggtcccagtaggacaggcagagctccaggctggcaccatggtaggcctccagggaaagagctgggaggcaggaatggcacactgggcaggcttgcccattcctggccctgagaatggagctgtagcctcatggacaataaatggatgtgacaccaaatactctgcagagtcattttcctcctgcggctgagctcagatcttccaatcacgtgaaataacaaagtcctttacagtttgacagccctaggtctgaattctggttctgccattaattgtgactttgggcaagaggtcaagtctctctgggcctcactttcctcattaacacagggtgcaaagtatggttgcagagaggatgaaaagatctaatatatgtaaagtgcctagcaccggctttgtatctacttacacaagctcagtagacacttgccgtgactgtggcccacatactagaacaccatgtcctgaaagagaggaccccctccatgcatcctcaccccccaggatgtttccacccacctgtaggtccagaagcttttacttcatgctagaaaaagagaagagagtggatccagaggggagtggaggacagggcagatgccacagcatctgtggcctgtgtagccggcagcctgcatttgggcgttgacattccaggggagttaggaacaatgagaggtctctaagaacttgtggcactctgtcctcaagcagctgtccctcagaatcctgctagaaaagtgtgatcagagctgggaaggagccaccatgctctgcttctctaaggatttcggtgattctatttttagggactgaaggcgttgagggaatccaaggccagtccacctgccaggggtgttggcatctgttgacaggcagtggcacatcctgacagtcttcaaggccttggccaccaagggatggagagggagaatggagaagatgccacatgaggaatgaggcaggagactggcatgtgccacatggaggaccccttaggaaactcacaaacaacctagggaggggttctctgaagggcctagtttccagaatgaggcggtcatggcttaagcgaccatcatttgatcaataaagcagagtagcaacaggctgatgttggggacatcggtttgatgttataaaatcgtgcacatgtaccccttttgaggcctgaatgaggttcggttatttattcatttctcaataatttactcagccattcctagggtgacaagtttggagtatatcttctgtgccaggctctcttctaggtgttaggtgtatgtctctaacaagatagaaggaaagaagaaaagaaaaagaacaacattcctctctttaattgctaatcgcctgggcctagggagtcttcattttaaaagcaagtagccctgcttacaaatgtctcctcaatcaaaggcatttgccttaaacttgtatggtctaaactctaaataaataagcttctcaagggcatgacaactata

SEQ ID NO: 112891 - DNA, 4068 bp, Homo sapiens
  Payload ID: 2091
  Gene Symbol: CDHR2
  Gene Name: cadherin-related family member 2
  Uniprot ID: Q9BYE9
  ENST ID: ENST00000261944
  CDS Start-End: 40-3972
gcctccgtggcgaaggggacacaggtccctgcggatgtgatggcccagctatggctgtcctgcttcctccttcctgccctcgtggtgtctgtggcagccaacgtggccccgaagttcctagccaacatgacgtcagtgatcctgcctgaggacctgcctgtgggtgcccaggccttctggttggtagcggaagaccaggacaatgaccctctgacctatgggatgagcggccccaatgcctacttcttcgctgtcactccgaaaactggggaagtgaagctggccagcgctctggactacgagacactctacacattcaaagtcaccatctccgtgagcgacccctacatccaggtgcagagggagatgctggtgattgtggaagatagaaacgacaacgcacccgttttccagaacaccgctttctccaccagcatcaacgagaccctgcccgtgggcagtgtggtgttctccgtgctggccgtggataaagacatggggtctgcaggcatggtcgtgtactccatagagaaggtcatccctagcactggggacagcgagcatctcttccggatcctggccaatggctccatagtcctcaatggcagcctcagctacaacaacaagagcgctttctaccagctggagctgaaggcctgtgacttgggcggcatgtaccacaacaccttcaccatccagtgctccctgcctgtcttcctgtccatctccgtggtggaccagcctgaccttgacccccagtttgtcagggagttttactcggcctctgtggctgaggatgcagccaagggaacctcggtgctgacggtggaggctgtggatggcgacaaaggcatcaatgaccctgtgatctacagcatctcctactccacgcggcccggctggtttgacatcggggcagatggggtgatcagggtcaacggctccctggaccgtgagcagctgctggaggcggatgaggaggtgcagctgcaggtcacggccaccgagacacacctcaacatctacgggcaggaggccaaggtgagcatctgggtgacagtgagagtgatggacgtcaatgaccacaaacctgagttttacaactgcagcctcccagcctgcaccttcacccccgaagaggcccaagtgaacttcactggctacgtggacgagcatgcctccccccgcatccccatcgatgacctcaccatggtggtctacgacccggacaagggcagcaatggcaccttcctgttgtcgctggggggccccgatgcagaagccttcagcgtctccccggagcgggcagtgggctcagcctccgttcaggtgctggtgagagtatccgcgctggtggactacgagaggcagacggcgatggcggtgcaggttgtggccacagactccgtcagccagaacttctccgtcgccatggtgaccatccaccttagagacattaatgaccacaggcccacgtttccccagagcttgtacgtcctcacggtgccagagcacagcgccaccggctctgtggtcaccgacagcatccacgccacggacccagacacgggcgcgtggggccaaattacctacagcctgctcccaggaaatggggcagacctcttccaagtggatcccgtctcagggacggtgacggtgaggaacggtgagctgctggaccgggagagccaggccgtgtactacctgacgctgcaggccacagacggcgggaacctgtcctcctccaccacactgcagatccacctgctggacatcaacgacaatgcacccgtggttagcggctcctacaacatcttcgtccaggaggaggagggcaatgtctccgtgaccatccaggcccacgacaatgatgagccgggcaccaacaacagccgtctgctcttcaacctgctgcctggcccctacagccacaacttctccttggaccctgacacagggctcctcagaaacctggggcccctggacagagaggccatcgaccccgccctggagggccgcattgtgctgacagtgcttgtgtctgactgcggcgagcctgtcctcggcaccaaagtcaatgtcaccatcactgtggaggacatcaatgataacctgcccatcttcaatcagtccagctacaactttacggtgaaggaggaggatccaggagtgctagtgggcgtggtgaaggcctgggacgcggaccagacggaagccaacaaccgcatcagcttcagcctgtcggggagtggtgccaactacttcatgatccgaggcttggtgctgggggctgggtgggctgagggctacctccggctgcccccggacgtgagcctggattacgagacacagcccgtcttcaacttgacagtgagtgctgagaacccagacccccaggggggtgagaccatagtagacgtctgcgtgaatgtgaaagacgtgaacgacaatccccccaccctggatgtagcctcactccggggcatccgtgtggctgagaatggctcacagcacggccaggtggctgtggtggttgcctcggatgtggacaccagtgcccagctggagatacagcttgtgaacattctctgcaccaaggccggggtcgatgtgggcagcctatgctggggctggttctcagtggcggccaacggctctgtgtacatcaaccagagcaaagccatcgactacgaggcctgtgacctggtcacgctggttgtgcgggcctgtgacctagccacggaccccggcttccaggcctacagcaacaatggaagcctcctcattaccattgaggacgtgaatgacaatgcaccctattttctgcctgagaataagacttttgtgatcatccctgaactcgtgctgcccaaccgggaggtggcttctgtccgggccagagacgatgattcagggaacaatggcgtcatcctgttctccatcctccgagtagacttcatctctaaggacggggccaccatccctttccagggtgtcttctcgatcttcacctcctccgaggccgacgtgttcgctgggagcattcagccggtgaccagcctcgactccactctccaaggcacctaccaagtgacagtccaggccagggacagaccttccttgggtcctttcctggaagccaccaccaccctgaatctcttcaccgtggaccagagttaccgctcgcggctgcagttctccacaccgaaggaggaggtgggcgccaacagacaggcgattaatgcggctcttacccaggcaaccaggactacagtatacattgtggacattcaggacatagattctgcagctcgggcccgacctcactcctacctcgatgcctactttgtcttccccaatgggtcagccctgacccttgatgagctgagtgtgatgatccggaatgatcaggactcgctgacgcagctgctgcagctggggctggtggtgctgggctcccaggagagccaggagtcagacctgtcgaaacagctcatcagtgtcatcataggattgggagtggctttgctgctggtccttgtgatcatgaccatggccttcgtgtgtgtgcggaagagctacaaccggaagcttcaagctatgaaggctgccaaggaggccaggaagacagcagcaggggtgatgccctcagcccctgccatcccagggactaacatgtacaacactgagcgagccaaccccatgctgaacctccccaacaaagacctgggcttggagtacctctctccctccaatgacctggactctgtcagcgtcaactccctggacgacaactctgtggatgtggacaagaacagtcaggaaatcaaggagcacaggccaccacacacaccaccagagccagatccagagcccctgagcgtggtcctgttaggacggcaggcaggcgcaagtggacagctggaggggccatcctacaccaacgctggcctggacaccacggacctgtgacaggggcccccactcttctggaccccttgaagaggccctaccacaccctaactgcacctgtctccctggagatgaaaatatatgacgctgccctgc

SEQ ID NO: 112892 - DNA, 4005 bp, Homo sapiens
  Payload ID: 2091
  Gene Symbol: CDHR2
  Gene Name: cadherin-related family member 2
  Uniprot ID: Q9BYE9
  ENST ID: ENST00000506348
  CDS Start-End: 48-3980
tccaggagccattccctgacctcttcccttaggtccctgcggatgtgatggcccagctatggctgtcctgcttcctccttcctgccctcgtggtgtctgtggcagccaacgtggccccgaagttcctagccaacatgacgtcagtgatcctgcctgaggacctgcctgtgggtgcccaggccttctggttggtagcggaagaccaggacaatgaccctctgacctatgggatgagcggccccaatgcctacttcttcgctgtcactccgaaaactggggaagtgaagctggccagcgctctggactacgagacactctacacattcaaagtcaccatctccgtgagcgacccctacatccaggtgcagagggagatgctggtgattgtggaagatagaaacgacaacgcacccgttttccagaacaccgctttctccaccagcatcaacgagaccctgcccgtgggcagtgtggtgttctccgtgctggccgtggataaagacatggggtctgcaggcatggtcgtgtactccatagagaaggtcatccctagcactggggacagcgagcatctcttccggatcctggccaatggctccatagtcctcaatggcagcctcagctacaacaacaagagcgctttctaccagctggagctgaaggcctgtgacttgggcggcatgtaccacaacaccttcaccatccagtgctccctgcctgtcttcctgtccatctccgtggtggaccagcctgaccttgacccccagtttgtcagggagttttactcggcctctgtggctgaggatgcagccaagggaacctcggtgctgacggtggaggctgtggatggcgacaaaggcatcaatgaccctgtgatctacagcatctcctactccacgcggcccggctggtttgacatcggggcagatggggtgatcagggtcaacggctccctggaccgtgagcagctgctggaggcggatgaggaggtgcagctgcaggtcacggccaccgagacacacctcaacatctacgggcaggaggccaaggtgagcatctgggtgacagtgagagtgatggacgtcaatgaccacaaacctgagttttacaactgcagcctcccagcctgcaccttcacccccgaagaggcccaagtgaacttcactggctacgtggacgagcatgcctccccccgcatccccatcgatgacctcaccatggtggtctacgacccggacaagggcagcaatggcaccttcctgttgtcgctggggggccccgatgcagaagccttcagcgtctccccggagcgggcagtgggctcagcctccgttcaggtgctggtgagagtatccgcgctggtggactacgagaggcagacggcgatggcggtgcaggttgtggccacagactccgtcagccagaacttctccgtcgccatggtgaccatccaccttagagacattaatgaccacaggcccacgtttccccagagcttgtacgtcctcacggtgccagagcacagcgccaccggctctgtggtcaccgacagcatccacgccacggacccagacacgggcgcgtggggccaaattacctacagcctgctcccaggaaatggggcagacctcttccaagtggatcccgtctcagggacggtgacggtgaggaacggtgagctgctggaccgggagagccaggccgtgtactacctgacgctgcaggccacagacggcgggaacctgtcctcctccaccacactgcagatccacctgctggacatcaacgacaatgcacccgtggttagcggctcctacaacatcttcgtccaggaggaggagggcaatgtctccgtgaccatccaggcccacgacaatgatgagccgggcaccaacaacagccgtctgctcttcaacctgctgcctggcccctacagccacaacttctccttggaccctgacacagggctcctcagaaacctggggcccctggacagagaggccatcgaccccgccctggagggccgcattgtgctgacagtgcttgtgtctgactgcggcgagcctgtcctcggcaccaaagtcaatgtcaccatcactgtggaggacatcaatgataacctgcccatcttcaatcagtccagctacaactttacggtgaaggaggaggatccaggagtgctagtgggcgtggtgaaggcctgggacgcggaccagacggaagccaacaaccgcatcagcttcagcctgtcggggagtggtgccaactacttcatgatccgaggcttggtgctgggggctgggtgggctgagggctacctccggctgcccccggacgtgagcctggattacgagacacagcccgtcttcaacttgacagtgagtgctgagaacccagacccccaggggggtgagaccatagtagacgtctgcgtgaatgtgaaagacgtgaacgacaatccccccaccctggatgtagcctcactccggggcatccgtgtggctgagaatggctcacagcacggccaggtggctgtggtggttgcctcggatgtggacaccagtgcccagctggagatacagcttgtgaacattctctgcaccaaggccggggtcgatgtgggcagcctatgctggggctggttctcagtggcggccaacggctctgtgtacatcaaccagagcaaagccatcgactacgaggcctgtgacctggtcacgctggttgtgcgggcctgtgacctagccacggaccccggcttccaggcctacagcaacaatggaagcctcctcattaccattgaggacgtgaatgacaatgcaccctattttctgcctgagaataagacttttgtgatcatccctgaactcgtgctgcccaaccgggaggtggcttctgtccgggccagagacgatgattcagggaacaatggcgtcatcctgttctccatcctccgagtagacttcatctctaaggacggggccaccatccctttccagggtgtcttctcgatcttcacctcctccgaggccgacgtgttcgctgggagcattcagccggtgaccagcctcgactccactctccaaggcacctaccaagtgacagtccaggccagggacagaccttccttgggtcctttcctggaagccaccaccaccctgaatctcttcaccgtggaccagagttaccgctcgcggctgcagttctccacaccgaaggaggaggtgggcgccaacagacaggcgattaatgcggctcttacccaggcaaccaggactacagtatacattgtggacattcaggacatagattctgcagctcgggcccgacctcactcctacctcgatgcctactttgtcttccccaatgggtcagccctgacccttgatgagctgagtgtgatgatccggaatgatcaggactcgctgacgcagctgctgcagctggggctggtggtgctgggctcccaggagagccaggagtcagacctgtcgaaacagctcatcagtgtcatcataggattgggagtggctttgctgctggtccttgtgatcatgaccatggccttcgtgtgtgtgcggaagagctacaaccggaagcttcaagctatgaaggctgccaaggaggccaggaagacagcagcaggggtgatgccctcagcccctgccatcccagggactaacatgtacaacactgagcgagccaaccccatgctgaacctccccaacaaagacctgggcttggagtacctctctccctccaatgacctggactctgtcagcgtcaactccctggacgacaactctgtggatgtggacaagaacagtcaggaaatcaaggagcacaggccaccacacacaccaccagagccagatccagagcccctgagcgtggtcctgttaggacggcaggcaggcgcaagtggacagctggaggggccatcctacaccaacgctggcctggacaccacggacctgtgacaggggcccccactcttctggaccc

SEQ ID NO: 112893 - DNA, 4509 bp, Homo sapiens
  Payload ID: 2091
  Gene Symbol: CDHR2
  Gene Name: cadherin-related family member 2
  Uniprot ID: Q9BYE9
  ENST ID: ENST00000510636
  CDS Start-End: 275-4207
aaagggggcaggaaccgtcacattgttcagtgatgaaaaccgagggctgcaggagtgcggaccctggaagatcgaggaagacaagtctacccgaatcccccactgtccctccatcttactcgtcctccttccctcacttcccagcccccggcaccagctcgactcgagcttagtggctttcaggcaacggaagctgtgtgaccttgggcaagacacggactctctccggaccccgcagcgttccgacatccagaatgcagtccctgcggatgtgatggcccagctatggctgtcctgcttcctccttcctgccctcgtggtgtctgtggcagccaacgtggccccgaagttcctagccaacatgacgtcagtgatcctgcctgaggacctgcctgtgggtgcccaggccttctggttggtagcggaagaccaggacaatgaccctctgacctatgggatgagcggccccaatgcctacttcttcgctgtcactccgaaaactggggaagtgaagctggccagcgctctggactacgagacactctacacattcaaagtcaccatctccgtgagcgacccctacatccaggtgcagagggagatgctggtgattgtggaagatagaaacgacaacgcacccgttttccagaacaccgctttctccaccagcatcaacgagaccctgcccgtgggcagtgtggtgttctccgtgctggccgtggataaagacatggggtctgcaggcatggtcgtgtactccatagagaaggtcatccctagcactggggacagcgagcatctcttccggatcctggccaatggctccatagtcctcaatggcagcctcagctacaacaacaagagcgctttctaccagctggagctgaaggcctgtgacttgggcggcatgtaccacaacaccttcaccatccagtgctccctgcctgtcttcctgtccatctccgtggtggaccagcctgaccttgacccccagtttgtcagggagttttactcggcctctgtggctgaggatgcagccaagggaacctcggtgctgacggtggaggctgtggatggcgacaaaggcatcaatgaccctgtgatctacagcatctcctactccacgcggcccggctggtttgacatcggggcagatggggtgatcagggtcaacggctccctggaccgtgagcagctgctggaggcggatgaggaggtgcagctgcaggtcacggccaccgagacacacctcaacatctacgggcaggaggccaaggtgagcatctgggtgacagtgagagtgatggacgtcaatgaccacaaacctgagttttacaactgcagcctcccagcctgcaccttcacccccgaagaggcccaagtgaacttcactggctacgtggacgagcatgcctccccccgcatccccatcgatgacctcaccatggtggtctacgacccggacaagggcagcaatggcaccttcctgttgtcgctggggggccccgatgcagaagccttcagcgtctccccggagcgggcagtgggctcagcctccgttcaggtgctggtgagagtatccgcgctggtggactacgagaggcagacggcgatggcggtgcaggttgtggccacagactccgtcagccagaacttctccgtcgccatggtgaccatccaccttagagacattaatgaccacaggcccacgtttccccagagcttgtacgtcctcacggtgccagagcacagcgccaccggctctgtggtcaccgacagcatccacgccacggacccagacacgggcgcgtggggccaaattacctacagcctgctcccaggaaatggggcagacctcttccaagtggatcccgtctcagggacggtgacggtgaggaacggtgagctgctggaccgggagagccaggccgtgtactacctgacgctgcaggccacagacggcgggaacctgtcctcctccaccacactgcagatccacctgctggacatcaacgacaatgcacccgtggttagcggctcctacaacatcttcgtccaggaggaggagggcaatgtctccgtgaccatccaggcccacgacaatgatgagccgggcaccaacaacagccgtctgctcttcaacctgctgcctggcccctacagccacaacttctccttggaccctgacacagggctcctcagaaacctggggcccctggacagagaggccatcgaccccgccctggagggccgcattgtgctgacagtgcttgtgtctgactgcggcgagcctgtcctcggcaccaaagtcaatgtcaccatcactgtggaggacatcaatgataacctgcccatcttcaatcagtccagctacaactttacggtgaaggaggaggatccaggagtgctagtgggcgtggtgaaggcctgggacgcggaccagacggaagccaacaaccgcatcagcttcagcctgtcggggagtggtgccaactacttcatgatccgaggcttggtgctgggggctgggtgggctgagggctacctccggctgcccccggacgtgagcctggattacgagacacagcccgtcttcaacttgacagtgagtgctgagaacccagacccccaggggggtgagaccatagtagacgtctgcgtgaatgtgaaagacgtgaacgacaatccccccaccctggatgtagcctcactccggggcatccgtgtggctgagaatggctcacagcacggccaggtggctgtggtggttgcctcggatgtggacaccagtgcccagctggagatacagcttgtgaacattctctgcaccaaggccggggtcgatgtgggcagcctatgctggggctggttctcagtggcggccaacggctctgtgtacatcaaccagagcaaagccatcgactacgaggcctgtgacctggtcacgctggttgtgcgggcctgtgacctagccacggaccccggcttccaggcctacagcaacaatggaagcctcctcattaccattgaggacgtgaatgacaatgcaccctattttctgcctgagaataagacttttgtgatcatccctgaactcgtgctgcccaaccgggaggtggcttctgtccgggccagagacgatgattcagggaacaatggcgtcatcctgttctccatcctccgagtagacttcatctctaaggacggggccaccatccctttccagggtgtcttctcgatcttcacctcctccgaggccgacgtgttcgctgggagcattcagccggtgaccagcctcgactccactctccaaggcacctaccaagtgacagtccaggccagggacagaccttccttgggtcctttcctggaagccaccaccaccctgaatctcttcaccgtggaccagagttaccgctcgcggctgcagttctccacaccgaaggaggaggtgggcgccaacagacaggcgattaatgcggctcttacccaggcaaccaggactacagtatacattgtggacattcaggacatagattctgcagctcgggcccgacctcactcctacctcgatgcctactttgtcttccccaatgggtcagccctgacccttgatgagctgagtgtgatgatccggaatgatcaggactcgctgacgcagctgctgcagctggggctggtggtgctgggctcccaggagagccaggagtcagacctgtcgaaacagctcatcagtgtcatcataggattgggagtggctttgctgctggtccttgtgatcatgaccatggccttcgtgtgtgtgcggaagagctacaaccggaagcttcaagctatgaaggctgccaaggaggccaggaagacagcagcaggggtgatgccctcagcccctgccatcccagggactaacatgtacaacactgagcgagccaaccccatgctgaacctccccaacaaagacctgggcttggagtacctctctccctccaatgacctggactctgtcagcgtcaactccctggacgacaactctgtggatgtggacaagaacagtcaggaaatcaaggagcacaggccaccacacacaccaccagagccagatccagagcccctgagcgtggtcctgttaggacggcaggcaggcgcaagtggacagctggaggggccatcctacaccaacgctggcctggacaccacggacctgtgacaggggcccccactcttctggaccccttgaagaggccctaccacaccctaactgcacctgtctccctggagatgaaaatatatgacgctgccctgcctcctgcttttggccaatcacggcagacaggggttggggaaatattttattaccaatgtatactgtgacagtttgtagccaaaaactgcggctggaggggtggggacgggacactgagtggtcacaagggacttgggctcacagcacaggggggacaaggggctggagagggtggcctttaaaagacaactgtggttatagaatga

SEQ ID NO: 112894 - DNA, 575 bp, Homo sapiens
  Payload ID: 2091
  Gene Symbol: CDHR2
  Gene Name: cadherin-related family member 2
  ENST ID: ENST00000510124
  CDS Start-End: 193-381
agtcggccaggggtgcgtaagggcgcggcgcctggggcctggcagcctccgtgaccttggaggagtgacttcgttttctcgcctgtgaaaagggaaacaatacgaccccatggtcgttcagagaatcttcgcttcccggagagtgtgtcccctcccccagccccggtgggcgcggaggtccctgcggatgtgatggcccagctatggctgtcctgcttcctccttcctgccctcgtggtgtctgtggcagccaacgtggccccgaagttcctagccaacatgacgtcagtgatcctgcctgaggacctgcctgtggtgcaaaatggaatccaggaatgtcgaaagctgccagatgaaacaagagacaccaaggggtattgacaaatacaaaacctgtgcaagcaatcccctgatcaagagaaagtatttccatcaccccagaaagttccctgtgtccagttctagtcaatctctgctccctaaaggtgcccaggccttctggttggtagcggaagaccaggacaatgaccctctgacctatgggatgagcggccccaatgcctacttcttcgctg

SEQ ID NO: 112895 - DNA, 3813 bp, Homo sapiens
  Payload ID: 2092
  Gene Symbol: CDHR3
  Gene Name: cadherin-related family member 3
  Uniprot ID: Q6ZTQ4
  ENST ID: ENST00000317716
  CDS Start-End: 81-2738
ctggaataaactttgggtgtgagacgggattcaggctgtggctaatgtgctggaagcacgcacagttgtgaccatcaagtatgcaggaagcaatcattctcctggctctcctgggtgccatgtcagggggagaagcactacacctaatcctcttacctgctacaggcaatgtggcagagaattctccacctgggacttcagtgcacaagttttctgtgaagttatcagcatcattgtcacctgtgatcccaggatttccccagatagtcaactcaaatcccctcactgaagcttttagggtgaattggctgtcaggcacctactttgaggttgtcaccactgggatggaacaactagattttgaaacaggaccaaacatatttgatttgcagatttatgtgaaggatgaggttggtgtcacagacctgcaagtcctgactgtccaggtaacagatgtgaacgagccacctcagtttcaaggcaacttggcagaaggtctacacctctacatagtagaaagagcaaaccctggattcatttaccaggttgaggccttcgatccagaagacacaagccgaaacattcccctcagttatttcctgatttctcccccaaagagcttcagaatgtctgctaatggcaccctcttctccacaacagaattggactttgaagcaggacacagaagtttccatctcatcgtggaggtgagggacagtggaggcctcaaagcctccacagagctccaggtgaacatcgtgaacctcaacgacgaagtccctcgctttaccagcccgacacgagtgtacacagtcctggaggaactgagtccaggaaccatcgtggccaatatcacagcggaggatcctgatgatgaaggttttcccagccacctcctctacagcattaccactgttagcaaatatttcatgataaatcagttgactggtacaatccaagtggcccaaaggatagaccgagatgcaggtgaattgagacaaaatcccaccatttccctggaagttctagtgaaggacagaccatatgggggtcaggagaatcgcatccagataaccttcattgtggaagacgtcaacgacaatcctgccacatgccaaaagttcaccttcagcattatggtgccggaaagaacagccaaggggacgttgcttcttgacctaaacaagttctgctttgatgatgacagtgaggcaccaaacaacagattcaacttcaccatgccatctggagtggggagcggcagcagatttttacaggatccagctggctctgggaagattgtgctgattggtgatctagactacgaaaatccaagtaacctagcagccggcaataaatatacggtgataatccaggtgcaggatgtggcccccccttactataaaaataacgtctacgtttatatcctaacaagcccagaaaatgagtttcctctcatttttgataggccatcctatgtatttgatgtgtcagaaagaaggcccgccagaacccgagtgggacaggtgcgagccactgataaagacctcccccagagcagcctcctgtactccatctccactggaggggccagcctccagtatccaaatgtattttggattaatcccaagacaggagaactccagctggtaactaaagtggactgtgaaacaacccccatctatattctcagaatccaggccaccaacaacgaagacacaagctctgtcactgttactgtgaacatccttgaagaaaatgatgaaaagccaatttgtactccaaactcttatttcctggccctcccagtggatctgaaagttggcacaaatattcagaatttcaagctgacatgtaccgaccttgattccagccccagatctttccgttattccattggcccaggtaacgtcaacaatcatttcaccttctctcccaatgctggttccaatgtcacacgcctgctgcttacatctcgctttgactatgctggtgggtttgataagatctgggactacaagctacttgtctacgtaactgatgacaacttgatgtctgacaggaagaaagcggaggctcttgttgagacaggaacagtgacactgagtattaaagtcattccccacccaaccactatcatcaccacgacccccaggcccagggtcacctatcaggtcctgaggaaaaacgtttactctccatctgcatggtacgtgccgtttgtcatcactttgggctccatattgcttctgggtctcctcgtgtacctggtcgtcctattggccaaagccatccacagacactgcccctgcaagactgggaagaacaaggaacctctgacaaagaaaggagaaacgaagactgcagagagagacgtcgtggtggaaactatccagatgaacactatctttgatggagaagccatagatccagtgaccggggaaacatatgaattcaactcaaaaactggagccagaaagtggaaagatccactaacccaaatgccaaaatggaaagagtccagccaccagggagctgccccacgcagagtcactgctggggaagggatggggtcactgagaagtgccaactgggaagaagatgagctgagtggcaaagcgtgggctgaggatgctggtctgggttccagaaatgagggtggcaagctgggcaacccaaagaacagaaatccagccttcatgaacagggcttaccccaaaccacacccaggaaagtaaacggggtctaaggaggggcctgtcaatcactgagatgctgcctcaccctaaattctatggggatggtgtgggcatggtgtaggggggaaaatgtgggctgaggggattcagacatccagggtcaaacatgggatgtttgacaaatttttaaacaaatagaaaggggtttgatcacatagttgcgtgttctgaaatgatacaggaacattttctatcagatttcagaactacctgtgcttctgataagcaagactgttaactttggggtgtggaattgttgtgtttcttctttgcattgactgctaggaagctctattctgttcaccatagaaagtttgtaggaattcctgacataaatagtgaagactatccttacatctggtttccaccttattttcctgccctcgttttaacatcacccagatttcttcagttataaatatgccatacacctttgtaagtcacctcaaatcttcttcaaaagaagcagaacagtgaaaaaaacagatgagtaagttaagagttggtcatctggaaagaagaaaactcagtaggcaccttcttttgttttttcttgtggtgtccggatcagcatcctgcatgtgagattcatccacgttgtcctgtctagcagtagttcagttctcttcatggttatgtctggtttcattctatgattatatcacaatttatctattctacacttgggtggcagctgcttcagattttttacttttaaaaaatatacttaaaagtgaactacaggcagggcatgatggctcatgcctgtaatgccagcactttgccaaggtgggcagatcacctaaggtcaggagttcaagatcagcctggcctagatggcaaaaccctgtctctactaaaaaatacaaaaattagcttggtgtggtggtgggcacatgtaatcccagctacttgggaggctgaggtagggagaactgcttaaacctgagaggtggaggttacagtgagttgagattgtgccactgcactctagcctgggtgacaaagcaagactccatctcagaaaaaaaaaataaaagtgaattacaacact

SEQ ID NO: 112896 - DNA, 949 bp, Homo sapiens
  Payload ID: 2092
  Gene Symbol: CDHR3
  Gene Name: cadherin-related family member 3
  ENST ID: ENST00000496633
  CDS Start-End: 24-473
acgcacagttgtgaccatcaagtatgcaggaagcaatcattctcctggctctcctgggtgccatgtcagggggagaagcactacacctaatcctcttacctgctacaggcaatgtggcagagaattctccacctgggacttcagtgcacaagttttctgtgaagttatcagcatcattgtcacctgtgatcccaggatttccccagatagtcaactcaaatcccctcactgaagcttttagggtgaattggctgtcaggcacctactttgaggttgtcaccactgggatggaacaactagattttgaaacaggaccaaacatatttgatttgcagatttatgtgaaggatgaggttggtgtcacagacctgcaagtcctgactgtccaggtaacagatgtgaacgagccacctcagtttcaaggcaacttggcagaagcccgacacgagtgtacacagtcctggaggaactgagtccaggaaccatcgtggccaatatcacagcggaggatcctgatgatgaaggttttcccagccacctcctctacagcattaccactgttagcaaatatttcatgataaatcagttgactggtacaatccaagtggcccaaaggatagaccgagatgcaggtgaattgagacaaaatcccaccatttccctggaagttctagtgaaggacagaccatatgggggtcaggagaatcgcatccagataaccttcattgtggaagacgtcaacgacaatcctgccacatgccaaaagttcaccttcagcattatggtgccggaaagaacagccaaggggacgttgcttcttgacctaaacaagttctgctttgatgatgacagtgaggcaccaaacaacagattcaacttcaccatgccatctggagtggggagcggcagcagatttttacaggatccagctggctctgggaagattgtg

SEQ ID NO: 112897 - DNA, 2633 bp, Homo sapiens
  Payload ID: 2092
  Gene Symbol: CDHR3
  Gene Name: cadherin-related family member 3
  ENST ID: ENST00000478080
  CDS Start-End: 122-2515
gagacgggattcaggctgtggctaatgtgctggaagcacgcacagttgtgaccatcaagtatgcaggaagcaatcattctcctggctctcctgggtgccatgtcaggttgtcaccactgggatggaacaactagattttgaaacaggaccaaacatatttgatttgcagatttatgtgaaggatgaggttggtgtcacagacctgcaagtcctgactgtccaggtaacagatgtgaacgagccacctcagtttcaaggcaacttggcagaaggtctacacctctacatagtagaaagagcaaaccctggattcatttaccaggttgaggccttcgatccagaagacacaagccgaaacattcccctcagttatttcctgatttctcccccaaagagcttcagaatgtctgctaatggcaccctcttctccacaacagaattggactttgaagcaggacacagaagtttccatctcatcgtggaggtgagggacagtggaggcctcaaagcctccacagagctccaggtgaacatcgtgaacctcaacgacgaagtccctcgctttaccagcccgacacgagtgtacacagtcctggaggaactgagtccaggaaccatcgtggccaatatcacagcggaggatcctgatgatgaaggttttcccagccacctcctctacagcattaccactgttagcaaatatttcatgataaatcagttgactggtacaatccaagtggcccaaaggatagaccgagatgcaggtgaattgagacaaaatcccaccatttccctggaagttctagtgaaggacagaccatatgggggtcaggagaatcgcatccagataaccttcattgtggaagacgtcaacgacaatcctgccacatgccaaaagttcaccttcagcattatggtgccggaaagaacagccaaggggacgttgcttcttgacctaaacaagttctgctttgatgatgacagtgaggcaccaaacaacagattcaacttcaccatgccatctggagtggggagcggcagcagatttttacaggatccagctggctctgggaagattgtgctgattggtgatctagactacgaaaatccaagtaacctagcagccggcaataaatatacggtgataatccaggtgcaggatgtggcccccccttactataaaaataacgtctacgtttatatcctaacaagcccagaaaatgagtttcctctcatttttgataggccatcctatgtatttgatgtgtcagaaagaaggcccgccagaacccgagtgggacaggtgcgagccactgataaagacctcccccagagcagcctcctgtactccatctccactggaggggccagcctccagtatccaaatgtattttggattaatcccaagacaggagaactccagctggtaactaaagtggactgtgaaacaacccccatctatattctcagaatccaggccaccaacaacgaagacacaagctctgtcactgttactgtgaacatccttgaagaaaatgatgaaaagccaatttgtactccaaactcttatttcctggccctcccagtggatctgaaagttggcacaaatattcagaatttcaagctgacatgtaccgaccttgattccagccccagatctttccgttattccattggcccaggtaacgtcaacaatcatttcaccttctctcccaatgctggttccaatgtcacacgcctgctgcttacatctcgctttgactatgctggtgggtttgataagatctgggactacaagctacttgtctacgtaactgatgacaacttgatgtctgacaggaagaaagcggaggctcttgttgagacaggaacagtgacactgagtattaaagtcattccccacccaaccactatcatcaccacgacccccaggcccagggtcacctatcaggtcctgaggaaaaacgtttactctccatctgcatggtacgtgccgtttgtcatcactttgggctccatattgcttctgggtctcctcgtgtacctggtcgtcctattggccaaagccatccacagacactgcccctgcaagactgggaagaacaaggaacctctgacaaagaaaggagaaacgaagactgcagagagagacgtcgtggtggaaactatccagatgaacactatctttgatggagaagccatagatccagtgaccggggaaacatatgaattcaactcaaaaactggagccagaaagtggaaagatccactaacccaaatgccaaaatggaaagagtccagccaccagggagctgccccacgcagagtcactgctggggaagggatggggtcactgagaagtgccaactgggaagaagatgagctgagtggcaaagcgtgggctgaggatgctggtctgggttccagaaatgagggtggcaagctgggcaacccaaagaacagaaatccagccttcatgaacagggcttaccccaaaccacacccaggaaagtaaacggggtctaaggaggggcctgtcaatcactgagatgctgcctcaccctaaattctatggggatggtgtgggcatggtgtaggggggaaaatgtgggctgaggggattcagacatcca

SEQ ID NO: 112898 - DNA, 482 bp, Homo sapiens
  Payload ID: 2092
  Gene Symbol: CDHR3
  Gene Name: cadherin-related family member 3
  ENST ID: ENST00000468477
  CDS Start-End: 1-482
tagactacgaaaatccaagtaacctagcagccggcaataaatatacggtgataatccaggttactgtgaacatccttgaagaaaatgatgaaaagccaatttgtactccaaactcttatttcctggccctcccagtggatctgaaagttggcacaaatattcagaatttcaagctgacatgtaccgaccttgattccagccccagatctttccgttattccattggcccaggtaacgtcaacaatcatttcaccttctctcccaatgctggttccaatgtcacacgcctgctgcttacatctcgctttgactatgctggtgggtttgataagatctgggactacaagctacttgtctacgtaactgatgacaacttgatgtctgacaggaagaaagcggaggctcttgttgagacaggaacagtgacactgagtattaaagtcattccccacccaaccactatcatcaccacgacccccagg

SEQ ID NO: 112899 - DNA, 2358 bp, Homo sapiens
  Payload ID: 2092
  Gene Symbol: CDHR3
  Gene Name: cadherin-related family member 3
  ENST ID: ENST00000466045
  CDS Start-End: 1-957
tacacagtcctggaggaactgagtccaggaaccatcgtggccaatatcacagcggaggatcctgatgatgaaggttttcccagccacctcctctacagcattaccactgttagcaaatatttcatgataaatcagttgactggtacaatccaagtggcccaaaggatagaccgagatgcaggtgaattgagacaaaatcccaccatttccctggaagttctagtgaaggacagaccatatgggggtcaggagaatcgcatccagataaccttcattgtggaagacgtcaacgacaatcctgccacatgccaaaagttcaccttcagcattatggtgccggaaagaacagccaaggggacgttgcttcttgacctaaacaagttctgctttgatgatgacagtgaggcaccaaacaacagattcaacttcaccatgccatctggagtggggagcggcagcagatttttacaggatccagctggctctgggaagattgtgctgattggtgatctagactacgaaaatccaagtaacctagcagccggcaataaatatacggtgataatccaggtgcaggatgtggcccccccttactataaaaataacgtctacgtttatatcctaacaagcccagaaaatgagtttcctctcatttttgataggccatcctatgtatttgatgtgtcagaaagaaggcccgcccagggtcacctatcaggtcctgaggaaaaacgtttactctccatctgcatggtacgtgccgtttgtcatcactttgggctccatattgcttctgggtctcctcgtgtacctggtcgtcctattggccaaagccatccacagacactgcccctgcaagactgggaagaacaaggaacctctgacaaagaaaggagaaacgaagactgcagagagagacgtcgtggtggaaactatccagatgaacactatctttgatggagaagccatagatccagtgaccggggaaacatatgaattcaactcaaaaactggagccagaaagtggaaagatccactaacccaaatgccaaaatggaaagagtccagccaccagggagctgccccacgcagagtcactgctggggaagggatggggtcactgagaagtgccaactgggaagaagatgagctgagtggcaaagcgtgggctgaggatgctggtctgggttccagaaatgagggtggcaagctgggcaacccaaagaacagaaatccagccttcatgaacagggcttaccccaaaccacacccaggaaagtaaacggggtctaaggaggggcctgtcaatcactgagatgctgcctcaccctaaattctatggggatggtgtgggcatggtgtaggggggaaaatgtgggctgaggggattcagacatccagggtcaaacatgggatgtttgacaaatttttaaacaaatagaaaggggtttgatcacatagttgcgtgttctgaaatgatacaggaacattttctatcagatttcagaactacctgtgcttctgataagcaagactgttaactttggggtgtggaattgttgtgtttcttctttgcattgactgctaggaagctctattctgttcaccatagaaagtttgtaggaattcctgacataaatagtgaagactatccttacatctggtttccaccttattttcctgccctcgttttaacatcacccagatttcttcagttataaatatgccatacacctttgtaagtcacctcaaatcttcttcaaaagaagcagaacagtgaaaaaaacagatgagtaagttaagagttggtcatctggaaagaagaaaactcagtaggcaccttcttttgttttttcttgtggtgtccggatcagcatcctgcatgtgagattcatccacgttgtcctgtctagcagtagttcagttctcttcatggttatgtctggtttcattctatgattatatcacaatttatctattctacacttgggtggcagctgcttcagattttttacttttaaaaaatatacttaaaagtgaactacaggcagggcatgatggctcatgcctgtaatgccagcactttgccaaggtgggcagatcacctaaggtcaggagttcaagatcagcctggcctagatggcaaaaccctgtctctactaaaaaatacaaaaattagcttggtgtggtggtgggcacatgtaatcccagctacttgggaggctgaggtagggagaactgcttaaacctgagaggtggaggttacagtgagttgagattgtgccactgcactctagcctgggtgacaaagcaagactccatctcagaaaaaaaaaataaaagtgaattacaacacta

SEQ ID NO: 112900 - DNA, 540 bp, Homo sapiens
  Payload ID: 2092
  Gene Symbol: CDHR3
  Gene Name: cadherin-related family member 3
  ENST ID: ENST00000488386
  CDS Start-End: 170-355
ccgagccagggaagggaccctggtgacctcgcctcccagccctcacccccgtcacccctttcttctctttcctggaggactttggaccatggagattctgcagttgttgctctaggagctgaaaccagtgggtagatgtcgttctgaaacgcaggttgtcaccactgggatggaacaactagattttgaaacaggaccaaacatatttgatttgcagatttatgtgaaggatgaggttggtgtcacagacctgcaagtcctgactgtccaggtaacagatgtgaacgagccacctcagtttcaaggcaacttggcagaagcccgacacgagtgtacacagtcctggaggaactgagtccaggaaccatcgtggccaatatcacagcggaggatcctgatgatgaaggttttcccagccacctcctctacagcattaccacttgactggtacaatccaagtggcccaaaggatagaccgagatgcaggtgaattgagacaaaatcccaccatttccctggaagttctagtgaaggacagac

SEQ ID NO: 112901 - DNA, 1188 bp, Homo sapiens
  Payload ID: 2093
  Gene Symbol: CDHR4
  Gene Name: cadherin-related family member 4
  Uniprot ID: A6H8M9
  ENST ID: ENST00000343366
  CDS Start-End: 24-623
gctgtctgtgtcttcaggtcatcatggtgctgctcaggctcctcgtgttcctctttgctccggtggtctctgacctctgcagcctgccctgctttataaatgtctctgagagccagggccctggcacagtccttcagtttttatccttcaactgctcctcctacacgcccacacccaccctggagttgctcaatgtccagccacccaccaccttcttcaacccacccagcttggccaggtggcaagggacctatgtgggcaagttgaccttgagcagctctgctcagttggatgccctgatggtgaaccactacaaggtgcagctgaagttcacatgtggcaaccatgtgatggagggctcactctctgtggatgtgcagcgggaccttagccatatccagtgtgctggtcaatttgccagcccaggtgaggccaggggcagccggcagggtgggggcaggcatggcctgagcagatcctccctgacctccactctggccagctggggaaatgattcaggtgccagagacagtcacacctggggctcggctgtacactctgctcctcccaggcctagaactccacggagcgcaggtaagcccagaacatgggacggtgggtgacaggatgggggtggggggatggagagaataaattaacccccacctggccaggcacagcctgaagaggaaccttgcagcagaggcatagatgagcctctacatgatgtatgttcttggagagagctgctgagggctgctcactccccagtgaccatggctgttcccacagggacatctcaggggctgagttcttttttttttttttttttgagacggagtcttgctctgtcgtccaggctggagtgcagtggcgcgatctcggctcactgcaagctccacctcccaggttcatgccattctcctgcctcagcctcccgagtagctgggactacaggcacccgccaccacgcccggctaatttttttgtattttgtagtggagacagggtttcaccgtgttagccaggatggtctcgatctcctgacctcgtgatctccccacctcggcctcccaaagtgctgggattacaggcatgagccaccgctcccagccaggggctgagttctttcaagatctgctatgtgttctcagttctttatgacaattctgtatcatttctgtaatc

SEQ ID NO: 112902 - DNA, 2476 bp, Homo sapiens
  Payload ID: 2093
  Gene Symbol: CDHR4
  Gene Name: cadherin-related family member 4
  Uniprot ID: A6H8M9
  ENST ID: ENST00000412678
  CDS Start-End: 10-2376
caggtcatcatggtgctgctcaggctcctcgtgttcctctttgctccggtggtctctgacctctgcagcctgccctgctttataaatgtctctgagagccagggccctggcacagtccttcagtttttatccttcaactgctcctcctacacgcccacacccaccctggagttgctcaatgtccagccacccaccaccttcttcaacccacccagcttggccaggtggcaagggacctatgtgggcaagttgaccttgagcagctctgctcagttggatgccctgatggtgaaccactacaaggtgcagctgaagttcacatgtggcaaccatgtgatggagggctcactctctgtggatgtgcagcgggaccttagccatatccagtgtgctggtcaatttgccagcccagctggggaaatgattcaggtgccagagacagtcacacctggggctcggctgtacactctgctcctcccaggcctagaactccacggagcgcagatgagcattatcagtgcccaggacctgccacacttccctggacctttctccatcaatgagcaaggttggctgcaggcaccatcccagggcctcctaggccaggctcaaaaggtcttccagctgcaaatctcagtgtcctttggacaaaggcaaagctgccaagggatggtgatagtgaaggttttgcctgttccctccagccaggtctccttcctcgagcaggctcagaatatcaccatccctgagaatctggcccccggtagtgaggtggttcaggtccaggcccggggtgtcgacctgcgctatgaaatcctgtctccggtgcccagcccactcttctccattggtcgtgcagacggtgtggtccggaccaccacgcccctagagttagctcgcacctcaggcaccgcggtctccaggctgcaggtgaaggcctttgagcagggccagctgtgggccagtgccaagctcaatctcaccatgaatgtgcagctggtcaacctctggcctccacgctgcctcccagcgcttctggtgtcccaaatcccggagactgcacccgtgggcaccgtgctgaatactctcacttgcgaagatccggactctgttggtgccaccctggactacaagctgtggttccgcagctcttccaaccctgccagcctctgcctttatgacagagtccttgaggtgaatgccacactggactgtgacactcctggagcctgcttccagcatgcagcctccatcctggtgctcgatggtggccagccccagatgaccactgaggtgccggtactggtgatggtgacacccatcaacgagttctccccagcctgtgcccctcgcacgttccgggttcaggaggatgcggcgccccacactctactgggctccgtggtgggcacggatatggattaccctcatgacaacattgagtactacacctctggtggtcctaccacctttgctgtggaccgtctcagcggggaagttcacctcctgggacctttggactatgagcagcagaggctgtacaggctcactgtccttgtgattgaccatggccaagaccagaaccccaaccatcacctctcaggctcctgtaccattaccatcgaggttgaggatgtgaatgaccatgcccccgagtgtgagcccccatttcaggaactcaccatctatgctcctctgggccgtagcgtggaggtgaccaagatgtcatgccagatccctcaggagccacagcgcctgatctactcctatagcatcgtgggagggaatagccagaaccgattcatcctgcaaggggccatcctggtgcacagtgaccttgtgttggggccgttctggccagagcagccccgtacctatgagctactgatctgtgtggccgatgcaggcccctccaccccccacctcagcaccacagccaccattattgtgcatctagttccccggagggccagcacagtggccaccagcacccacagaaccacagtgccctcaacgatgacacccatgctcgtgacagacacagaggctttctggcagccacagccctggtttgtggtggtgttgacagcaactggtgctcttctcctcttggccctaggctggcttcttggcaggctcctccaggggttggcccagctgctgcaagcacccagcaaaccagcccaggctttgctgctaaacagcatccagggaactgagggatccatcgagggtttcctggaggcaccgaagatggagatgtcccaggcacccagcagtgtcatgagtctgcattttgatggcagagcacaggactcccgtaccggaagagactacctgtttaacacacacacaggagcccggcgctggctctgaggccaagtagctgtcttactatgtgtggaatttctttttcacaccatcatgggctgtattttcaagttgattcataataaacaaaattacaaaaagaaaa

SEQ ID NO: 112903 - DNA, 665 bp, Homo sapiens
  Payload ID: 2093
  Gene Symbol: CDHR4
  Gene Name: cadherin-related family member 4
  ENST ID: ENST00000460430
  CDS Start-End: 1-405
caggaactcaccatctatgctcctctgggccgtagcgtggaggtgaccaagatgtcatgccagatccctcaggagccacagcgcctgatctactcctatagcatcgtgggagggaatagccagaaccgattcatcctgcaaggggccatcctggtgcacagtgaccttgtgttggggccgttctggccagagcagccccgtacctatgagctactgatctgtgtggccgatgcaggcccctccaccccccacctcagcaccacagccaccattattgtgcatctagttccccggagggccagcacagtggccaccagcacccacagaaccacagttggcccagctgctgcaagcacccagcaaaccagcccaggctttgctgctaaacagcatccagggaactgagggatccatcgagggtttcctggaggcaccgaagatggagatgtcccaggcacccagcagtgtcatgagtctgcagcattttgatggcagagcacaggactcccgtaccggaagagactacctgtttaacacacacacaggagcccggcgctggctctgaggccaagtagctgtcttactatgtgtggaatttctttttcacaccatcatgggctgtattttcaagttgattcataataaacaaaattacaaaaagaaaa

SEQ ID NO: 112904 - DNA, 554 bp, Homo sapiens
  Payload ID: 2093
  Gene Symbol: CDHR4
  Gene Name: cadherin-related family member 4
  ENST ID: ENST00000487666
  CDS Start-End: 1-454
cagcaccacagccaccattattgtgcatctagttccccggagggccagcacagtggccaccagcacccacagaaccacagtgccctcaacgatgacacccatgctcgtgacagacacagaggctttctggcagccacagccctggtttgtggtggtgttgacagcaactggtgctcttctcctcttggccctaggctggcttcttggcaggctcctccaggggttggcccagctgctgcaagcacccagcaaaccagcccaggctttgctgctaaacagcatccagggaactgagggatccatcgagggtttcctggaggcaccgaagatggagatgtcccaggcacccagcagtgtcatgagtctgcagcattttgatggcagagcacaggactcccgtaccggaagagactacctgtttaacacacacacaggagcccggcgctggctctgaggccaagtagctgtcttactatgtgtggaatttctttttcacaccatcatgggctgtattttcaagttgattcataataaacaaaattacaaaaagaaaa

SEQ ID NO: 112905 - DNA, 1017 bp, Homo sapiens
  Payload ID: 2093
  Gene Symbol: CDHR4
  Gene Name: cadherin-related family member 4
  ENST ID: ENST00000487256
  CDS Start-End: 24-578
gctgtctgtgtcttcaggtcatcatggtgctgctcaggctcctcgtgttcctctttgctccggtggtctctgacctctgcagcctgccctgctttataaatgtctctgagagccagggccctggcacagtccttcagtttttatccttcaactgctcctcctacacgcccacacccaccctggagttgctcaatgtccagccacccaccaccttcttcaacccacccagcttggccaggtggcaagggacctatgtgggcaagttgaccttgagcagctctgctcagttggatgccctgatggtgaaccactacaaggtgcagctgaagttcacatgtggcaaccatgtgatggagggctcactctctgtggatgtgcagcgggaccttagccatatccagtgtgctggtcaatttgccagcccagctggggaaatgattcaggtgccagagacagtcacacctggggctcggctgtacactctgctcctcccaggcctagaactccacggagcgcaggtaagcccagaacatgggacggtgggtgacaggatgggggtggggggatggagagaataaattaacccccacctggccaggcacagcctgaagaggaaccttgcagcagaggcatagatgagcctctacatgatgtatgttcttggagagagctgctgagggctgctcactccccagtgaccatggctgttcccacagggacatctcaggggctgagttcttttttttttttttttttgagacggagtcttgctctgtcgtccaggctggagtgcagtggcgcgatctcggctcactgcaagctccacctcccaggttcatgccattctcctgcctcagcctcccgagtagctgggactacaggcacccgccaccacgcccggctaatttttttgtattttgtagtggagacagggtttcaccgtgttagccaggatggtctcgatctcctgacctcgtgatctccccacctcggcctcccaaagtgctgggattacag

SEQ ID NO: 112906 - DNA, 2318 bp, Homo sapiens
  Payload ID: 2094
  Gene Symbol: CDHR5
  Gene Name: cadherin-related family member 5
  Uniprot ID: Q9HBB8
  ENST ID: ENST00000349570
  CDS Start-End: 268-2223
agtcccttctgccctgtgcctcggtgcctgtgacctgagccccctggttgacccctgcactcagtccaacttgggccaaacgactgcccctccttctggcagtgggctggaccagccggccagcgggagcccccttggcagaagccggtcgtaaaggatcataaactgggcggcgtctggctggggcgaaggtcgctgaggtaggaactgcgccagtcctagacgccagacccgctcagaccctcctgccaggtgacagccgccaagatggggtcttgggccctgctgtggcctcccctgctgttcaccgggctgctcgtccgacccccggggaccatggcccaggcccagtactgctctgtgaacaaggacatctttgaagtagaggagaacacaaatgtcaccgagccgctggtggacatccacgtcccggagggccaggaggtgaccctcggagccttgtccaccccctttgcatttcggatccagggaaaccagctgtttctcaacgtgactcctgattacgaggagaagtcactgcttgaggctcagctgctgtgtcagagcggaggcacattggtgacccagctaagggtgttcgtgtcagtgctggacgtcaatgacaatgcccccgaattcccctttaagaccaaggagataagggtggaggaggacacgaaagtgaactccaccgtcatccccgagacgcaactgcaggctgaggaccgcgacaaggacgacattctgttctacaccctccaggaaatgacagcaggtgccagtgactacttctccctggtgagtgtaaaccgtcccgccctgaggctggaccggcccctggacttctacgagcggccgaacatgaccttctggctgctggtgcgggacactccgggggagaatgtggaacccagccacactgccaccgccacactagtgctgaacgtggtgcccgccgacctgcggcccccgtggttcctgccctgcaccttctcagatggctacgtctgcattcaagctcagtaccacggggctgtccccacggggcacatactgccatctcccctcgtcctgcgtcccggacccatctacgctgaggacggagaccgcggcatcaaccagcccatcatctacagcatctttaggggaaacgtgaatggtacattcatcatccacccagactcgggcaacctcaccgtggccaggagtgtccccagccccatgaccttccttctgctggtgaagggccaacaggccgaccttgcccgctactcagtgacccaggtcaccgtggaggctgtggctgcggccgggagcccgccccgcttcccccagagactgtatcgtggcaccgtggcgcgtggcgctggagcgggcgttgtggtcaaggatgcagctgccccttctcagcctctgaggatccaggctcaggacccggagttctcggacctcaactcggccatcacatatcgaattaccaaccactcacacttccggatggagggagaggttgtgctgaccaccaccacactggcacaggcgggagccttctacgcagaggttgaggcccacaacacggtgacctctggcaccgcaaccacagtcattgagatacaagtttccgaacaggagcccccctccacaggtggcggcccctcggaggacaagcgcttctcggtggtggatatggcggccctgggcggggtgctgggtgcgctgctgctgctggctctccttggcctcgccgtccttgtccacaagcactatggcccccggctcaagtgctgctgtggcaaagctccggagccccagccccaaggctttgacaaccaggcgttcctccctgaccacaaggccaactgggcgcccgtccccagccccacgcacgaccccaagcccgcggaggcaccgatgcccgcagagcccgcaccccccggccctgcctccccaggcggtgcccctgagccccccgcagcggcccgagctggcggaagccccacggcggtgaggtccatcctgaccaaggagcggcggccggagggcgggtacaaggctgtctggtttggcgaggacatcgggacggaggcagacgtggtcgttctcaacgcgcccaccctggacgtggatggcgccagtgactccggcagcggcgatgagggcgagggcgcggggaggggtgggggtccctacgatgcgcccggtggtgatgactcctacatctaagtggcccctccaccctctcccccagccgcacgggcactggaggtctcgctcccccagcctccgacccgaggcagaataaagcaaggctcccgaaa

SEQ ID NO: 112907 - DNA, 3635 bp, Homo sapiens
  Payload ID: 2094
  Gene Symbol: CDHR5
  Gene Name: cadherin-related family member 5
  Uniprot ID: Q9HBB8
  ENST ID: ENST00000358353
  CDS Start-End: 324-2861
attctggggctcgggggatcccggacaccctctcagctcctgcccgggggcccatgtgtcccttctgccctgtgcctcggtgcctgtgacctgagccccctggttgacccctgcactcagtccaacttgggccaaacgactgcccctccttctggcagtgggctggaccagccggccagcgggagcccccttggcagaagccggtcgtaaaggatcataaactgggcggcgtctggctggggcgaaggtcgctgaggtaggaactgcgccagtcctagacgccagacccgctcagaccctcctgccaggtgacagccgccaagatggggtcttgggccctgctgtggcctcccctgctgttcaccgggctgctcgtccgacccccggggaccatggcccaggcccagtactgctctgtgaacaaggacatctttgaagtagaggagaacacaaatgtcaccgagccgctggtggacatccacgtcccggagggccaggaggtgaccctcggagccttgtccaccccctttgcatttcggatccagggaaaccagctgtttctcaacgtgactcctgattacgaggagaagtcactgcttgaggctcagctgctgtgtcagagcggaggcacattggtgacccagctaagggtgttcgtgtcagtgctggacgtcaatgacaatgcccccgaattcccctttaagaccaaggagataagggtggaggaggacacgaaagtgaactccaccgtcatccccgagacgcaactgcaggctgaggaccgcgacaaggacgacattctgttctacaccctccaggaaatgacagcaggtgccagtgactacttctccctggtgagtgtaaaccgtcccgccctgaggctggaccggcccctggacttctacgagcggccgaacatgaccttctggctgctggtgcgggacactccgggggagaatgtggaacccagccacactgccaccgccacactagtgctgaacgtggtgcccgccgacctgcggcccccgtggttcctgccctgcaccttctcagatggctacgtctgcattcaagctcagtaccacggggctgtccccacggggcacatactgccatctcccctcgtcctgcgtcccggacccatctacgctgaggacggagaccgcggcatcaaccagcccatcatctacagcatctttaggggaaacgtgaatggtacattcatcatccacccagactcgggcaacctcaccgtggccaggagtgtccccagccccatgaccttccttctgctggtgaagggccaacaggccgaccttgcccgctactcagtgacccaggtcaccgtggaggctgtggctgcggccgggagcccgccccgcttcccccagagactgtatcgtggcaccgtggcgcgtggcgctggagcgggcgttgtggtcaaggatgcagctgccccttctcagcctctgaggatccaggctcaggacccggagttctcggacctcaactcggccatcacatatcgaattaccaaccactcacacttccggatggagggagaggttgtgctgaccaccaccacactggcacaggcgggagccttctacgcagaggttgaggcccacaacacggtgacctctggcaccgcaaccacagtcattgagatacaagtttccgaacaggagcccccctccacagatgtccccccatccccagaggctggaggaacaactgggccctggaccagcaccacttccgaggtccccagaccccctgagccctcccagggaccctccacgaccagctctgggggaggcacaggccctcatccaccctctggcacaactctgaggccaccaacctcgtccacacccggggggcccccgggtgcagaaaacagcacctcccaccaaccagccactcccggtggggacacagcacagaccccaaagccaggaacctctcagccgatgccccccggtgtgggaaccagcacctcccaccaaccagccacacccagtgggggcacagcacagaccccagagccaggaacctctcagccgatgccccccagtatgggaaccagcacctcccaccaaccagccacacccggtgggggcacagcacagaccccagaggcaggaacctctcagccgatgccccccggtatgggaaccagcacctcccaccaaccaaccacacccggtgggggcacagcacagaccccagagccaggaacctctcagccgatgcccctcagcaagagcaccccatcttcaggtggcggcccctcggaggacaagcgcttctcggtggtggatatggcggccctgggcggggtgctgggtgcgctgctgctgctggctctccttggcctcgccgtccttgtccacaagcactatggcccccggctcaagtgctgctgtggcaaagctccggagccccagccccaaggctttgacaaccaggcgttcctccctgaccacaaggccaactgggcgcccgtccccagccccacgcacgaccccaagcccgcggaggcaccgatgcccgcagagcccgcaccccccggccctgcctccccaggcggtgcccctgagccccccgcagcggcccgagctggcggaagccccacggcggtgaggtccatcctgaccaaggagcggcggccggagggcgggtacaaggctgtctggtttggcgaggacatcgggacggaggcagacgtggtcgttctcaacgcgcccaccctggacgtggatggcgccagtgactccggcagcggcgatgagggcgagggcgcggggaggggtgggggtccctacgatgcgcccggtggtgatgactcctacatctaagtggcccctccaccctctcccccagccgcacgggcactggaggtctcgctcccccagcctccgacccgaggcagaataaagcaaggctcccgaaacccaggccatggcgtggggcaggcgcgcgggtccatgggggtcccattcactcagtcccctgtcgtcattagcgcttgagcccaggtgtgcagatgaggcggtgggtctggccacgctgtccccaccccaaggctgcagcacttcccgtaaaccacctgcagtgcccgccgccttcccgaggctctgtgccagctagtctgggaagttcctctcccgctctaaccacagcccgaggggggctcccctcccccgacctgcaccggagatctcaggcacccggctcatctcagacctcccgctcccgaccctacacagagattgcctggggaggctgaggagccgatgcaaacccccaaggcgacgcacttgggagccggtggtctcaaacacctgccgggggtcctagtccccttctgaaatctacatgcttgggttggagcgcagcagtaaacaccctgcccagtgacctggactgaggcgcgctgggggtgggtgcgccgtgtggcctgagcaggagccagaccaggaggcctaggggtgagagacacattcccctcgctgctcccaaagccagagcccaggctgggcgcccatgcccagaaccatcaagggatcccttgcggcttgtcagcactttccctaatggaaatacaccattaattcctttccaaatgtttt

SEQ ID NO: 112908 - DNA, 3489 bp, Homo sapiens
  Payload ID: 2094
  Gene Symbol: CDHR5
  Gene Name: cadherin-related family member 5
  Uniprot ID: Q9HBB8
  ENST ID: ENST00000397542
  CDS Start-End: 166-2703
tgggctggaccagccggccagcgggagcccccttggcagaagccggtcgtaaaggatcataaactgggcggcgtctggctggggcgaaggtcgctgaggtaggaactgcgccagtcctagacgccagacccgctcagaccctcctgccaggtgacagccgccaagatggggtcttgggccctgctgtggcctcccctgctgttcaccgggctgctcgtccgacccccggggaccatggcccaggcccagtactgctctgtgaacaaggacatctttgaagtagaggagaacacaaatgtcaccgagccgctggtggacatccacgtcccggagggccaggaggtgaccctcggagccttgtccaccccctttgcatttcggatccagggaaaccagctgtttctcaacgtgactcctgattacgaggagaagtcactgcttgaggctcagctgctgtgtcagagcggaggcacattggtgacccagctaagggtgttcgtgtcagtgctggacgtcaatgacaatgcccccgaattcccctttaagaccaaggagataagggtggaggaggacacgaaagtgaactccaccgtcatccccgagacgcaactgcaggctgaggaccgcgacaaggacgacattctgttctacaccctccaggaaatgacagcaggtgccagtgactacttctccctggtgagtgtaaaccgtcccgccctgaggctggaccggcccctggacttctacgagcggccgaacatgaccttctggctgctggtgcgggacactccgggggagaatgtggaacccagccacactgccaccgccacactagtgctgaacgtggtgcccgccgacctgcggcccccgtggttcctgccctgcaccttctcagatggctacgtctgcattcaagctcagtaccacggggctgtccccacggggcacatactgccatctcccctcgtcctgcgtcccggacccatctacgctgaggacggagaccgcggcatcaaccagcccatcatctacagcatctttaggggaaacgtgaatggtacattcatcatccacccagactcgggcaacctcaccgtggccaggagtgtccccagccccatgaccttccttctgctggtgaagggccaacaggccgaccttgcccgctactcagtgacccaggtcaccgtggaggctgtggctgcggccgggagcccgccccgcttcccccagagactgtatcgtggcaccgtggcgcgtggcgctggagcgggcgttgtggtcaaggatgcagctgccccttctcagcctctgaggatccaggctcaggacccggagttctcggacctcaactcggccatcacatatcgaattaccaaccactcacacttccggatggagggagaggttgtgctgaccaccaccacactggcacaggcgggagccttctacgcagaggttgaggcccacaacacggtgacctctggcaccgcaaccacagtcattgagatacaagtttccgaacaggagcccccctccacagatgtccccccatccccagaggctggaggaacaactgggccctggaccagcaccacttccgaggtccccagaccccctgagccctcccagggaccctccacgaccagctctgggggaggcacaggccctcatccaccctctggcacaactctgaggccaccaacctcgtccacacccggggggcccccgggtgcagaaaacagcacctcccaccaaccagccactcccggtggggacacagcacagaccccaaagccaggaacctctcagccgatgccccccggtgtgggaaccagcacctcccaccaaccagccacacccagtgggggcacagcacagaccccagagccaggaacctctcagccgatgccccccagtatgggaaccagcacctcccaccaaccagccacacccggtgggggcacagcacagaccccagaggcaggaacctctcagccgatgccccccggtatgggaaccagcacctcccaccaaccaaccacacccggtgggggcacagcacagaccccagagccaggaacctctcagccgatgcccctcagcaagagcaccccatcttcaggtggcggcccctcggaggacaagcgcttctcggtggtggatatggcggccctgggcggggtgctgggtgcgctgctgctgctggctctccttggcctcgccgtccttgtccacaagcactatggcccccggctcaagtgctgctgtggcaaagctccggagccccagccccaaggctttgacaaccaggcgttcctccctgaccacaaggccaactgggcgcccgtccccagccccacgcacgaccccaagcccgcggaggcaccgatgcccgcagagcccgcaccccccggccctgcctccccaggcggtgcccctgagccccccgcagcggcccgagctggcggaagccccacggcggtgaggtccatcctgaccaaggagcggcggccggagggcgggtacaaggctgtctggtttggcgaggacatcgggacggaggcagacgtggtcgttctcaacgcgcccaccctggacgtggatggcgccagtgactccggcagcggcgatgagggcgagggcgcggggaggggtgggggtccctacgatgcgcccggtggtgatgactcctacatctaagtggcccctccaccctctcccccagccgcacgggcactggaggtctcgctcccccagcctccgacccgaggcagaataaagcaaggctcccgaaacccaggccatggcgtggggcaggcgcgcgggtccatgggggtcccattcactcagtcccctgtcgtcattagcgcttgagcccaggtgtgcagatgaggcggtgggtctggccacgctgtccccaccccaaggctgcagcacttcccgtaaaccacctgcagtgcccgccgccttcccgaggctctgtgccagctagtctgggaagttcctctcccgctctaaccacagcccgaggggggctcccctcccccgacctgcaccggagatctcaggcacccggctcatctcagacctcccgctcccgaccctacacagagattgcctggggaggctgaggagccgatgcaaacccccaaggcgacgcacttgggagccggtggtctcaaacacctgccgggggtcctagtccccttctgaaatctacatgcttgggttggagcgcagcagtaaacaccctgcccagtgacctggactgaggcgcgctgggggtgggtgcgccgtgtggcctgagcaggagccagaccaggaggcctaggggtgagagacacattcccctcgctgctcccaaagccagagcccaggctgggcgcccatgcccagaaccatcaagggatcccttgcggcttgtcagcactttccctaatggaaatacaccattaattcctttccaaatgttttaattgtgagagt

SEQ ID NO: 112909 - DNA, 496 bp, Homo sapiens
  Payload ID: 2094
  Gene Symbol: CDHR5
  Gene Name: cadherin-related family member 5
  ENST ID: ENST00000531088
  CDS Start-End: 452-496
agtcctagacgccagacccgctcagaccctcctgccagactgctctgtgaacaaggacatctttgaagtagaggagaacacaaatgtcaccgagccgctggtggacatccacgtcccggagggccaggaggtgaccctcggagccttgtccaccccctttgcatttcggatccagggaaaccagctgtttctcaacgtgactcctgattacgaggagaagtcactgcttgaggctcagctgctgtgtcagagcggaggcacattggtgacccagctaagggtgttcgtgtcagtgctggacgtcaatgacaatgcccccgaattcccctttaagaccaaggagataagggtggaggaggacacgaaagtgaactccaccgtcatccccgagacgcaactgcaggctgaggaccgcgacaaggacgacattctgttctacaccctccaggaaatgacagcaggtgccagtgactacttctccctggtgagtgtaaac

SEQ ID NO: 112910 - DNA, 625 bp, Homo sapiens
  Payload ID: 2094
  Gene Symbol: CDHR5
  Gene Name: cadherin-related family member 5
  ENST ID: ENST00000526077
  CDS Start-End: 54-625
agtcctagacgccagacccgctcagaccctcctgccaggtgacagccgccaagatggggtcttgggccctgctgtggcctcccctgctgttcaccgggctgctcgtccgacccccggggaccatggcccaggcccagtactgctctgtgaacaaggacatctttgaagtagaggagaacacaaatgtcaccgagccgctggtggacatccacgtcccggagggccaggaggtgaccctcggagccttgtccaccccctttgcatttcggatccagggaaaccagctgtttctcaacgtgactcctgattacgaggagaagtcactgcttgaggctcagctgctgtgtcagagcggaggcacattggacacgaaagtgaactccaccgtcatccccgagacgcaactgcaggctgaggaccgcgacaaggacgacattctgttctacaccctccaggaaatgacagcaggtgccagtgactacttctccctggtgagtgtaaaccgtcccgccctgaggctggaccggcccctggacttctacgagcggccgaacatgaccttctggctgctggtgcggccgtctgttgcaggacactccgggggagaatgtggaacccagccaca

SEQ ID NO: 112911 - DNA, 550 bp, Homo sapiens
  Payload ID: 2094
  Gene Symbol: CDHR5
  Gene Name: cadherin-related family member 5
  ENST ID: ENST00000534311
  CDS Start-End: 54-550
agtcctagacgccagacccgctcagaccctcctgccaggtgacagccgccaagatggggtcttgggccctgctgtggcctcccctgctgttcaccgggctgctcgtccgacccccggggaccatggcccaggcccagtactgctctgtgaacaaggacatctttgaagtagaggagaacacaaatgtcaccgagccgctggtggacatccacgtcccggagggccaggaggtgaccctcggagccttgtccaccccctttgcatttcggatccagggaaaccagctgtttctcaacgtgactcctgattacgaggagaagtcactgcttgaggctcagctgctgtgtcagagcggaggcacattgaccaaggagataagggtggaggaggacacgaaagtgaactccaccgtcatccccgagacgcaactgcaggctgaggaccgcgacaaggacgacattctgttctacaccctccaggaaatgacagcaggtgccagtgactacttctccctggtgagtgtaaaccgtcccgccctgaggctggaccg

SEQ ID NO: 112912 - DNA, 2816 bp, Homo sapiens
  Payload ID: 2094
  Gene Symbol: CDHR5
  Gene Name: cadherin-related family member 5
  ENST ID: ENST00000531177
  CDS Start-End: 31-351
agaccctcctgccaggtgacagccgccaagatggggtcttgggccctgctgtggcctcccctgctgttcaccgggctgctcgtccgacccccggggaccatggcccaggcccagtactgctctgtgaacaaggacatctttgaagtagaggagaacacaaatgtcaccgagccgctggtggacatccacgtcccggagggccaggaggtgaccctcggagccttgtccaccccctttgcatttcggatccagggaaaccagctgtttctcaacgtgactcctgattacgagaaggctgggccatttcgggatgaagctgcctgggcccacaccctcagcactgaccactgatgatggggaccctgggccagcgcctgcccacttggcctcagtctccccacctgtggggcaggacggtgactgcagacctgtctacatccacaggagaagtcactgcttgaggctcagctgctgtgtcagagcggaggcacattggtgacccagctaagggtgttcgtgtcagtgctggacgtcaatgacaatgcccccgaattcccctttaagaccaaggagataagggtggaggaggacacgaaagtgaactccaccgtcatccccgagacgcaactgcaggctgaggaccgcgacaaggacgacattctgttctacaccctccaggaaatgacagcaggtgccagtgactacttctccctggtgagtgtaaaccgtcccgccctgaggctggaccggcccctggacttctacgagcggccgaacatgaccttctggctgctggtgcgggacactccgggggagaatgtggaacccagccacactgccaccgccacactagtgctgaacgtggtgcccgccgacctgcggcccccgtggttcctgccctgcaccttctcagatggctacgtctgcattcaagctcagtaccacggggctgtccccacggggcacatactgccatctcccctcgtcctgcgtcccggacccatctacgctgaggacggagaccgcggcatcaaccagcccatcatctacagcatctttaggggaaacgtgaatggtacattcatcatccacccagactcgggcaacctcaccgtggccaggagtgtccccagccccatgaccttccttctgctggtgaagggccaacaggccgaccttgcccgctactcagtgacccaggtcaccgtggaggctgtggctgcggccgggagcccgccccgcttcccccagagactgtatcgtggcaccgtggcgcgtggcgctggagcgggcgttgtggtcaaggatgcagctgccccttctcagcctctgaggatccaggctcaggacccggagttctcggacctcaactcggccatcacatatcgaattaccaaccactcacacttccggatggagggagaggttgtgctgaccaccaccacactggcacaggcgggagccttctacgcagaggttgaggcccacaacacggtgacctctggcaccgcaaccacagtcattgagatacaagtttccgaacaggagcccccctccacagatgtccccccatccccagaggctggaggaacaactgggccctggaccagcaccacttccgaggtccccagaccccctgagccctcccagggaccctccacgaccagctctgggggaggcacaggccctcatccaccctctggcacaactctgaggccaccaacctcgtccacacccggggggcccccgggtgcagaaaacagcacctcccaccaaccagccactcccggtggggacacagcacagaccccaaagccaggaacctctcagccgatgccccccggtgtgggaaccagcacctcccaccaaccagccacacccagtgggggcacagcacagaccccagagccaggaacctctcagccgatgccccccagtatgggaaccagcacctcccaccaaccagccacacccggtgggggcacagcacagaccccagaggcaggaacctctcagccgatgccccccggtatgggaaccagcacctcccaccaaccaaccacacccggtgggggcacagcacagaccccagagccaggaacctctcagccgatgcccctcagcaagagcaccccatcttcaggtggcggcccctcggaggacaagcgcttctcggtggtggatatggcggccctgggcggggtgctgggtgcgctgctgctgctggctctccttggcctcgccgtccttgtccacaagcactatggcccccggctcaagtgctgctgtggcaaagctccggagccccagccccaaggctttgacaaccaggcgttcctccctgaccacaaggccaactgggcgcccgtccccagccccacgcacgaccccaagcccgcggaggcaccgatgcccgcagagcccgcaccccccggccctgcctccccaggcggtgcccctgagccccccgcagcggcccgagctggcggaagccccacggcggtgaggtccatcctgaccaaggagcggcggccggagggcgggtacaaggctgtctggtttggcgaggacatcgggacggaggcagacgtggtcgttctcaacgcgcccaccctggacgtggatggcgccagtgactccggcagcggcgatgagggcgagggcgcggggaggggtgggggtccctacgatgcgcccggtggtgatgactcctacatctaagtggcccctccaccctctcccccagccgcacgggcactggaggtctcgctcccccagcctccgacccgaggcagaataaagcaaggctcccgaaa

SEQ ID NO: 112913 - DNA, 3489 bp, Homo sapiens
  Payload ID: 2094
  Gene Symbol: CDHR5
  Gene Name: cadherin-related family member 5
  ENST ID: ENST00000617105
  CDS Start-End: 166-2703
tgggctggaccagccggccagcgggagcccccttggcagaagccggtcgtaaaggatcataaactgggcggcgtctggctggggcgaaggtcgctgaggtaggaactgcgccagtcctagacgccagacccgctcagaccctcctgccaggtgacagccgccaagatggggtcttgggccctgctgtggcctcccctgctgttcaccgggctgctcgtccgacccccggggaccatggcccaggcccagtactgctctgtgaacaaggacatctttgaagtagaggagaacacaaatgtcaccgagccgctggtggacatccacgtcccggagggccaggaggtgaccctcggagccttgtccaccccctttgcatttcggatccagggaaaccagctgtttctcaacgtgactcctgattacgaggagaagtcactgcttgaggctcagctgctgtgtcagagcggaggcacattggtgacccagctaagggtgttcgtgtcagtgctggacgtcaatgacaatgcccccgaattcccctttaagaccaaggagataagggtggaggaggacacgaaagtgaactccaccgtcatccccgagacgcaactgcaggctgaggaccgcgacaaggacgacattctgttctacaccctccaggaaatgacagcaggtgccagtgactacttctccctggtgagtgtaaaccgtcccgccctgaggctggaccggcccctggacttctacgagcggccgaacatgaccttctggctgctggtgcgggacactccgggggagaatgtggaacccagccacactgccaccgccacactagtgctgaacgtggtgcccgccgacctgcggcccccgtggttcctgccctgcaccttctcagatggctacgtctgcattcaagctcagtaccacggggctgtccccacggggcacatactgccatctcccctcgtcctgcgtcccggacccatctacgctgaggacggagaccgcggcatcaaccagcccatcatctacagcatctttaggggaaacgtgaatggtacattcatcatccacccagactcgggcaacctcaccgtggccaggagtgtccccagccccatgaccttccttctgctggtgaagggccaacaggccgaccttgcccgctactcagtgacccaggtcaccgtggaggctgtggctgcggccgggagcccgccccgcttcccccagagcctgtatcgtggcaccgtggcgcgtggcgctggagcgggcgttgtggtcaaggatgcagctgccccttctcagcctctgaggatccaggctcaggacccggagttctcggacctcaactcggccatcacatatcgaattaccaaccactcacacttccggatggagggagaggttgtgctgaccaccaccacactggcacaggcgggagccttctacgcagaggttgaggcccacaacacggtgacctctggcaccgcaaccacagtcattgagatacaagtttccgaacaggagcccccctccacagatgtccccccatccccagaggctggaggaacaactgggccctggaccagcaccacttccgaggtccccagaccccctgagccctcccagggaccctccacgaccagctctgggggaggcacaggccctcatccaccctctggcacaactctgaggccaccaacctcgtccacacccggggggtccccgggtgcagaaaacagcacctcccaccaaccagccactcccggtggggacacagcacagaccccaaagccaggaacctctcagccgatgccccccggtgtgggaaccagcacctcccaccaaccagccacacccagtgggggcacagcacagaccccagagccaggaacctctcagccgatgccccccagtatgggaaccagcacctcccaccaaccagccacacccggtgggggcacagcacagaccccagaggcaggaacctctcagccgatgccccccggtatgggaaccagcacctcccaccaaccaaccacacccggtgggggcacagcacagaccccagagccaggaacctctcagccgatgcccctcagcaagagcaccccatcttcaggtggcggcccctcggaggacaagcgcttctcggtggtggatatggcggccctgggcggggtgctgggtgcgctgctgctgctggctctccttggcctcgccgtccttgtccacaagcactatggcccccggctcaagtgctgctctggcaaagctccggagccccagccccaaggctttgacaaccaggcgttcctccctgaccacaaggccaactgggcgcccgtccccagccccacgcacgaccccaagcccgcggaggcaccgatgcccgcagagcccgcaccccccggccctgcctccccaggcggtgcccctgagccccccgcagcggcccgagctggcggaagccccacggcggtgaggtccatcctgaccaaggagcggcggccagagggcgggtacaaggctgtctggtttggcgaggacatcgggacggaggcagacgtggtcgttctcaacgcgcccaccctggacgtggatggcgccagtgactccggcagcggcgatgagggcgagggcgcggggaggggtgggggtccctacgatgcgcccggtggtgatgactcctacatctaagtggcccctccaccctctcccccagccgcacgggcactggaggtctcgctcccccagcctccgacccgaggcagaataaagcaaggctcccgaaacccaggccatggcgtggggcaggcgcgcgggtccatgggggtcccattcactcagtcccctgtcgtcattagcgcttgagcccaggtgtgcagatgaggcggtgggtctggccacgctgtccccaccccaaggctgcagcacttcccgtaaaccacctgcagtgcccgccgccttcccgaggctctgtgccagctagtctgggaagttcctctcccgctctaaccacagcccgaggggggctcccctcccccgacctgcaccggagatctcaggcacccggctcaactcagacctcccgctcccgaccctacacagagattgcctggggaggctgaggagccgatgcaaacccccaaggcgacgcacttgggagccggtggtctcaaacacctgccgggggtcctagtccccttctgaaatctacatgcttgggttggagcgcagcagtaaacaccctgcccagtgacctggactgaggcgcgctgggggtgggtgcgccgtgtggcctgagcaggagccagaccaggaggcctaggggtgagagacacattcccctcgctgctcccaaagccagagcccaggctgggcgcccatgcccagaaccatcaagggatcccttgcggcttgtcagcactttccctaatggaaatacaccattaattcctttccaaatgttttaattgtgagagt

SEQ ID NO: 112914 - DNA, 2318 bp, Homo sapiens
  Payload ID: 2094
  Gene Symbol: CDHR5
  Gene Name: cadherin-related family member 5
  ENST ID: ENST00000619215
  CDS Start-End: 268-2223
agtcccttctgccctgtgcctcggtgcctgtgacctgagccccctggttgacccctgcactcagtccaacttgggccaaacgactgcccctccttctggcagtgggctggaccagccggccagcgggagcccccttggcagaagccggtcgtaaaggatcataaactgggcggcgtctggctggggcgaaggtcgctgaggtaggaactgcgccagtcctagacgccagacccgctcagaccctcctgccaggtgacagccgccaagatggggtcttgggccctgctgtggcctcccctgctgttcaccgggctgctcgtccgacccccggggaccatggcccaggcccagtactgctctgtgaacaaggacatctttgaagtagaggagaacacaaatgtcaccgagccgctggtggacatccacgtcccggagggccaggaggtgaccctcggagccttgtccaccccctttgcatttcggatccagggaaaccagctgtttctcaacgtgactcctgattacgaggagaagtcactgcttgaggctcagctgctgtgtcagagcggaggcacattggtgacccagctaagggtgttcgtgtcagtgctggacgtcaatgacaatgcccccgaattcccctttaagaccaaggagataagggtggaggaggacacgaaagtgaactccaccgtcatccccgagacgcaactgcaggctgaggaccgcgacaaggacgacattctgttctacaccctccaggaaatgacagcaggtgccagtgactacttctccctggtgagtgtaaaccgtcccgccctgaggctggaccggcccctggacttctacgagcggccgaacatgaccttctggctgctggtgcgggacactccgggggagaatgtggaacccagccacactgccaccgccacactagtgctgaacgtggtgcccgccgacctgcggcccccgtggttcctgccctgcaccttctcagatggctacgtctgcattcaagctcagtaccacggggctgtccccacggggcacatactgccatctcccctcgtcctgcgtcccggacccatctacgctgaggacggagaccgcggcatcaaccagcccatcatctacagcatctttaggggaaacgtgaatggtacattcatcatccacccagactcgggcaacctcaccgtggccaggagtgtccccagccccatgaccttccttctgctggtgaagggccaacaggccgaccttgcccgctactcagtgacccaggtcaccgtggaggctgtggctgcggccgggagcccgccccgcttcccccagagcctgtatcgtggcaccgtggcgcgtggcgctggagcgggcgttgtggtcaaggatgcagctgccccttctcagcctctgaggatccaggctcaggacccggagttctcggacctcaactcggccatcacatatcgaattaccaaccactcacacttccggatggagggagaggttgtgctgaccaccaccacactggcacaggcgggagccttctacgcagaggttgaggcccacaacacggtgacctctggcaccgcaaccacagtcattgagatacaagtttccgaacaggagcccccctccacaggtggcggcccctcggaggacaagcgcttctcggtggtggatatggcggccctgggcggggtgctgggtgcgctgctgctgctggctctccttggcctcgccgtccttgtccacaagcactatggcccccggctcaagtgctgctctggcaaagctccggagccccagccccaaggctttgacaaccaggcgttcctccctgaccacaaggccaactgggcgcccgtccccagccccacgcacgaccccaagcccgcggaggcaccgatgcccgcagagcccgcaccccccggccctgcctccccaggcggtgcccctgagccccccgcagcggcccgagctggcggaagccccacggcggtgaggtccatcctgaccaaggagcggcggccagagggcgggtacaaggctgtctggtttggcgaggacatcgggacggaggcagacgtggtcgttctcaacgcgcccaccctggacgtggatggcgccagtgactccggcagcggcgatgagggcgagggcgcggggaggggtgggggtccctacgatgcgcccggtggtgatgactcctacatctaagtggcccctccaccctctcccccagccgcacgggcactggaggtctcgctcccccagcctccgacccgaggcagaataaagcaaggctcccgaaa

SEQ ID NO: 112915 - DNA, 496 bp, Homo sapiens; identical to SEQ ID NO: 112909
  Payload ID: 2094
  Gene Symbol: CDHR5
  Gene Name: cadherin-related family member 5
  ENST ID: ENST00000634167
  CDS Start-End: 452-496

SEQ ID NO: 112916 - DNA, 550 bp, Homo sapiens; identical to SEQ ID NO: 112911
  Payload ID: 2094
  Gene Symbol: CDHR5
  Gene Name: cadherin-related family member 5
  ENST ID: ENST00000631535
  CDS Start-End: 54-550

SEQ ID NO: 112917 - DNA, 2816 bp, Homo sapiens
  Payload ID: 2094
  Gene Symbol: CDHR5
  Gene Name: cadherin-related family member 5
  ENST ID: ENST00000631565
  CDS Start-End: 31-351
agaccctcctgccaggtgacagccgccaagatggggtcttgggccctgctgtggcctcccctgctgttcaccgggctgctcgtccgacccccggggaccatggcccaggcccagtactgctctgtgaacaaggacatctttgaagtagaggagaacacaaatgtcaccgagccgctggtggacatccacgtcccggagggccaggaggtgaccctcggagccttgtccaccccctttgcatttcggatccagggaaaccagctgtttctcaacgtgactcctgattacgagaaggctgggccatttcgggatgaagctgcctgggcccacaccctcagcactgaccactgatgatggggaccctgggccagcgcctgcccacttggcctcagtctccccacctgtggggcaggacggtgactgcagacctgtctacatccacaggagaagtcactgcttgaggctcagctgctgtgtcagagcggaggcacattggtgacccagctaagggtgttcgtgtcagtgctggacgtcaatgacaatgcccccgaattcccctttaagaccaaggagataagggtggaggaggacacgaaagtgaactccaccgtcatccccgagacgcaactgcaggctgaggaccgcgacaaggacgacattctgttctacaccctccaggaaatgacagcaggtgccagtgactacttctccctggtgagtgtaaaccgtcccgccctgaggctggaccggcccctggacttctacgagcggccgaacatgaccttctggctgctggtgcgggacactccgggggagaatgtggaacccagccacactgccaccgccacactagtgctgaacgtggtgcccgccgacctgcggcccccgtggttcctgccctgcaccttctcagatggctacgtctgcattcaagctcagtaccacggggctgtccccacggggcacatactgccatctcccctcgtcctgcgtcccggacccatctacgctgaggacggagaccgcggcatcaaccagcccatcatctacagcatctttaggggaaacgtgaatggtacattcatcatccacccagactcgggcaacctcaccgtggccaggagtgtccccagccccatgaccttccttctgctggtgaagggccaacaggccgaccttgcccgctactcagtgacccaggtcaccgtggaggctgtggctgcggccgggagcccgccccgcttcccccagagcctgtatcgtggcaccgtggcgcgtggcgctggagcgggcgttgtggtcaaggatgcagctgccccttctcagcctctgaggatccaggctcaggacccggagttctcggacctcaactcggccatcacatatcgaattaccaaccactcacacttccggatggagggagaggttgtgctgaccaccaccacactggcacaggcgggagccttctacgcagaggttgaggcccacaacacggtgacctctggcaccgcaaccacagtcattgagatacaagtttccgaacaggagcccccctccacagatgtccccccatccccagaggctggaggaacaactgggccctggaccagcaccacttccgaggtccccagaccccctgagccctcccagggaccctccacgaccagctctgggggaggcacaggccctcatccaccctctggcacaactctgaggccaccaacctcgtccacacccggggggtccccgggtgcagaaaacagcacctcccaccaaccagccactcccggtggggacacagcacagaccccaaagccaggaacctctcagccgatgccccccggtgtgggaaccagcacctcccaccaaccagccacacccagtgggggcacagcacagaccccagagccaggaacctctcagccgatgccccccagtatgggaaccagcacctcccaccaaccagccacacccggtgggggcacagcacagaccccagaggcaggaacctctcagccgatgccccccggtatgggaaccagcacctcccaccaaccaaccacacccggtgggggcacagcacagaccccagagccaggaacctctcagccgatgcccctcagcaagagcaccccatcttcaggtggcggcccctcggaggacaagcgcttctcggtggtggatatggcggccctgggcggggtgctgggtgcgctgctgctgctggctctccttggcctcgccgtccttgtccacaagcactatggcccccggctcaagtgctgctctggcaaagctccggagccccagccccaaggctttgacaaccaggcgttcctccctgaccacaaggccaactgggcgcccgtccccagccccacgcacgaccccaagcccgcggaggcaccgatgcccgcagagcccgcaccccccggccctgcctccccaggcggtgcccctgagccccccgcagcggcccgagctggcggaagccccacggcggtgaggtccatcctgaccaaggagcggcggccagagggcgggtacaaggctgtctggtttggcgaggacatcgggacggaggcagacgtggtcgttctcaacgcgcccaccctggacgtggatggcgccagtgactccggcagcggcgatgagggcgagggcgcggggaggggtgggggtccctacgatgcgcccggtggtgatgactcctacatctaagtggcccctccaccctctcccccagccgcacgggcactggaggtctcgctcccccagcctccgacccgaggcagaataaagcaaggctcccgaaa

SEQ ID NO: 112918 - DNA, 625 bp, Homo sapiens; identical to SEQ ID NO: 112910
  Payload ID: 2094
  Gene Symbol: CDHR5
  Gene Name: cadherin-related family member 5
  ENST ID: ENST00000632059
  CDS Start-End: 54-625

SEQ ID NO: 112919 - DNA, 3635 bp, Homo sapiens
  Payload ID: 2094
  Gene Symbol: CDHR5
  Gene Name: cadherin-related family member 5
  ENST ID: ENST00000633633
  CDS Start-End: 324-2861
attctggggctcgggggatcccggacaccctctcagctcctgcccgggggcccatgtgtcccttctgccctgtgcctcggtgcctgtgacctgagccccctggttgacccctgcactcagtccaacttgggccaaacgactgcccctccttctggcagtgggctggaccagccggccagcgggagcccccttggcagaagccggtcgtaaaggatcataaactgggcggcgtctggctggggcgaaggtcgctgaggtaggaactgcgccagtcctagacgccagacccgctcagaccctcctgccaggtgacagccgccaagatggggtcttgggccctgctgtggcctcccctgctgttcaccgggctgctcgtccgacccccggggaccatggcccaggcccagtactgctctgtgaacaaggacatctttgaagtagaggagaacacaaatgtcaccgagccgctggtggacatccacgtcccggagggccaggaggtgaccctcggagccttgtccaccccctttgcatttcggatccagggaaaccagctgtttctcaacgtgactcctgattacgaggagaagtcactgcttgaggctcagctgctgtgtcagagcggaggcacattggtgacccagctaagggtgttcgtgtcagtgctggacgtcaatgacaatgcccccgaattcccctttaagaccaaggagataagggtggaggaggacacgaaagtgaactccaccgtcatccccgagacgcaactgcaggctgaggaccgcgacaaggacgacattctgttctacaccctccaggaaatgacagcaggtgccagtgactacttctccctggtgagtgtaaaccgtcccgccctgaggctggaccggcccctggacttctacgagcggccgaacatgaccttctggctgctggtgcgggacactccgggggagaatgtggaacccagccacactgccaccgccacactagtgctgaacgtggtgcccgccgacctgcggcccccgtggttcctgccctgcaccttctcagatggctacgtctgcattcaagctcagtaccacggggctgtccccacggggcacatactgccatctcccctcgtcctgcgtcccggacccatctacgctgaggacggagaccgcggcatcaaccagcccatcatctacagcatctttaggggaaacgtgaatggtacattcatcatccacccagactcgggcaacctcaccgtggccaggagtgtccccagccccatgaccttccttctgctggtgaagggccaacaggccgaccttgcccgctactcagtgacccaggtcaccgtggaggctgtggctgcggccgggagcccgccccgcttcccccagagcctgtatcgtggcaccgtggcgcgtggcgctggagcgggcgttgtggtcaaggatgcagctgccccttctcagcctctgaggatccaggctcaggacccggagttctcggacctcaactcggccatcacatatcgaattaccaaccactcacacttccggatggagggagaggttgtgctgaccaccaccacactggcacaggcgggagccttctacgcagaggttgaggcccacaacacggtgacctctggcaccgcaaccacagtcattgagatacaagtttccgaacaggagcccccctccacagatgtccccccatccccagaggctggaggaacaactgggccctggaccagcaccacttccgaggtccccagaccccctgagccctcccagggaccctccacgaccagctctgggggaggcacaggccctcatccaccctctggcacaactctgaggccaccaacctcgtccacacccggggggtccccgggtgcagaaaacagcacctcccaccaaccagccactcccggtggggacacagcacagaccccaaagccaggaacctctcagccgatgccccccggtgtgggaaccagcacctcccaccaaccagccacacccagtgggggcacagcacagaccccagagccaggaacctctcagccgatgccccccagtatgggaaccagcacctcccaccaaccagccacacccggtgggggcacagcacagaccccagaggcaggaacctctcagccgatgccccccggtatgggaaccagcacctcccaccaaccaaccacacccggtgggggcacagcacagaccccagagccaggaacctctcagccgatgcccctcagcaagagcaccccatcttcaggtggcggcccctcggaggacaagcgcttctcggtggtggatatggcggccctgggcggggtgctgggtgcgctgctgctgctggctctccttggcctcgccgtccttgtccacaagcactatggcccccggctcaagtgctgctctggcaaagctccggagccccagccccaaggctttgacaaccaggcgttcctccctgaccacaaggccaactgggcgcccgtccccagccccacgcacgaccccaagcccgcggaggcaccgatgcccgcagagcccgcaccccccggccctgcctccccaggcggtgcccctgagccccccgcagcggcccgagctggcggaagccccacggcggtgaggtccatcctgaccaaggagcggcggccagagggcgggtacaaggctgtctggtttggcgaggacatcgggacggaggcagacgtggtcgttctcaacgcgcccaccctggacgtggatggcgccagtgactccggcagcggcgatgagggcgagggcgcggggaggggtgggggtccctacgatgcgcccggtggtgatgactcctacatctaagtggcccctccaccctctcccccagccgcacgggcactggaggtctcgctcccccagcctccgacccgaggcagaataaagcaaggctcccgaaacccaggccatggcgtggggcaggcgcgcgggtccatgggggtcccattcactcagtcccctgtcgtcattagcgcttgagcccaggtgtgcagatgaggcggtgggtctggccacgctgtccccaccccaaggctgcagcacttcccgtaaaccacctgcagtgcccgccgccttcccgaggctctgtgccagctagtctgggaagttcctctcccgctctaaccacagcccgaggggggctcccctcccccgacctgcaccggagatctcaggcacccggctcaactcagacctcccgctcccgaccctacacagagattgcctggggaggctgaggagccgatgcaaacccccaaggcgacgcacttgggagccggtggtctcaaacacctgccgggggtcctagtccccttctgaaatctacatgcttgggttggagcgcagcagtaaacaccctgcccagtgacctggactgaggcgcgctgggggtgggtgcgccgtgtggcctgagcaggagccagaccaggaggcctaggggtgagagacacattcccctcgctgctcccaaagccagagcccaggctgggcgcccatgcccagaaccatcaagggatcccttgcggcttgtcagcactttccctaatggaaatacaccattaattcctttccaaatgtttt

SEQ ID NO: 112920 - DNA, 2533 bp, Homo sapiens
  Payload ID: 2095
  Gene Symbol: CALB1
  Gene Name: calbindin 1, 28kDa
  Uniprot ID: P05937
  ENST ID: ENST00000265431
  CDS Start-End: 183-968
agggagagaactctggaggaacgctgagctgagcagcaccgaggacagcgcccggcagcgcccgcgcccaggtctccctccgcagccctgactcgcgcacacgctgagcttttgctcactccccctcgcgcggacacagacacacgcatattcacacacccagacacacaccccgctgtacaatggcagaatcccacctgcagtcatccctcatcacagcctcacagtttttcgagatctggctccatttcgacgctgacggaagtggttacctggaaggaaaggagctgcagaacttgatccaggagctccagcaggcgcgaaagaaggctggattggagttatcacctgaaatgaaaacttttgtggatcagtatgggcaaagagatgatggaaaaataggaattgtagagttggctcacgtattacccacagaagagaatttcctgctgctcttccgatgccagcagctgaagtcctgtgaggaattcatgaagacatggagaaaatatgatactgaccacagtggcttcatagaaactgaggagcttaagaactttctaaaggacctgctagaaaaagcaaacaagactgttgatgacacaaaattagccgagtatacagacctaatgctgaaactatttgattcaaataatgatgggaagctggaattaactgagatggccaggttactaccagtgcaggagaattttcttcttaaattccagggaatcaaaatgtgtgggaaagagttcaataaggcttttgagctgtatgatcaggacggcaatggatacatagatgaaaatgaactggatgctttactgaaggatctgtgcgagaagaataaacaggatctggatattaataatattacaacatacaagaagaacataatggctttgtcggatggagggaagctgtaccgaacggatcttgctcttattctctgtgctggggataactagagttggtggccgcaaccacttgctagtgatacactgtatctaaaaaataactgtgcactataagggagtaggctgtattttcttttatatctgtaaatttaactgcatatagataattatccaggatgtgtggctcattcttttcagcttgtttctatactgtttgtaatatacagtttttgtaaccatatgattgaaaagaagaaagtctatgcttaggccagtcagtacacccaattttaaaaaataacatattcttgctttcacaaatatagttgaacaagatttccctaaaaattccaccaggattaatctctaaaattctagtctctgatttgcaaatgcacatttgtcactgaataatggaattatgtataacaagccaaacattcttattttagacaaccatagaactgtcccacaaaatatttctaagcttatttctaactattaggaggaatgtgcttttccatctaaaatactcaccaaaatatagttaattgtggctttatgaagttaacagtctcattacagatttagtttaccaatcaacagcatgtctactgcttggatccatacaaaactatcggttcaagttgatgtgacaagggaagggagcaccagatgacacataaatctgtctgattctatgcctgtatttccaacaaacttactgtcagagaatatgacctaaatccattttctaaactgttttcatgtgttgcaaattattctagtcaactgctgttttatgtcatactctgtgtaatctctgattaaatttaatatactgcatatcctggtgtctagtttgcatacttcctggattttctttctatgtagaactgttcatttccaccaagggtatctgctgcctctgaaaatatttttttctagctataacaactctattttttactacataattaaattttaatgtaaaattcatagcatcctgattattgaatgttatatcatcaatacttttgtgtattctgtggattctatatttcatattgagatcagcattcaaaatagttctatttctatctgcaaatagtttcaaatgagtttaaaaaaataacatctgaaaagaaatgctaatgtaatcatttatcttatctagcaagaagattctaaaacattctttaacatacatctaagtcagtttcacatatttgtagctagaatatcctatactggttatagttgatatgtaacagttggtgattttagatttctttgattgtgaaacagggagctatgagagatgtgtccatgtgaaatttacagttactgcctaggagttaatgatcgttctgggtcagcttgaatgtccccattctataaattcaacacttattttctgaattcataaaaataaccaaaaaatgtgagctataatgtttccctcaagaacaaacagaaacgagatttgccaaaaactaaaattcaacaaatgatgttgagtgggagattggctttgcctttagcgtgtaaatggaagcactgccattagactgaatttaactactaagaataaataaagaagaaaataaccttaa

SEQ ID NO: 112921 - DNA, 636 bp, Homo sapiens
  Payload ID: 2095
  Gene Symbol: CALB1
  Gene Name: calbindin 1, 28kDa
  ENST ID: ENST00000523716
  CDS Start-End: 280-636
aaagcctgtttggtggtctcttcacatggacgcacatgaaatttggtgccgtgactcagatcaggggacctcccttgggagataaatcccctgtcctcctgctctttgctctgtgagaaagatccacctacgacctcaggtcctcagaccgaccagcccaagaaacatctcaccaatttcaaatctggaagtggttacctggaaggaaaggagctgcagaacttgatccaggagctccagcaggcgcgaaagaaggctggattggagttatcacctgaaatgaaaacttttgtggatcagtatgggcaaagagatgatggaaaaataggaattgtagagttggctcacgtattacccacagaagagaatttcctgctgctcttccgatgccagcagctgaagtcctgtgaggaattcatgaagacatggagaaaatatgatactgaccacagtggcttcatagaaactgaggagcttaagaactttctaaaggacctgctagaaaaagcaaacaagactgttgatgacacaaaattagccgagtatacagacctaatgctgaaactatttgattcaaataatgatgggaagctggaattaactgagatggccaggttactaccagtgcaggagaat

SEQ ID NO: 112922 - DNA, 1490 bp, Homo sapiens
  Payload ID: 2095
  Gene Symbol: CALB1
  Gene Name: calbindin 1, 28kDa
  Uniprot ID: P05937
  ENST ID: ENST00000518457
  CDS Start-End: 122-736
aagaaacagatctgcagattatggatctcttactctatcaccaattattattgttgtgatgttgatgtagttggggagatgagaaaacatcttgtcctcactaagggagttatcacctgaaatgaaaacttttgtggatcagtatgggcaaagagatgatggaaaaataggaattgtagagttggctcacgtattacccacagaagagaatttcctgctgctcttccgatgccagcagctgaagtcctgtgaggaattcatgaagacatggagaaaatatgatactgaccacagtggcttcatagaaactgaggagcttaagaactttctaaaggacctgctagaaaaagcaaacaagactgttgatgacacaaaattagccgagtatacagacctaatgctgaaactatttgattcaaataatgatgggaagctggaattaactgagatggccaggttactaccagtgcaggagaattttcttcttaaattccagggaatcaaaatgtgtgggaaagagttcaataaggcttttgagctgtatgatcaggacggcaatggatacatagatgaaaatgaactggatgctttactgaaggatctgtgcgagaagaataaacaggatctggatattaataatattacaacatacaagaagaacataatggctttgtcggatggagggaagctgtaccgaacggatcttgctcttattctctgtgctggggataactagagttggtggccgcaaccacttgctagtgatacactgtatctaaaaaataactgtgcactataagggagtaggctgtattttcttttatatctgtaaatttaactgcatatagataattatccaggatgtgtggctcattcttttcagcttgtttctatactgtttgtaatatacagtttttgtaaccatatgattgaaaagaagaaagtctatgcttaggccagtcagtacacccaattttaaaaaataacatattcttgctttcacaaatatagttgaacaagatttccctaaaaattccaccaggattaatctctaaaattctagtctctgatttgcaaatgcacatttgtcactgaataatggaattatgtataacaagccaaacattcttattttagacaaccatagaactgtcccacaaaatatttctaagcttatttctaactattaggaggaatgtgcttttccatctaaaatactcaccaaaatatagttaattgtggctttatgaagttaacagtctcattacagatttagtttaccaatcaacagcatgtctactgcttggatccatacaaaactatcggttcaagttgatgtgacaagggaagggagcaccagatgacacataaatctgtctgattctatgcctgtatttccaacaaacttactgtcagagaatatgacctaaatccattttctaaactgttttcatgtgttgcaaattattctagtcaactgctgttttatg

SEQ ID NO: 112923 - DNA, 561 bp, Homo sapiens
  Payload ID: 2095
  Gene Symbol: CALB1
  Gene Name: calbindin 1, 28kDa
  ENST ID: ENST00000514406
  CDS Start-End: 553-561
ctgtttggtggtctcttcacatggacgcacatgaaatttggtgccgtgactcagatcaggggacctcccttgggagataaatcccctgtcctcctgctctttgctctgtgagaaagatccacctacgacctcaggtcctcagaccgaccagcccaagaaacatctcaccaatttcaaatctggagcttgctacaagtgccagaaatctgaccaccaggccaaggaatgcctgcagcccaggattcctcctaagccatgtcccatctgtgcgggaccacactggaaatcggactgttcaactcacctggcagccactcccagagcccctggaactctggcccaaggctctctgactgactccttcttggcttagcggctgaagattgatgctgcctcattgcctcagaagccccatagaccatcacggacgccaagcttccggtaactctcacagtggagggaagtggttacctggaaggaaaggagctgcagaacttgatccaggagctccagcaggcgcgaaagaaggctggattggagttatcacctgaaatgaaaact

SEQ ID NO: 112924 - DNA, 548 bp, Homo sapiens
  Payload ID: 2095
  Gene Symbol: CALB1
  Gene Name: calbindin 1, 28kDa
  ENST ID: ENST00000520613
  CDS Start-End: 243-548
cacctacgacctcaggtcctcagaccgaccagcccaagaaacatctcaccaatttcaaatctgcggctgaagattgatgctgcctcattgcctcagaagccccatagaccatcacggacgccaagcttccggtaactctcacagtggagggaagtggttacctggaaggaaaggagctgcagaacttgatccaggagctccagcaggcgcgaaagaaggctggattggagttatcacctgaaatgaaaacttttgtggatcagtatgggcaaagagatgatggaaaaataggaattgtagagttggctcacgtattacccacagaagagaatttcctgctgctcttccgatgccagcagctgaagtcctgtgaggaattcatgaagacatggagaaaatatgatactgaccacagtggcttcatagaaactgaggagcttaagaactttctaaaggacctgctagaaaaagcaaacaagactgttgatgacacaaaattagccgagtatacagacctaatgctgaaactatttgattcaaataatgat

SEQ ID NO: 112925 - DNA, 1466 bp, Homo sapiens
  Payload ID: 2096
  Gene Symbol: CALB2
  Gene Name: calbindin 2
  Uniprot ID: P22676
  ENST ID: ENST00000302628
  CDS Start-End: 78-893
caaccccagcgcgagtgccagagcccagccggcgcggagcgggagcggtgcaggctgaggtctccgagcggctcgccatggctggcccgcagcagcagcccccttacctgcacctggccgagctgacggcgtcccagttcctggaaatatggaagcactttgacgcagacggaaatgggtatattgaaggtaaagagctagaaaactttttccaagagctggagaaggcaaggaaaggctctggcatgatgtcaaagagtgacaactttggagaaaagatgaaggagttcatgcagaagtatgataaaaactcagatgggaaaatcgagatggcagagctggcgcagatcctgccaaccgaagagaacttccttctgtgcttcaggcagcacgtgggctccagcgccgagtttatggaggcttggcggaagtacgacacagacaggagtggctacatcgaagccaatgagctcaagggattcctgtcagacctgctgaagaaggcgaaccggccgtacgatgagcccaagctccaggaatacacccaaaccatactacggatgtttgacttgaacggggatggcaaattgggcctctcagagatgtcccgactcctgcctgtccaggaaaacttcctgcttaaatttcagggcatgaagctgacctcagaggagtttaacgcgatcttcacattttacgacaaggatagaagcggctacattgacgagcatgagctggatgcccttttgaaggatctgtacgagaaaaacaaaaaggaaatgaatattcaacagctcaccaactacagaaagagcgtcatgtccttggcagaggcagggaagctctaccgcaaggacctggagattgtgctctgcagcgagccccccatgtaaagtggggacgggggctgcttctccacctcccccaaaccctgcttctgctgccctgatgcgtctacccagactcagagaccgtgagcgccccgcccccacccctacagcctgcacacacctgcctgcagagcaggaaatgagagatagaggatgggcagctggggggctgtcctgagccccctgcacccacccctgcccaggcagtctttgctcagtggatcacacacatggaaggtgatgggggcatgggtggagggtccctaattctcttcgctgtgatgcatgagctccctcgctgtatgatttaggcttctatgtccaacagagtggactcttccctctcgctcccctctgccggtcccccatgccaccacccaccccaaacttccaggttccatccaccaccttgccaatggtgtagctgtcctctcagaactcctgtgtgtggaaggcacccgccctttccttgccttctttactcggcgtgctccttttctctttgggtttcttgtttaccaaagaagagtttacagacaataaaatggaaaggtcctgctgtggaaacttacccaa

SEQ ID NO: 112926 - DNA, 1373 bp, Homo sapiens
  Payload ID: 2096
  Gene Symbol: CALB2
  Gene Name: calbindin 2
  ENST ID: ENST00000349553
  CDS Start-End: 81-659
gcacaaccccagcgcgagtgccagagcccagccggcgcggagcgggagcggtgcaggctgaggtctccgagcggctcgccatggctggcccgcagcagcagcccccttacctgcacctggccgagctgacggcgtcccagttcctggaaatatggaagcactttgacgcagacggaaatgggtatattgaaggtaaagagctagaaaactttttccaagagctggagaaggcaaggaaaggctctggcatgatgtcaaagagtgacaactttggagaaaagatgaaggagttcatgcagaagtatgataaaaactcagatgggaaaatcgagatggcagagctggcgcagatcctgccaaccgaagagaacttccttctgtgcttcaggcagcacgtgggctccagcgccgagtttatggaggcttggcggaagtacgacacagacaggagtggctacatcgaagccaatgagctcaagggattcctgtcagacctgctgaagaaggcgaaccggccgtacgatgagcccaagctccaggaatacacccaaaccatactacggatgtttgacttgaacggggatggcaaattgggcctctcagagatgtcccggatagaagcggctacattgacgagcatgagctggatgcccttttgaaggatctgtacgagaaaaacaaaaaggaaatgaatattcaacagctcaccaactacagaaagagcgtcatgtccttggcagaggcagggaagctctaccgcaaggacctggagattgtgctctgcagcgagccccccatgtaaagtggggacgggggctgcttctccacctcccccaaaccctgcttctgctgccctgatgcgtctacccagactcagagaccgtgagcgccccgcccccacccctacagcctgcacacacctgcctgcagagcaggaaatgagagatagaggatgggcagctggggggctgtcctgagccccctgcacccacccctgcccaggcagtctttgctcagtggatcacacacatggaaggtgatgggggcatgggtggagggtccctaattctcttcgctgtgatgcatgagctccctcgctgtatgatttaggcttctatgtccaacagagtggactcttccctctcgctcccctctgccggtcccccatgccaccacccaccccaaacttccaggttccatccaccaccttgccaatggtgtagctgtcctctcagaactcctgtgtgtggaaggcacccgccctttccttgccttctttactcggcgtgctccttttctctttgggtttcttgtttaccaaagaagagtttacagacaataaaatggaaaggtcctgctgtggaaacttaccc

SEQ ID NO: 112927 - DNA, 472 bp, Homo sapiens
  Payload ID: 2096
  Gene Symbol: CALB2
  Gene Name: calbindin 2
  ENST ID: ENST00000490520
  CDS Start-End: 1-472
gctagaaaactttttccaagagctggagaaggcaaggaaaggctctggcatgctggcgcagatcctgccaaccgaagagaacttccttctgtgcttcaggcagcacgtgggctccagcgccgagtttatggaggcttggcggaagtacgacacagacaggagtggctacatcgaagccaatgagctcaagggattcctgtcagacctgctgaagaaggcgaaccggccgtacgatgagcccaagctccaggaatacacccaaaccatactacggatgtttgacttgaacggggatggcaaattgggcctctcagagatactcctgcctgtccaggaaaacttcctgcttaaatttcagggcatgaagctgacctcagaggagtttaacgcgatcttcacattttacgacaaggatagaagcggctacattgacgagcatgagctggatgcccttttgaaggatctgtacgag

SEQ ID NO: 112928 - DNA, 704 bp, Homo sapiens
  Payload ID: 2096
  Gene Symbol: CALB2
  Gene Name: calbindin 2
  ENST ID: ENST00000562305
  CDS Start-End: 1-704
tggctggcccgcagcagcagcccccttacctgcacctggccgagctgacggcgtcccagttcctggaaatatggaagcactttgacgcagacggaaatgggtatattgaaggtaaagagctagaaaactttttccaagagctggagaaggcaaggaaaggctctggcatgatgtcaaagagtgacaactttggagaaaagatgaaggagttcatgcagaagtatgataaaaactcagatgggaaaatcgagatggcagagctggcgcagatcctgccaaccgaagagaacttccttctgtgcttcaggcagcacgtgggctccagcgccgagtttatggaggcttggcggaagtacgacacagacaggagtggctacatcgaagccaatgagctcaagggattcctgtcagacctgctgaagaaggcgaaccggccgtacgatgagcccaagctccaggaatacacccaaaccatactacggatgtttgacttgaacggggatggcaaattgggcctctcagagatgtcccgactcctgcctgtccaggaaaacttcctgcttaaatttcagggcatgaagctgacctcagaggagtttaacgcgatcttcacattttacgacaaggaaatgaatattcaacagctcaccaactacagaaagagcgtcatgtccttggcagaggcagggaagctctaccgcaag

SEQ ID NO: 112929 - DNA, 1466 bp, Homo sapiens; identical to SEQ ID NO: 112925
  Payload ID: 2096
  Gene Symbol: CALB2
  Gene Name: Calbindin 2
  ENST ID: ENST00000635371
  CDS Start-End: 78-893

SEQ ID NO: 112930 - DNA, 1373 bp, Homo sapiens; identical to SEQ ID NO: 112926
  Payload ID: 2096
  Gene Symbol: CALB2
  Gene Name: Calbindin 2
  ENST ID: ENST00000635154
  CDS Start-End: 81-659

SEQ ID NO: 112931 - DNA, 704 bp, Homo sapiens; identical to SEQ ID NO: 112928
  Payload ID: 2096
  Gene Symbol: CALB2
  Gene Name: Calbindin 2
  ENST ID: ENST00000635576
  CDS Start-End: 1-704

SEQ ID NO: 112932 - DNA, 472 bp, Homo sapiens; identical to SEQ ID NO: 112927
  Payload ID: 2096
  Gene Symbol: CALB2
  Gene Name: Calbindin 2
  ENST ID: ENST00000634959
  CDS Start-End: 1-472

SEQ ID NO: 112933 - DNA, 7222 bp, Homo sapiens
  Payload ID: 2097
  Gene Symbol: CABIN1
  Gene Name: calcineurin binding protein 1
  Uniprot ID: Q9Y6J0
  ENST ID: ENST00000263119
  CDS Start-End: 128-6790
agccggacggcgcggtggtcgggacagactggccgttgctgtggagacgcctggagagttgtggactggggcaacctttgccagtgatgagaagtgatgctcgtggcagtgctgaatctctctgaatatgattcgaattgcagccttaaatgccagctccaccattgaggatgatcatgaaggaagctttaaaagtcacaaaacccagacaaaggaggctcaggaagcagaggcttttgcattgtaccacaaggcccttgatctgcagaaacatgaccggtttgaggagtctgccaaagcctaccatgagctcttggaggcgagcctgctgcgggaggcagtttcatccggtgatgagaaagaggggttgaaacaccctgggctgatactgaaatattccacttataagaacttggcccagctggcagcccagcgggaggatctggagacagccatggagttctacttagaggcagtgatgctggactccacagatgtcaacctctggtataagattggacatgtggccctgaggctcatccggatccccctggctcgccatgcttttgaggaagggctgcggtgcaatcctgaccactggccctgtttggataacctaatcactgtcctgtacaccctcagtgattacacaacatgtctgtacttcatctgcaaagctttggagaaggattgccggtacagcaaagggctggtcctcaaggagaagatttttgaggagcagccttgtctccggaaggactctctcagaatgttcctcaaatgtgacatgtcgattcacgatgtttcggtgagtgcagctgagacacaggcgattgtagatgaggccttggggctgcgaaaaaagaggcaagcgctgattgtgcgggagaaggagccggacctgaaacttgtgcagcccattcctttcttcacctggaagtgcctcggagagagcttgctggccatgtacaatcatctcaccacctgtgagcccccacgtcccagccttggcaaaaggattgatttgtcggactaccaggaccccagccagcctcttgagtcctccatggtggtgacgccagttaacgtgatccagccaagcactgtcagcaccaacccagctgtggctgtcgccgagcctgtggtctcctacacctctgtggctacaaccagcttcccactgcacagtcctggtctgttggagacaggcgctcctgtgggtgatatttctgggggagataaatccaagaaaggggtaaaacggaagaagatttcagaagagagtggagaaacagcaaagcggcggtctgcccgtgtccgaaacaccaagtgcaaaaaagaagagaaagtagacttccaggagcttctgatgaagttcttgccgtccaggttaagaaagctggaccctgaggaggaagatgattcctttaataactatgaagtccagtcagaagccaaactggaaagcttcccaagcattgggcctcaaaggctgtcatttgactcagccacattcatggaatctgaaaagcaggacgtgcatgagttcctgctggagaacctaaccaacgggggcatcctggagctgatgatgcgctacctgaaagccatgggccacaagttcttggtaaggtggcctccaggcttggcggaggtcgtgctcagcgtctaccacagctggaggaggcacagcaccagcctgcccaacccgctgctgagggactgcagcaacaagcacatcaaggacatgatgctgatgtctctctcctgcatggaactccagctggaccagtggctgctgaccaaaggcagaagctctgcagtgtctcctcggaactgccctgctggtatggtgaatggcagatttggacctgacttcccagggacccactgcctgggtgacctcctacagctgtcatttgcctcgtcccagcgcgacctgttcgaggatggttggctggagtttgtggtccgtgtttactggctgaaggctcgcttcctggcgctgcagggagacatggagcaggccctggagaactatgacatctgcacagaaatgctccagagttccaccgccatccaggtggaggcaggggctgaacgaagagacattgtcatccggctgcccaacctccataatgactctgtggtttccctggaggagattgataagaacctgaagtcgctggagcggtgccagtccctggaggagattcagcggctgtatgaagcaggcgactacaaggctgttgtgcatctgctccgccccactttgtgcaccagtgggtttgaccgggccaaacacctggagtttatgacttccattcctgagaggccagcccagctgcttcttctgcaggactccttgctccggctgaaggactatcggcagtgttttgagtgttccgatgtggctctgaacgaggctgtccagcagatggtgaactcaggtgaggctgccgccaaggaggagtgggtggccacagtgacccaactgctgatgggcatcgagcaggccctctctgcggacagcagtggtagcatcctgaaggtatcatcctccaccactggccttgtgcggctcaccaacaacctcatccaggtcattgactgcagcatggctgtgcaggaggaggccaaggagccccacgtctcttcagtgctaccctggatcattctacaccggatcatctggcaggaggaagacaccttccattctctgtgccaccagcagcagctccaaaacccagcggaggaagggatgtcagagacgcccatgctcccatcctccctcatgctgctgaacacagcccacgagtatttgggcagaaggtcctggtgctgcaattcagatggggctctgctgcgattctatgtgcgagtactccagaaggaactggctgcatccacctctgaagacacgcacccttacaaggaggagctggagacagccttggagcagtgcttctactgcctgtacagcttccccagcaagaagagtaaggccaggtacctggaggaacactcggcccagcaggtggatcttatatgggaggatgcactgttcatgtttgagtattttaagcccaagacccttcctgaatttgacagctataagaccagcaccgtgtctgctgacttggccaacctactgaagagaattgccaccattgtgcctcgcacagagaggccagcccttagcctggacaaagtctctgcctacattgagggaacttcaactgaggtaccctgcctcccagagggggctgacccctcccctccagtggtgaacgagctttactacctcctggctgattatcatttcaaaaacaaggagcagtccaaggccatcaagttctacatgcatgacatctgcatctgccccaataggtttgattcctgggcaggcatggctctggcccgggccagccgcattcaggacaagctgaactccaatgagctgaagagtgatgggcccatttggaagcatgccacgcccgtcttgaactgcttccgtcgggccctggagattgacagctccaacttgtccctatggattgagtatggcaccatgtcctatgccttgcactcattcgcctcacgtcaattgaagcagtggagaggcgagctgccccctgagctcgtgcagcagatggagggccggcgcgacagcatgctagagacagccaagcactgtttcacatcagcagcccgctgcgagggtgatggtgacgaggaggagtggctcatccactacatgctgggcaaggtggctgagaagcagcagcagccacccaccgtttacttgctgcactacaggcaggctggccactacctgcacgaggaggctgcccgctaccccaagaagatccactaccacaacccacctgagctggccatggaggccctggaggtgtactttcggctccatgcttccatcctgaagctcctggggaagcccgattctggggttggtgcagaggtcctggtcaactttatgaaggaggctgcagaaggaccctttgccaggggcgaggagaagaacacacccaaagcttcagaaaaggagaaggcctgcctggtggacgaggactcccactcttcagctgggacactgccgggccccggagcctccctcccctcctcctctggcccaggtctgacatccccaccttacacagccactccgattgaccacgattacgtcaaatgtaaaaaaccccaccagcaggcaacgccggacgaccgaagccaggacagcacagccgtagcactctcagactctagctcaacgcaggacttctttaatgagcccaccagcttactggaaggctccaggaaatcctacacagagaagaggctgcccattctcagttcccaagcaggagcgacgggtaaagatcttcagggggccacagaagaaagaggaaaaaacgaggagtcattggagagtacagaaggcttccgggctgcagagcaaggtgtccagaagcctgctgcagaaaccccagcctctgcttgcatccctggcaagccctcagcatccacacccaccctgtgggatgggaagaagagaggggacctcccaggggagccagtggccttcccccaggggctgccggctggtgctgaggagcagcggcagtttctcacagagcagtgcatcgcctccttccgcctgtgcctgagccgcttcccccagcactataagagtctctaccgtctggccttcctctacacctacagcaagacccaccggaacctccagtgggcccgcgacgtgttgctaggcagcagtatcccgtggcaacaactgcagcacatgccggcacaggggctcttctgcgagaggaacaagaccaatttcttcaacggcatctggcggatccccgtggacgagattgaccggccgggcagctttgcctggcacatgaaccgctccatcgtgctgctgctcaaggtgctggcccagctgcgggaccacagcaccctgctgaaggtgtcctccatgcttcagcggaccccagaccagggcaagaagtatctgcgagatgctgaccgccaggtcctggcgcagcgggccttcatcctcactgtgaaggtgctcgaagacacgctgagcgagctcgcagaggggtcagaacgcccagggcccaaggtctgtggcctccccggagccaggatgaccaccgatgtctcacacaaggccagtcctgaggatggccaggagggcctcccccagccgaagaagccccctctggctgatggctcagggccagggcccgagccaggaggcaaagtgggcctcctcaaccaccggcctgtggccatggatgcaggagacagtgcagaccaaagcggggagcggaaggataaagagagcccacgggcagggcccactgagcccatggacacgagtgaggccactgtttgccactcagacttggagcggacaccacccctgctgccaggtcgccccgcaagggaccggggccccgagagccggcccactgagctgtccctggaggagctgagcatcagtgcccggcagcagcccaccccgctcaccccagcccagccagcccccgcccccgcccccgccaccaccacagggaccagggcagggggccacccggaggagccgctctcccggctcagccgcaagaggaagctcctggaggacacagagtcaggcaagacacttctgttggatgcctaccgtgtgtggcagcagggccagaagggtgtggcctatgacctgggccgtgtggagaggatcatgtcggagacctacatgctcatcaagcaggtggatgaggaggctgcgctggagcaggctgtgaagttctgccaggtccatcttggggctgccgcccagagacaggcctcgggggacacccccaccactccaaagcaccccaaagacagccgagagaacttctttcctgtgacagtggtgcccacagcccctgaccctgtgccagctgactctgtccagcggcccagtgatgctcacaccaagcctcgccctgcactagctgccgccacaactattatcacctgccctccgtcagcatcagcttccaccctggaccagtccaaggaccctgggcctccccggccacacaggcctgaagctacccccagcatggcctctctgggcccagagggagaagagctggcgagagtggcagagggcaccagcttcccgcctcaggagccacggcacagtccgcaggtgaagatggcccccacaagttccccggcagagccacactgctggccggcagaggctgccctgggcacaggcgctgagcccacctgcagccaggaggggaaactgaggcctgagccgagaagggatggggaggctcaggaggctgcgagtgagactcagcccctgagctctcccccaacagctgccagctccaaggcccccagcagtgggagtgcccagccaccagagggtcacccaggcaagcctgagcccagccgggctaagtcccgccccctgcccaacatgccaaagctggtcatcccctccgccgccaccaagttcccccctgagatcaccgtcacgccacccaccccaaccctgctctcccccaaaggcagcatctcggaggagaccaagcagaagctgaagtcagccatcctttctgcccagtctgctgccaacgtgaggaaggagagcctatgccagccagccctggaggtcctggagacatccagccaggagtcctcgctggagagcgagacagacgaggacgacgactacatggacatttgaggggccactgcagccccaccgccacgccccaggggaccagccaggcctggaatgccccctgggcaggaccctgggcaggaccagaggcccacatggatgccactccccacacagcccccaggcctgcccagcccacctcctcatggcatcctccctgtacccaggtcaggctgtccacaccacatgggagcccagaggaggaggggcccgccttagccatgtgaaggtggattggtcgccatctgcacgccaggcggcatccttttctatgaagtgttgactttgtaaatctgcccacacccagctggccatatccacccctcgacgccgggatgagccggctctgcctgtgtcacagtggaggggtcctttagggccaggctcacccctcaccctttttttggttgcttttctaataaagatggaacagtt

SEQ ID NO: 112934 - DNA, 2422 bp, Homo sapiens
  Payload ID: 2097
  Gene Symbol: CABIN1
  Gene Name: calcineurin binding protein 1
  ENST ID: ENST00000337989
  CDS Start-End: 219-1991
actttgcccggcagcggtccacagcccgccaccagcggccagtccagggaaccggagaggattggccggcaaaagtcagttgcgctcctgggcccgcttccagtagagtgccggcgccccgtccggccgcgcctgccccgccccggcccgccgcgagcgagagagcgaacgagcctccgcggccatggcccggcgctcgccctagctccactgcacagatgccacggcggagccggcggggcatctggcggatccccgtggacgagattgaccggccgggcagctttgcctggcacatgaaccgctccatcgtgctgctgctcaaggtgctggcccagctgcgggaccacagcaccctgctgaaggtgtcctccatgcttcagcggaccccagaccagggcaagaagtatctgcgagatgctgaccgccaggtcctggcgcagcgggccttcatcctcactgtgaaggtgctcgaagacacgctgagcgagctcgcagaggggtcagaacgcccagggcccaaggtctgtggcctccccggagccaggatgaccaccgatgtctcacacaaggccagtcctgaggatggccaggagggcctcccccagccgaagaagccccctctggctgatggctcagggccagggcccgagccaggaggcaaagtgggcctcctcaaccaccggcctgtggccatggatgcaggagacagtgcagaccaaagcggggagcggaaggataaagagagcccacgggcagggcccactgagcccatggacacgagtgaggccactgtttgccactcagacttggagcggacaccacccctgctgccaggtcgccccgcaagggaccggggccccgagagccggcccactgagctgtccctggaggagctgagcatcagtgcccggcagcagcccaccccgctcaccccagcccagccagcccccgcccccgcccccgccaccaccacagggaccagggcagggggccacccggaggagccgctctcccggctcagccgcaagaggaagctcctggaggacacagagtcaggcaagacacttctgttggatgcctaccgtgtgtggcagcagggccagaagggtgtggcctatgacctgggccgtgtggagaggatcatgtcggagacctacatgctcatcaagcaggtggatgaggaggctgcgctggagcaggctgtgaagttctgccaggtccatcttggggctgccgcccagagacaggcctcgggggacacccccaccactccaaagcaccccaaagacagccgagagaacttctttcctgtgacagtggtgcccacagcccctgaccctgtgccagctgactctgtccagcggcccagtgatgctcacaccaagcctcgccctgcactagctgccgccacaactattatcacctgccctccgtcagcatcagcttccaccctggaccagtccaaggaccctgggcctccccggccacacaggcctgaagctacccccagcatggcctctctgggcccagaggggaaactgaggcctgagccgagaagggatggggaggctcaggaggctgcgagtgagactcagcccctgagctctcccccaacagctgccagctccaaggcccccagcagtgggagtgcccagccaccagagggtcacccaggcaagcctgagcccagccgggctaagtcccgccccctgcccaacatgccaaagctggtcatcccctccgccgccaccaagttcccccctgagatcaccgtcacgccacccaccccaaccctgctctcccccaaaggcagcatctcggaggagaccaagcagaagctgaagtcagccatcctttctgcccagtctgctgccaacgtgaggaaggagagcctatgccagccagccctggaggtcctggagacatccagccaggagtcctcgctggagagcgagacagacgaggacgacgactacatggacatttgaggggccactgcagccccaccgccacgccccaggggaccagccaggcctggaatgccccctgggcaggaccctgggcaggaccagaggcccacatggatgccactccccacacagcccccaggcctgcccagcccacctcctcatggcatcctccctgtacccaggtcaggctgtccacaccacatgggagcccagaggaggaggggcccgccttagccatgtgaaggtggattggtcgccatctgcacgccaggcggcatccttttctatgaagtgttgactttgtaaatctgcccacacccagctggccatatccacccctcgacgccgggatgagccggctctgcctgtgtcacagtggaggggtcctttagggccaggctcacccctcaccctttttttggttgcttttctaataaagatggaacagt

SEQ ID NO: 112935 - DNA, 7480 bp, Homo sapiens
  Payload ID: 2097
  Gene Symbol: CABIN1
  Gene Name: calcineurin binding protein 1
  Uniprot ID: Q9Y6J0
  ENST ID: ENST00000398319
  CDS Start-End: 386-7048
ctcagcagagcccggggcacaggccggaggggctgcaggcgcgaggctgggttacgtgaggaagctgggggtttcgcgggcagctttagagccccagtcagggaaaccgaggccgggcttcctggctgcctcgcgagcctcttcatggctctcgccgccgccctgaggtgcctagaatgggttccggcctccggggaggttcccagtaaccgcaggagccaccattgatttggcgtctgctgggtgcaaagcccagcgcgctaaccctttactcgcgacctttcgcttcaccttcacagcagccctgcgaggagagttgtggactggggcaacctttgccagtgatgagaagtgatgctcgtggcagtgctgaatctctctgaatatgattcgaattgcagccttaaatgccagctccaccattgaggatgatcatgaaggaagctttaaaagtcacaaaacccagacaaaggaggctcaggaagcagaggcttttgcattgtaccacaaggcccttgatctgcagaaacatgaccggtttgaggagtctgccaaagcctaccatgagctcttggaggcgagcctgctgcgggaggcagtttcatccggtgatgagaaagaggggttgaaacaccctgggctgatactgaaatattccacttataagaacttggcccagctggcagcccagcgggaggatctggagacagccatggagttctacttagaggcagtgatgctggactccacagatgtcaacctctggtataagattggacatgtggccctgaggctcatccggatccccctggctcgccatgcttttgaggaagggctgcggtgcaatcctgaccactggccctgtttggataacctaatcactgtcctgtacaccctcagtgattacacaacatgtctgtacttcatctgcaaagctttggagaaggattgccggtacagcaaagggctggtcctcaaggagaagatttttgaggagcagccttgtctccggaaggactctctcagaatgttcctcaaatgtgacatgtcgattcacgatgtttcggtgagtgcagctgagacacaggcgattgtagatgaggccttggggctgcgaaaaaagaggcaagcgctgattgtgcgggagaaggagccggacctgaaacttgtgcagcccattcctttcttcacctggaagtgcctcggagagagcttgctggccatgtacaatcatctcaccacctgtgagcccccacgtcccagccttggcaaaaggattgatttgtcggactaccaggaccccagccagcctcttgagtcctccatggtggtgacgccagttaacgtgatccagccaagcactgtcagcaccaacccagctgtggctgtcgccgagcctgtggtctcctacacctctgtggctacaaccagcttcccactgcacagtcctggtctgttggagacaggcgctcctgtgggtgatatttctgggggagataaatccaagaaaggggtaaaacggaagaagatttcagaagagagtggagaaacagcaaagcggcggtctgcccgtgtccgaaacaccaagtgcaaaaaagaagagaaagtagacttccaggagcttctgatgaagttcttgccgtccaggttaagaaagctggaccctgaggaggaagatgattcctttaataactatgaagtccagtcagaagccaaactggaaagcttcccaagcattgggcctcaaaggctgtcatttgactcagccacattcatggaatctgaaaagcaggacgtgcatgagttcctgctggagaacctaaccaacgggggcatcctggagctgatgatgcgctacctgaaagccatgggccacaagttcttggtaaggtggcctccaggcttggcggaggtcgtgctcagcgtctaccacagctggaggaggcacagcaccagcctgcccaacccgctgctgagggactgcagcaacaagcacatcaaggacatgatgctgatgtctctctcctgcatggaactccagctggaccagtggctgctgaccaaaggcagaagctctgcagtgtctcctcggaactgccctgctggtatggtgaatggcagatttggacctgacttcccagggacccactgcctgggtgacctcctacagctgtcatttgcctcgtcccagcgcgacctgttcgaggatggttggctggagtttgtggtccgtgtttactggctgaaggctcgcttcctggcgctgcagggagacatggagcaggccctggagaactatgacatctgcacagaaatgctccagagttccaccgccatccaggtggaggcaggggctgaacgaagagacattgtcatccggctgcccaacctccataatgactctgtggtttccctggaggagattgataagaacctgaagtcgctggagcggtgccagtccctggaggagattcagcggctgtatgaagcaggcgactacaaggctgttgtgcatctgctccgccccactttgtgcaccagtgggtttgaccgggccaaacacctggagtttatgacttccattcctgagaggccagcccagctgcttcttctgcaggactccttgctccggctgaaggactatcggcagtgttttgagtgttccgatgtggctctgaacgaggctgtccagcagatggtgaactcaggtgaggctgccgccaaggaggagtgggtggccacagtgacccaactgctgatgggcatcgagcaggccctctctgcggacagcagtggtagcatcctgaaggtatcatcctccaccactggccttgtgcggctcaccaacaacctcatccaggtcattgactgcagcatggctgtgcaggaggaggccaaggagccccacgtctcttcagtgctaccctggatcattctacaccggatcatctggcaggaggaagacaccttccattctctgtgccaccagcagcagctccaaaacccagcggaggaagggatgtcagagacgcccatgctcccatcctccctcatgctgctgaacacagcccacgagtatttgggcagaaggtcctggtgctgcaattcagatggggctctgctgcgattctatgtgcgagtactccagaaggaactggctgcatccacctctgaagacacgcacccttacaaggaggagctggagacagccttggagcagtgcttctactgcctgtacagcttccccagcaagaagagtaaggccaggtacctggaggaacactcggcccagcaggtggatcttatatgggaggatgcactgttcatgtttgagtattttaagcccaagacccttcctgaatttgacagctataagaccagcaccgtgtctgctgacttggccaacctactgaagagaattgccaccattgtgcctcgcacagagaggccagcccttagcctggacaaagtctctgcctacattgagggaacttcaactgaggtaccctgcctcccagagggggctgacccctcccctccagtggtgaacgagctttactacctcctggctgattatcatttcaaaaacaaggagcagtccaaggccatcaagttctacatgcatgacatctgcatctgccccaataggtttgattcctgggcaggcatggctctggcccgggccagccgcattcaggacaagctgaactccaatgagctgaagagtgatgggcccatttggaagcatgccacgcccgtcttgaactgcttccgtcgggccctggagattgacagctccaacttgtccctatggattgagtatggcaccatgtcctatgccttgcactcattcgcctcacgtcaattgaagcagtggagaggcgagctgccccctgagctcgtgcagcagatggagggccggcgcgacagcatgctagagacagccaagcactgtttcacatcagcagcccgctgcgagggtgatggtgacgaggaggagtggctcatccactacatgctgggcaaggtggctgagaagcagcagcagccacccaccgtttacttgctgcactacaggcaggctggccactacctgcacgaggaggctgcccgctaccccaagaagatccactaccacaacccacctgagctggccatggaggccctggaggtgtactttcggctccatgcttccatcctgaagctcctggggaagcccgattctggggttggtgcagaggtcctggtcaactttatgaaggaggctgcagaaggaccctttgccaggggcgaggagaagaacacacccaaagcttcagaaaaggagaaggcctgcctggtggacgaggactcccactcttcagctgggacactgccgggccccggagcctccctcccctcctcctctggcccaggtctgacatccccaccttacacagccactccgattgaccacgattacgtcaaatgtaaaaaaccccaccagcaggcaacgccggacgaccgaagccaggacagcacagccgtagcactctcagactctagctcaacgcaggacttctttaatgagcccaccagcttactggaaggctccaggaaatcctacacagagaagaggctgcccattctcagttcccaagcaggagcgacgggtaaagatcttcagggggccacagaagaaagaggaaaaaacgaggagtcattggagagtacagaaggcttccgggctgcagagcaaggtgtccagaagcctgctgcagaaaccccagcctctgcttgcatccctggcaagccctcagcatccacacccaccctgtgggatgggaagaagagaggggacctcccaggggagccagtggccttcccccaggggctgccggctggtgctgaggagcagcggcagtttctcacagagcagtgcatcgcctccttccgcctgtgcctgagccgcttcccccagcactataagagtctctaccgtctggccttcctctacacctacagcaagacccaccggaacctccagtgggcccgcgacgtgttgctaggcagcagtatcccgtggcaacaactgcagcacatgccggcacaggggctcttctgcgagaggaacaagaccaatttcttcaacggcatctggcggatccccgtggacgagattgaccggccgggcagctttgcctggcacatgaaccgctccatcgtgctgctgctcaaggtgctggcccagctgcgggaccacagcaccctgctgaaggtgtcctccatgcttcagcggaccccagaccagggcaagaagtatctgcgagatgctgaccgccaggtcctggcgcagcgggccttcatcctcactgtgaaggtgctcgaagacacgctgagcgagctcgcagaggggtcagaacgcccagggcccaaggtctgtggcctccccggagccaggatgaccaccgatgtctcacacaaggccagtcctgaggatggccaggagggcctcccccagccgaagaagccccctctggctgatggctcagggccagggcccgagccaggaggcaaagtgggcctcctcaaccaccggcctgtggccatggatgcaggagacagtgcagaccaaagcggggagcggaaggataaagagagcccacgggcagggcccactgagcccatggacacgagtgaggccactgtttgccactcagacttggagcggacaccacccctgctgccaggtcgccccgcaagggaccggggccccgagagccggcccactgagctgtccctggaggagctgagcatcagtgcccggcagcagcccaccccgctcaccccagcccagccagcccccgcccccgcccccgccaccaccacagggaccagggcagggggccacccggaggagccgctctcccggctcagccgcaagaggaagctcctggaggacacagagtcaggcaagacacttctgttggatgcctaccgtgtgtggcagcagggccagaagggtgtggcctatgacctgggccgtgtggagaggatcatgtcggagacctacatgctcatcaagcaggtggatgaggaggctgcgctggagcaggctgtgaagttctgccaggtccatcttggggctgccgcccagagacaggcctcgggggacacccccaccactccaaagcaccccaaagacagccgagagaacttctttcctgtgacagtggtgcccacagcccctgaccctgtgccagctgactctgtccagcggcccagtgatgctcacaccaagcctcgccctgcactagctgccgccacaactattatcacctgccctccgtcagcatcagcttccaccctggaccagtccaaggaccctgggcctccccggccacacaggcctgaagctacccccagcatggcctctctgggcccagagggagaagagctggcgagagtggcagagggcaccagcttcccgcctcaggagccacggcacagtccgcaggtgaagatggcccccacaagttccccggcagagccacactgctggccggcagaggctgccctgggcacaggcgctgagcccacctgcagccaggaggggaaactgaggcctgagccgagaagggatggggaggctcaggaggctgcgagtgagactcagcccctgagctctcccccaacagctgccagctccaaggcccccagcagtgggagtgcccagccaccagagggtcacccaggcaagcctgagcccagccgggctaagtcccgccccctgcccaacatgccaaagctggtcatcccctccgccgccaccaagttcccccctgagatcaccgtcacgccacccaccccaaccctgctctcccccaaaggcagcatctcggaggagaccaagcagaagctgaagtcagccatcctttctgcccagtctgctgccaacgtgaggaaggagagcctatgccagccagccctggaggtcctggagacatccagccaggagtcctcgctggagagcgagacagacgaggacgacgactacatggacatttgaggggccactgcagccccaccgccacgccccaggggaccagccaggcctggaatgccccctgggcaggaccctgggcaggaccagaggcccacatggatgccactccccacacagcccccaggcctgcccagcccacctcctcatggcatcctccctgtacccaggtcaggctgtccacaccacatgggagcccagaggaggaggggcccgccttagccatgtgaaggtggattggtcgccatctgcacgccaggcggcatccttttctatgaagtgttgactttgtaaatctgcccacacccagctggccatatccacccctcgacgccgggatgagccggctctgcctgtgtcacagtggaggggtcctttagggccaggctcacccctcaccctttttttggttgcttttctaataaagatggaacagtt

SEQ ID NO: 112936 - DNA, 6952 bp, Homo sapiens
  Payload ID: 2097
  Gene Symbol: CABIN1
  Gene Name: calcineurin binding protein 1
  Uniprot ID: Q9Y6J0
  ENST ID: ENST00000405822
  CDS Start-End: 95-6520
cgttgctgtggagacgcctggagagttgtggactggggcaacctttgccagtgatgagaagtgatgctcgtggcagtgctgaatctctctgaatatgattcgaattgcagccttaaatgccagctccaccattgaggatgatcatgaaggaagctttaaaagtcacaaaacccagacaaaggaggctcaggaagcagaggcttttgcattgtaccacaaggcccttgatctgcagaaacatgaccggtttgaggagtctgccaaagcctaccatgagctcttggaggcgagcctgctgcgggaggcagtttcatccggtgatgagaaagaggggttgaaacaccctgggctgatactgaaatattccacttataagaacttggcccagctggcagcccagcgggaggatctggagacagccatggagttctacttagaggcagtgatgctggactccacagatgtcaacctctggtataagattggacatgtggccctgaggctcatccggatccccctggctcgccatgcttttgaggaagggctgcggtgcaatcctgaccactggccctgtttggataacctaatcactgtcctgtacaccctcagtgattacacaacatgtctgtacttcatctgcaaagctttggagaaggattgccggtacagcaaagggctggtcctcaaggagaagatttttgaggagcagccttgtctccggaaggactctctcagaatgttcctcaaatgctggaagtgcctcggagagagcttgctggccatgtacaatcatctcaccacctgtgagcccccacgtcccagccttggcaaaaggattgatttgtcggactaccaggaccccagccagcctcttgagtcctccatggtggtgacgccagttaacgtgatccagccaagcactgtcagcaccaacccagctgtggctgtcgccgagcctgtggtctcctacacctctgtggctacaaccagcttcccactgcacagtcctggtctgttggagacaggcgctcctgtgggtgatatttctgggggagataaatccaagaaaggggtaaaacggaagaagatttcagaagagagtggagaaacagcaaagcggcggtctgcccgtgtccgaaacaccaagtgcaaaaaagaagagaaagtagacttccaggagcttctgatgaagttcttgccgtccaggttaagaaagctggaccctgaggaggaagatgattcctttaataactatgaagtccagtcagaagccaaactggaaagcttcccaagcattgggcctcaaaggctgtcatttgactcagccacattcatggaatctgaaaagcaggacgtgcatgagttcctgctggagaacctaaccaacgggggcatcctggagctgatgatgcgctacctgaaagccatgggccacaagttcttggtaaggtggcctccaggcttggcggaggtcgtgctcagcgtctaccacagctggaggaggcacagcaccagcctgcccaacccgctgctgagggactgcagcaacaagcacatcaaggacatgatgctgatgtctctctcctgcatggaactccagctggaccagtggctgctgaccaaaggcagaagctctgcagtgtctcctcggaactgccctgctggtatggtgaatggcagatttggacctgacttcccagggacccactgcctgggtgacctcctacagctgtcatttgcctcgtcccagcgcgacctgttcgaggatggttggctggagtttgtggtccgtgtttactggctgaaggctcgcttcctggcgctgcagggagacatggagcaggccctggagaactatgacatctgcacagaaatgctccagagttccaccgccatccaggtggaggcaggggctgaacgaagagacattgtcatccggctgcccaacctccataatgactctgtggtttccctggaggagattgataagaacctgaagtcgctggagcggtgccagtccctggaggagattcagcggctgtatgaagcaggcgactacaaggctgttgtgcatctgctccgccccactttgtgcaccagtgggtttgaccgggccaaacacctggagtttatgacttccattcctgagaggccagcccagctgcttcttctgcaggactccttgctccggctgaaggactatcggcagtgttttgagtgttccgatgtggctctgaacgaggctgtccagcagatggtgaactcaggtgaggctgccgccaaggaggagtgggtggccacagtgacccaactgctgatgggcatcgagcaggccctctctgcggacagcagtggtagcatcctgaaggtatcatcctccaccactggccttgtgcggctcaccaacaacctcatccaggtcattgactgcagcatggctgtgcaggaggaggccaaggagccccacgtctcttcagtgctaccctggatcattctacaccggatcatctggcaggaggaagacaccttccattctctgtgccaccagcagcagctccaaaacccagcggaggaagggatgtcagagacgcccatgctcccatcctccctcatgctgctgaacacagcccacgagtatttgggcagaaggtcctggtgctgcaattcagatggggctctgctgcgattctatgtgcgagtactccagaaggaactggctgcatccacctctgaagacacgcacccttacaaggaggagctggagacagccttggagcagtgcttctactgcctgtacagcttccccagcaagaagagtaaggccaggtacctggaggaacactcggcccagcaggtggatcttatatgggaggatgcactgttcatgtttgagtattttaagcccaagacccttcctgaatttgacagctataagaccagcaccgtgtctgctgacttggccaacctactgaagagaattgccaccattgtgcctcgcacagagaggccagcccttagcctggacaaagtctctgcctacattgagggaacttcaactgaggtaccctgcctcccagagggggctgacccctcccctccagtggtgaacgagctttactacctcctggctgattatcatttcaaaaacaaggagcagtccaaggccatcaagttctacatgcatgacatctgcatctgccccaataggtttgattcctgggcaggcatggctctggcccgggccagccgcattcaggacaagctgaactccaatgagctgaagagtgatgggcccatttggaagcatgccacgcccgtcttgaactgcttccgtcgggccctggagattgacagctccaacttgtccctatggattgagtatggcaccatgtcctatgccttgcactcattcgcctcacgtcaattgaagcagtggagaggcgagctgccccctgagctcgtgcagcagatggagggccggcgcgacagcatgctagagacagccaagcactgtttcacatcagcagcccgctgcgagggtgatggtgacgaggaggagtggctcatccactacatgctgggcaaggtggctgagaagcagcagcagccacccaccgtttacttgctgcactacaggcaggctggccactacctgcacgaggaggctgcccgctaccccaagaagatccactaccacaacccacctgagctggccatggaggccctggaggtgtactttcggctccatgcttccatcctgaagctcctggggaagcccgattctggggttggtgcagaggtcctggtcaactttatgaaggaggctgcagaaggaccctttgccaggggcgaggagaagaacacacccaaagcttcagaaaaggagaaggcctgcctggtggacgaggactcccactcttcagctgggacactgccgggccccggagcctccctcccctcctcctctggcccagaccgaagccaggacagcacagccgtagcactctcagactctagctcaacgcaggacttctttaatgagcccaccagcttactggaaggctccaggaaatcctacacagagaagaggctgcccattctcagttcccaagcaggagcgacgggtaaagatcttcagggggccacagaagaaagaggaaaaaacgaggagtcattggagagtacagaaggcttccgggctgcagagcaaggtgtccagaagcctgctgcagaaaccccagcctctgcttgcatccctggcaagccctcagcatccacacccaccctgtgggatgggaagaagagaggggacctcccaggggagccagtggccttcccccaggggctgccggctggtgctgaggagcagcggcagtttctcacagagcagtgcatcgcctccttccgcctgtgcctgagccgcttcccccagcactataagagtctctaccgtctggccttcctctacacctacagcaagacccaccggaacctccagtgggcccgcgacgtgttgctaggcagcagtatcccgtggcaacaactgcagcacatgccggcacaggggctcttctgcgagaggaacaagaccaatttcttcaacggcatctggcggatccccgtggacgagattgaccggccgggcagctttgcctggcacatgaaccgctccatcgtgctgctgctcaaggtgctggcccagctgcgggaccacagcaccctgctgaaggtgtcctccatgcttcagcggaccccagaccagggcaagaagtatctgcgagatgctgaccgccaggtcctggcgcagcgggccttcatcctcactgtgaaggtgctcgaagacacgctgagcgagctcgcagaggggtcagaacgcccagggcccaaggtctgtggcctccccggagccaggatgaccaccgatgtctcacacaaggccagtcctgaggatggccaggagggcctcccccagccgaagaagccccctctggctgatggctcagggccagggcccgagccaggaggcaaagtgggcctcctcaaccaccggcctgtggccatggatgcaggagacagtgcagaccaaagcggggagcggaaggataaagagagcccacgggcagggcccactgagcccatggacacgagtgaggccactgtttgccactcagacttggagcggacaccacccctgctgccaggtcgccccgcaagggaccggggccccgagagccggcccactgagctgtccctggaggagctgagcatcagtgcccggcagcagcccaccccgctcaccccagcccagccagcccccgcccccgcccccgccaccaccacagggaccagggcagggggccacccggaggagccgctctcccggctcagccgcaagaggaagctcctggaggacacagagtcaggcaagacacttctgttggatgcctaccgtgtgtggcagcagggccagaagggtgtggcctatgacctgggccgtgtggagaggatcatgtcggagacctacatgctcatcaagcaggtggatgaggaggctgcgctggagcaggctgtgaagttctgccaggtccatcttggggctgccgcccagagacaggcctcgggggacacccccaccactccaaagcaccccaaagacagccgagagaacttctttcctgtgacagtggtgcccacagcccctgaccctgtgccagctgactctgtccagcggcccagtgatgctcacaccaagcctcgccctgcactagctgccgccacaactattatcacctgccctccgtcagcatcagcttccaccctggaccagtccaaggaccctgggcctccccggccacacaggcctgaagctacccccagcatggcctctctgggcccagagggagaagagctggcgagagtggcagagggcaccagcttcccgcctcaggagccacggcacagtccgcaggtgaagatggcccccacaagttccccggcagagccacactgctggccggcagaggctgccctgggcacaggcgctgagcccacctgcagccaggaggggaaactgaggcctgagccgagaagggatggggaggctcaggaggctgcgagtgagactcagcccctgagctctcccccaacagctgccagctccaaggcccccagcagtgggagtgcccagccaccagagggtcacccaggcaagcctgagcccagccgggctaagtcccgccccctgcccaacatgccaaagctggtcatcccctccgccgccaccaagttcccccctgagatcaccgtcacgccacccaccccaaccctgctctcccccaaaggcagcatctcggaggagaccaagcagaagctgaagtcagccatcctttctgcccagtctgctgccaacgtgaggaaggagagcctatgccagccagccctggaggtcctggagacatccagccaggagtcctcgctggagagcgagacagacgaggacgacgactacatggacatttgaggggccactgcagccccaccgccacgccccaggggaccagccaggcctggaatgccccctgggcaggaccctgggcaggaccagaggcccacatggatgccactccccacacagcccccaggcctgcccagcccacctcctcatggcatcctccctgtacccaggtcaggctgtccacaccacatgggagcccagaggaggaggggcccgccttagccatgtgaaggtggattggtcgccatctgcacgccaggcggcatccttttctatgaagtgttgactttgtaaatctgcccacacccagctggccatatccacccctcgacgccgggatgagccggctctgcctgtgtcacagtggaggggtcctttagggccaggctcacccctcaccctttttttggttgcttttctaataaagatggaacagtt

SEQ ID NO: 112937 - DNA, 1321 bp, Homo sapiens
  Payload ID: 2097
  Gene Symbol: CABIN1
  Gene Name: calcineurin binding protein 1
  ENST ID: ENST00000454754
  CDS Start-End: 251-1321
gtagccgtctgcagggccccagctaagcagcccgcggagagcgagcggcgcgtgcgcccccgctgattggctggcacaaccggcaccggagccaatgggagcacgccttgttgtcaggcgcgcagccggacggcgcggtggtcgggacagactggccgttgctgtggagacgcctggagagttgtggactggggcaacctttgccagtgatgagaagtgatgctcgtggcagtgctgaatctctctgaatatgattcgaattgcagccttaaatgccagctccaccattgaggatgatcatgaaggaagctttaaaagtcacaaaacccagacaaaggaggctcaggaagcagaggcttttgcattgtaccacaaggcccttgatctgcagaaacatgaccggtttgaggagtctgccaaagcctaccatgagctcttggaggcgagcctgctgcgggaggcagtgatgctggactccacagatgtcaacctctggtataagattggacatgtggccctgaggctcatccggatccccctggctcgccatgcttttgaggaagggctgcggtgcaatcctgaccactggccctgtttggataacctaatcactgtcctgtacaccctcagtgattacacaacatgtctgtacttcatctgcaaagctttggagaaggattgccggtacagcaaagggctggtcctcaaggagaagatttttgaggagcagccttgtctccggaaggactctctcagaatgttcctcaaatgtgacatgtcgattcacgatgtttcggtgagtgcagctgagacacaggcgattgtagatgaggccttggggctgcgaaaaaagaggcaagcgctgattgtgcgggagaaggagccggacctgaaacttgtgcagcccattcctttcttcacctggaagtgcctcggagagagcttgctggccatgtacaatcatctcaccacctgtgagcccccacgtcccagccttggcaaaaggattgatttgtcggactaccaggaccccagccagcctcttgagtcctccatggtggtgacgccagttaacgtgatccagccaagcactgtcagcaccaacccagctgtggctgtcgccgagcctgtggtctcctacacctctgtggctacaaccagcttcccactgcacagtcctggtctgttggagacaggcgctcctgtgggtgatatttctgggggagataaatccaagaaaggggtaaaacggaagaagatttcagaagagagtggagaaacagcaaagcggcggtctgcccgtgtccgaaacaccaagtgc

SEQ ID NO: 112938 - DNA, 1472 bp, Homo sapiens
  Payload ID: 2097
  Gene Symbol: CABIN1
  Gene Name: calcineurin binding protein 1
  ENST ID: ENST00000445422
  CDS Start-End: 388-1472
ggctcagcagagcccggggcacaggccggaggggctgcaggcgcgaggctgggttacgtgaggaagctgggggtttcgcgggcagctttagagccccagtcagggaaaccgaggccgggcttcctggctgcctcgcgagcctcttcatggctctcgccgccgccctgaggtgcctagaatgggttccggcctccggggaggttcccagtaaccgcaggagccaccattgatttggcgtctgctgggtgcaaagcccagcgcgctaaccctttactcgcgacctttcgcttcaccttcacagcagccctgcgaggagagttgtggactggggcaacctttgccagtgatgagaagtgatgctcgtggcagtgctgaatctctctgaatatgattcgaattgcagccttaaatgccagctccaccattgaggatgatcatgaaggaagctttaaaagtcacaaaacccagacaaaggaggctcaggaagcagaggcttttgcattgtaccacaaggcccttgatctgcagaaacatgaccggtttgaggagtctgccaaagcctaccatgagctcttggaggcgagcctgctgcgggaggcagtgatgctggactccacagatgtcaacctctggtataagattggacatgtggccctgaggctcatccggatccccctggctcgccatgcttttgaggaagggctgcggtgcaatcctgaccactggccctgtttggataacctaatcactgtcctgtacaccctcagtgattacacaacatgtctgtacttcatctgcaaagctttggagaaggattgccggtacagcaaagggctggtcctcaaggagaagatttttgaggagcagccttgtctccggaaggactctctcagaatgttcctcaaatgtgacatgtcgattcacgatgtttcggtgagtgcagctgagacacaggcgattgtagatgaggccttggggctgcgaaaaaagaggcaagcgctgattgtgcgggagaaggagccggacctgaaacttgtgcagcccattcctttcttcacctggaagtgcctcggagagagcttgctggccatgtacaatcatctcaccacctgtgagcccccacgtcccagccttggcaaaaggattgatttgtcggactaccaggaccccagccagcctcttgagtcctccatggtggtgacgccagttaacgtgatccagccaagcactgtcagcaccaacccagctgtggctgtcgccgagcctgtggtctcctacacctctgtggctacaaccagcttcccactgcacagtcctggtctgttggagacaggcgctcctgtgggtgatatttctgggggagataaatccaagaaaggggtaaaacggaagaagatttcagaagagagtggagaaacagcaaagcggcggtctgcccgtgtccgaaacaccaagtgcaaaaaagaagagaa

SEQ ID NO: 112939 - DNA, 7072 bp, Homo sapiens
  Payload ID: 2097
  Gene Symbol: CABIN1
  Gene Name: calcineurin binding protein 1
  ENST ID: ENST00000617531
  CDS Start-End: 128-6640
agccggacggcgcggtggtcgggacagactggccgttgctgtggagacgcctggagagttgtggactggggcaacctttgccagtgatgagaagtgatgctcgtggcagtgctgaatctctctgaatatgattcgaattgcagccttaaatgccagctccaccattgaggatgatcatgaaggaagctttaaaagtcacaaaacccagacaaaggaggctcaggaagcagaggcttttgcattgtaccacaaggcccttgatctgcagaaacatgaccggtttgaggagtctgccaaagcctaccatgagctcttggaggcgagcctgctgcgggaggcagtttcatccggtgatgagaaagaggggttgaaacaccctgggctgatactgaaatattccacttataagaacttggcccagctggcagcccagcgggaggatctggagacagccatggagttctacttagaggcagtgatgctggactccacagatgtcaacctctggtataagattggacatgtggccctgaggctcatccggatccccctggctcgccatgcttttgaggaagggctgcggtgcaatcctgaccactggccctgtttggataacctaatcactgtcctgtacaccctcagtgattacacaacatgtctgtacttcatctgcaaagctttggagaaggattgccggtacagcaaagggctggtcctcaaggagaagatttttgaggagcagccttgtctccggaaggactctctcagaatgttcctcaaatgctggaagtgcctcggagagagcttgctggccatgtacaatcatctcaccacctgtgagcccccacgtcccagccttggcaaaaggattgatttgtcggactaccaggaccccagccagcctcttgagtcctccatggtggtgacgccagttaacgtgatccagccaagcactgtcagcaccaacccagctgtggctgtcgccgagcctgtggtctcctacacctctgtggctacaaccagcttcccactgcacagtcctggtctgttggagacaggcgctcctgtgggtgatatttctgggggagataaatccaagaaaggggtaaaacggaagaagatttcagaagagagtggagaaacagcaaagcggcggtctgcccgtgtccgaaacaccaagtgcaaaaaagaagagaaagtagacttccaggagcttctgatgaagttcttgccgtccaggttaagaaagctggaccctgaggaggaagatgattcctttaataactatgaagtccagtcagaagccaaactggaaagcttcccaagcattgggcctcaaaggctgtcatttgactcagccacattcatggaatctgaaaagcaggacgtgcatgagttcctgctggagaacctaaccaacgggggcatcctggagctgatgatgcgctacctgaaagccatgggccacaagttcttggtaaggtggcctccaggcttggcggaggtcgtgctcagcgtctaccacagctggaggaggcacagcaccagcctgcccaacccgctgctgagggactgcagcaacaagcacatcaaggacatgatgctgatgtctctctcctgcatggaactccagctggaccagtggctgctgaccaaaggcagaagctctgcagtgtctcctcggaactgccctgctggtatggtgaatggcagatttggacctgacttcccagggacccactgcctgggtgacctcctacagctgtcatttgcctcgtcccagcgcgacctgttcgaggatggttggctggagtttgtggtccgtgtttactggctgaaggctcgcttcctggcgctgcagggagacatggagcaggccctggagaactatgacatctgcacagaaatgctccagagttccaccgccatccaggtggaggcaggggctgaacgaagagacattgtcatccggctgcccaacctccataatgactctgtggtttccctggaggagattgataagaacctgaagtcgctggagcggtgccagtccctggaggagattcagcggctgtatgaagcaggcgactacaaggctgttgtgcatctgctccgccccactttgtgcaccagtgggtttgaccgggccaaacacctggagtttatgacttccattcctgagaggccagcccagctgcttcttctgcaggactccttgctccggctgaaggactatcggcagtgttttgagtgttccgatgtggctctgaacgaggctgtccagcagatggtgaactcaggtgaggctgccgccaaggaggagtgggtggccacagtgacccaactgctgatgggcatcgagcaggccctctctgcggacagcagtggtagcatcctgaaggtatcatcctccaccactggccttgtgcggctcaccaacaacctcatccaggtcattgactgcagcatggctgtgcaggaggaggccaaggagccccacgtctcttcagtgctaccctggatcattctacaccggatcatctggcaggaggaagacaccttccattctctgtgccaccagcagcagctccaaaacccagcggaggaagggatgtcagagacgcccatgctcccatcctccctcatgctgctgaacacagcccacgagtatttgggcagaaggtcctggtgctgcaattcagatggggctctgctgcgattctatgtgcgagtactccagaaggaactggctgcatccacctctgaagacacgcacccttacaaggaggagctggagacagccttggagcagtgcttctactgcctgtacagcttccccagcaagaagagtaaggccaggtacctggaggaacactcggcccagcaggtggatcttatatgggaggatgcactgttcatgtttgagtattttaagcccaagacccttcctgaatttgacagctataagaccagcaccgtgtctgctgacttggccaacctactgaagagaattgccaccattgtgcctcgcacagagaggccagcccttagcctggacaaagtctctgcctacattgagggaacttcaactgaggtaccctgcctcccagagggggctgacccctcccctccagtggtgaacgagctttactacctcctggctgattatcatttcaaaaacaaggagcagtccaaggccatcaagttctacatgcatgacatctgcatctgccccaataggtttgattcctgggcaggcatggctctggcccgggccagccgcattcaggacaagctgaactccaatgagctgaagagtgatgggcccatttggaagcatgccacgcccgtcttgaactgcttccgtcgggccctggagattgacagctccaacttgtccctatggattgagtatggcaccatgtcctatgccttgcactcattcgcctcacgtcaattgaagcagtggagaggcgagctgccccctgagctcgtgcagcagatggagggccggcgcgacagcatgctagagacagccaagcactgtttcacatcagcagcccgctgcgagggtgatggtgacgaggaggagtggctcatccactacatgctgggcaaggtggctgagaagcagcagcagccacccaccgtttacttgctgcactacaggcaggctggccactacctgcacgaggaggctgcccgctaccccaagaagatccactaccacaacccacctgagctggccatggaggccctggaggtgtactttcggctccatgcttccatcctgaagctcctggggaagcccgattctggggttggtgcagaggtcctggtcaactttatgaaggaggctgcagaaggaccctttgccaggggcgaggagaagaacacacccaaagcttcagaaaaggagaaggcctgcctggtggacgaggactcccactcttcagctgggacactgccgggccccggagcctccctcccctcctcctctggcccaggtctgacatccccaccttacacagccactccgattgaccacgattacgtcaaatgtaaaaaaccccaccagcaggcaacgccggacgaccgaagccaggacagcacagccgtagcactctcagactctagctcaacgcaggacttctttaatgagcccaccagcttactggaaggctccaggaaatcctacacagagaagaggctgcccattctcagttcccaagcaggagcgacgggtaaagatcttcagggggccacagaagaaagaggaaaaaacgaggagtcattggagagtacagaaggcttccgggctgcagagcaaggtgtccagaagcctgctgcagaaaccccagcctctgcttgcatccctggcaagccctcagcatccacacccaccctgtgggatgggaagaagagaggggacctcccaggggagccagtggccttcccccaggggctgccggctggtgctgaggagcagcggcagtttctcacagagcagtgcatcgcctccttccgcctgtgcctgagccgcttcccccagcactataagagtctctaccgtctggccttcctctacacctacagcaagacccaccggaacctccagtgggcccgcgacgtgttgctaggcagcagtatcccgtggcaacaactgcagcacatgccggcacaggggctcttctgcgagaggaacaagaccaatttcttcaacggcatctggcggatccccgtggacgagattgaccggccgggcagctttgcctggcacatgaaccgctccatcgtgctgctgctcaaggtgctggcccagctgcgggaccacagcaccctgctgaaggtgtcctccatgcttcagcggaccccagaccagggcaagaagtatctgcgagatgctgaccgccaggtcctggcgcagcgggccttcatcctcactgtgaaggtgctcgaagacacgctgagcgagctcgcagaggggtcagaacgcccagggcccaaggtctgtggcctccccggagccaggatgaccaccgatgtctcacacaaggccagtcctgaggatggccaggagggcctcccccagccgaagaagccccctctggctgatggctcagggccagggcccgagccaggaggcaaagtgggcctcctcaaccaccggcctgtggccatggatgcaggagacagtgcagaccaaagcggggagcggaaggataaagagagcccacgggcagggcccactgagcccatggacacgagtgaggccactgtttgccactcagacttggagcggacaccacccctgctgccaggtcgccccgcaagggaccggggccccgagagccggcccactgagctgtccctggaggagctgagcatcagtgcccggcagcagcccaccccgctcaccccagcccagccagcccccgcccccgcccccgccaccaccacagggaccagggcagggggccacccggaggagccgctctcccggctcagccgcaagaggaagctcctggaggacacagagtcaggcaagacacttctgttggatgcctaccgtgtgtggcagcagggccagaagggtgtggcctatgacctgggccgtgtggagaggatcatgtcggagacctacatgctcatcaagcaggtggatgaggaggctgcgctggagcaggctgtgaagttctgccaggtccatcttggggctgccgcccagagacaggcctcgggggacacccccaccactccaaagcaccccaaagacagccgagagaacttctttcctgtgacagtggtgcccacagcccctgaccctgtgccagctgactctgtccagcggcccagtgatgctcacaccaagcctcgccctgcactagctgccgccacaactattatcacctgccctccgtcagcatcagcttccaccctggaccagtccaaggaccctgggcctccccggccacacaggcctgaagctacccccagcatggcctctctgggcccagagggagaagagctggcgagagtggcagagggcaccagcttcccgcctcaggagccacggcacagtccgcaggtgaagatggcccccacaagttccccggcagagccacactgctggccggcagaggctgccctgggcacaggcgctgagcccacctgcagccaggaggggaaactgaggcctgagccgagaagggatggggaggctcaggaggctgcgagtgagactcagcccctgagctctcccccaacagctgccagctccaaggcccccagcagtgggagtgcccagccaccagagggtcacccaggcaagcctgagcccagccgggctaagtcccgccccctgcccaacatgccaaagctggtcatcccctccgccgccaccaagttcccccctgagatcaccgtcacgccacccaccccaaccctgctctcccccaaaggcagcatctcggaggagaccaagcagaagctgaagtcagccatcctttctgcccagtctgctgccaacgtgaggaaggagagcctatgccagccagccctggaggtcctggagacatccagccaggagtcctcgctggagagcgagacagacgaggacgacgactacatggacatttgaggggccactgcagccccaccgccacgccccaggggaccagccaggcctggaatgccccctgggcaggaccctgggcaggaccagaggcccacatggatgccactccccacacagcccccaggcctgcccagcccacctcctcatggcatcctccctgtacccaggtcaggctgtccacaccacatgggagcccagaggaggaggggcccgccttagccatgtgaaggtggattggtcgccatctgcacgccaggcggcatccttttctatgaagtgttgactttgtaaatctgcccacacccagctggccatatccacccctcgacgccgggatgagccggctctgcctgtgtcacagtggaggggtcctttagggccaggctcacccctcaccctttttttggttgcttttctaataaagatggaacagtt

SEQ ID NO: 112940 - DNA, 2253 bp, Homo sapiens
  Payload ID: 2097
  Gene Symbol: CABIN1
  Gene Name: calcineurin binding protein 1
  ENST ID: ENST00000620406
  CDS Start-End: 53-1822
gaacgagcctccgcggccatggcccggcgctcgccctagctccactgcacagatgccacggcggagccggcggggcatctggcggatccccgtggacgagattgaccggccgggcagctttgcctggcacatgaaccgctccatcgtgctgctgctcaaggtgctggcccagctgcgggaccacagcaccctgctgaaggtgtcctccatgcttcagcggaccccagaccagggcaagaagtatctgcgagatgctgaccgccaggtcctggcgcagcgggccttcatcctcactgtgaaggtgctcgaagacacgctgagcgagctcgcagaggggtcagaacgcccagggcccaaggtctgtggcctccccggagccaggatgaccaccgatgtctcacacaaggccagtcctgaggatggccaggagggcctcccccagccgaagaagccccctctggctgatggctcagggccagggcccgagccaggaggcaaagtgggcctcctcaaccaccggcctgtggccatggatgcaggagacagtgcagaccaaagcggggagcggaaggataaagagagcccacgggcagggcccactgagcccatggacacgagtgaggccactgtttgccactcagacttggagcggacaccacccctgctgccaggtcgccccgcaagggaccggggccccgagagccggcccactgagctgtccctggaggagctgagcatcagtgcccggcagcagcccaccccgctcaccccagcccagccagcccccgcccccgcccccgccaccaccacagggaccagggcagggggccacccggaggagccgctctcccggctcagccgcaagaggaagctcctggaggacacagagtcaggcaagacacttctgttggatgcctaccgtgtgtggcagcagggccagaagggtgtggcctatgacctgggccgtgtggagaggatcatgtcggagacctacatgctcatcaagcaggtggatgaggaggctgcgctggagcaggctgtgaagttctgccaggtccatcttgggctgccgcccagagacaggcctcgggacacccccaccactccaaagcaccccaaagacagccgagagaacttctttcctgtgacagtggtgcccacagcccctgaccctgtgccagctgactctgtccagcggcccagtgatgctcacaccaagcctcgccctgcactagctgccgccacaactattatcacctgccctccgtcagcatcagcttccaccctggaccagtccaaggaccctgggcctccccggccacacaggcctgaagctacccccagcatggcctctctgggcccagaggggaaactgaggcctgagccgagaagggatggggaggctcaggaggctgcgagtgagactcagcccctgagctctcccccaacagctgccagctccaaggcccccagcagtgggagtgcccagccaccagagggtcacccaggcaagcctgagcccagccgggctaagtcccgccccctgcccaacatgccaaagctggtcatcccctccgccgccaccaagttcccccctgagatcaccgtcacgccacccaccccaaccctgctctcccccaaaggcagcatctcggaggagaccaagcagaagctgaagtcagccatcctttctgcccagtctgctgccaacgtgaggaaggagagcctatgccagccagccctggaggtcctggagacatccagccaggagtcctcgctggagagcgagacagacgaggacgacgactacatggacatttgaggggccactgcagccccaccgccacgccccaggggaccagccaggcctggaatgccccctgggcaggaccctgggcaggaccagaggcccacatggatgccactccccacacagcccccaggcctgcccagcccacctcctcatggcatcctccctgtacccaggtcaggctgtccacaccacatgggagcccagaggaggaggggcccgccttagccatgtgaaggtggattggtcgccatctgcacgccaggcggcatccttttctatgaagtgttgactttgtaaatctgcccacacccagctggccatatccacccctcgacgccgggatgagccggctctgcctgtgtcacagtggaggggtcctttagggccaggctcacccctcaccctttttttggttgcttttctaataaagatggaacagt

SEQ ID NO: 112941 - DNA, 3329 bp, Homo sapiens
  Payload ID: 2098
  Gene Symbol: CHP1
  Gene Name: calcineurin-like EF-hand protein 1
  Uniprot ID: Q99653
  ENST ID: ENST00000334660
  CDS Start-End: 241-828
cattcggggctggaactcgaacgctgacgttggctcctgagccgggcgctgcctcgcgcctgattggcgggtcctcggggccgccctccccagcgcaccacccctgggttccctcccgggtccgcagtggaaacactgccctctcccttcttgacccctagcccttccttccctccctccttccctcctgtcgccgtctcttctggcgccgctgctcccggaggagctcccggcacggcgatgggttctcgggcctccacgttactgcgggacgaagagctcgaggagatcaagaaggagaccggcttttcccacagtcaaatcactcgcctctacagccggttcaccagcctggacaaaggagagaatgggactctcagccgggaagatttccagaggattccagaacttgccatcaacccactgggggaccggatcatcaatgccttctttccagagggagaggaccaggtaaacttccgtggattcatgcgaactttggctcatttccgccccattgaggataatgaaaagagcaaagatgtgaatggacccgaaccactcaacagccgaagcaacaaactgcactttgcttttcgactatatgatttggataaagatgaaaagatctcccgtgatgagctgttacaggtgctacgcatgatggtcggagtaaatatctcagatgagcagctgggcagcatcgcagacaggaccattcaggaggctgatcaggatggggacagtgccatatctttcacagaatttgttaaggttttggagaaggtggatgtagaacagaaaatgagcatccgatttcttcactaaaggagaccaaactgttccttgcggtctagtatttaagaactggaacttgaaagtcctccttctaccaactccacctccaccccctcattccccttctcccaaagtactactgctgttgcatgacaaccccaaatatgttctgtcaacacaaacctgcctttggtgtataaacagggcattacagaatggtacaccctatatatttctgttcagtatccattcactagttcttcatttataaatatcatcttccccattctgctgctgaatgccacacatccatccagtctgagaaagtgagagaggcaatcatgccaagaacaagccagcaaagctctttcaccagatgtagactgtagccctgctgccttccctccagcgagtctgccagcatgcttcttcatcctttttatatgttctttgcttcctacttccctgtcttccaacatactgttcacttactctggcagtctttctgcttttcattaagcctcaaaatctcctctgttctacttggcaccacaagctatgtcctatatatgtatttctgacttggcaggatagttcaggggtctggcagtttttatttaccttcattattaaatgggcctctgggatgttgcctcttcaggagctttttggtaatcaatacttctctcagaagtatgagaccatcctctgcactctgctctgtcatcaaaggctgctgggtggagataccctttttgaaaggtggccttggtgagaggtatggagccaagtcttctaggttgcttgcccacatcactctatctctggcctctgattctcaactttgtacctgtgtggctcctcttgttagtgcaatgttgactgttgaaaaagcagcagtatgcttacaggtttgcttagtttggggacaccgttaccaccagaatggctgctctgacaatatgcctagggactttctcatggcttttatttaataaggaggctgggcaccctataaagcctcatgcattcacacctttgcagcatggtttatgcctcagtgttatgtgcactggaatgttttccacttcacatttccaagtagaaatattagtgttacggaagtgcctaatatcccagtccaaatttttttttttttttttttttttttttgagacagagtcttgctctgtcacccaggctggagtgcagtggtgcgatcgctcactgcaacctcagcctcctggatttaagtgattctcctgcctcagcctcccaagtagctgggattacaggtgtgcaccaccatgcccggctaattttttgtatttttagtggagacagggtttcaccatgttggccaggctggtctcgaactcctgacctcgtgatccgcctgcctcagcctcccaaagtgctgggattacaggtgtgagccaccacgcctggccccagtccaaaatatttaaagattgtttccttagtgtcttgaagttttgcacaaaattcttttttttgagatggagtctcactctgtcacccaggctggagtgcagtggcgtgatcttggctcactgcaacctctgcctcctgggttcaagcaattctcccacctcagcctcccaagtagctgggattacagacgtgtgccaccatacctgggtaatttttgcatttttagtggagagggagtttcaccatgttggccaggttggtcttgaactcctgacctcaggtgatcctcctgcctcggcctcccaaagtgctgggattacaggcatgagccaccgtgctcagccgcaaaattctttatgaattttacacttggcaaatgttaatgacggaagccatagtctgctcctaatacatgtccaaagcattgactgttgtgtcattagctgcctggttacattagctccctggcttcttgtttagaccactgctaatcccttaaaaacaagaggtctggcactagtagcacaacctaaggtggcattacagatctttgagcgagccacagcaacttttctgccaagtcagcttagtttagacttcagtgaatcaggctattgctatcctaatgtatgtctctatgagtgtatttagccacacatctgcccttggttgactttctgactcattgcttgcttgcttgtttccttgctttggaaaactattgaagattgctaaaaaataccactgcaaagtgatggaaaagggtggagaacaggggagtagccaggctggatggctcaaatataaatgaatgaggaattctttatgaagtatcagtcagattttatgattaagtgatgtaatataggaattatgtaaaagggaagaatgtctgatactgatctattagagaggtactttagaggcttcttgattggcataaagttcctaaggttatagattttccccccttttggctgtatagcaaagtgttttaatccacggttgtgccttattgttccattaaaattgtatcttcgatccatcaataaatacttgtggttgaaacaaaataa

SEQ ID NO: 112942 - DNA, 1000 bp, Homo sapiens
  Payload ID: 2098
  Gene Symbol: CHP1
  Gene Name: calcineurin-like EF-hand protein 1
  ENST ID: ENST00000392151
  CDS Start-End: 145-531
accacccctgggttccctcccgggtccgcagtggaaacactgccctctcccttcttgacccctagcccttccttccctccctccttccctcctgtcgccgtctcttctggcgccgctgctcccggaggagctcccggcacggcgatgggttctcgggcctccacgttactgcgggacgaagagctcgaggagatcaagaaggagaccggcttttcccacagtcaaatcactcgcctctacagccggttcaccagcctggacaaaggagagaatgggactctcagccgggaagatttccagaggattccagaacttgccatcaacccactgggggaccggatcatcaatgccttctttccagagggagaggaccaggtaaacttccgtggattcatgcgaactttggctcatttccgccccattgaggataatgaaaagagcaaagatgtgaatggacccgaaccactcaacagccgaagcaacaaactgcactgtgctacgcatgatggtcggagtaaatatctcagatgagcagctgggcagcatcgcagacaggaccattcaggaggctgatcaggatggggacagtgccatatctttcacagaatttgttaaggttttggagaaggtggatgtagaacagaaaatgagcatccgatttcttcactaaaggagaccaaactgttccttgcggtctagtatttaagaactggaacttgaaagtcctccttctaccaactccacctccaccccctcattccccttctcccaaagtactactgctgttgcatgacaaccccaaatatgttctgtcaacacaaacctgcctttggtgtataaacagggcattacagaatggtacaccctatatatttctgttcagtatccattcactagttcttcatttataaatatcatcttccccattctgctgctgaatgccacacatccatccagtctgagaaagtgagagaggcaatcatgccaagaacaagccagc

SEQ ID NO: 112943 - DNA, 717 bp, Homo sapiens
  Payload ID: 2098
  Gene Symbol: CHP1
  Gene Name: calcineurin-like EF-hand protein 1
  ENST ID: ENST00000560784
  CDS Start-End: 162-533
gccgccctccccagcgcaccacccctgggttccctcccgggtccgcagtggaaacactgccctctcccttcttgacccctagcccttccttccctccctccttccctcctgtcgccgtctcttctggcgccgctgctcccggaggagctcccggcacggcgatgggttctcgggcctccacgttactgcgggacgaagagctcgaggagatcaagaaggagaccggcttttcccacagtcaaatcactcgcctctacagccggttcaccagcctggacaaaggagagaatgggactctcagccgggaagatttccagaggattccagaacttgccatcaacccactgggggaccggatcatcaatgccttctttccagagggagaggaccaggtaaacttccgtggattcatgcgaactttggctcatttccgccccattgaggataatgaaaagagcaaagatgtgaatggacccgaaccactcaacagccgaagcaacaaactgcacttagaggaagagagatatatatagagagagatcgagactgaaattgagcaacactcctcccaagcatggaatttgcttttcgactatatgatttggataaagatgaaaagatctcccgtgatgagctgttacaggtgctacgcatgatggtcggagtaaatatctcagatgagcagctgggcagcatcgcagacaggaccattcagga

SEQ ID NO: 112944 - DNA, 1088 bp, Homo sapiens
  Payload ID: 2098
  Gene Symbol: CHP1
  Gene Name: calcineurin-like EF-hand protein 1
  ENST ID: ENST00000560411
  CDS Start-End: 244-405
attcattcggggctggaactcgaacgctgacgttggctcctgagccgggcgctgcctcgcgcctgattggcgggtcctcggggccgccctccccagcgcaccacccctgggttccctcccgggtccgcagtggaaacactgccctctcccttcttgacccctagcccttccttccctccctccttccctcctgtcgccgtctcttctggcgccgctgctcccggaggagctcccggcacggcgatgggttctcgggcctccacgttactgcgggacgaagagctcgaggagatcaagaaggagaccggctccgggaagatttccagaggattccagaacttgccatcaacccactgggggaccggatcatcaatgccttctttccagagggagaggaccaggtaaacttccgtggattcatgcgaactttggctcatttccgccccattgaggataatgaaaagagcaaagatgtgaatggacccgaaccactcaacagccgaagcaacaaactgcactttgcttttcgactatatgatttggataaagatgaaaagatctcccgtgatgagctgttacaggtgctacgcatgatggtcggagtaaatatctcagatgagcagctgggcagcatcgcagacaggaccattcaggaggctgatcaggatggggacagtgccatatctttcacagaatttgttaaggttttggagaaggtggatgtagaacagaaaatgagcatccgatttcttcactaaaggagaccaaactgttccttgcggtctagtatttaagaactggaacttgaaagtcctccttctaccaactccacctccaccccctcattccccttctcccaaagtactactgctgttgcatgacaaccccaaatatgttctgtcaacacaaacctgcctttggtgtataaacagggcattacagaatggtacaccctatatatttctgttcagtatccattcactagttcttcatttataaatatcatcttccccattctgctgctgaatgccacacatccatccagtctgagaaagtgagagaggcaatcatgccaagaacaagccagc

SEQ ID NO: 112945 - DNA, 467 bp, Homo sapiens
  Payload ID: 2098
  Gene Symbol: CHP1
  Gene Name: calcineurin-like EF-hand protein 1
  ENST ID: ENST00000560965
  CDS Start-End: 1-274
ccgggaagatttccagaggattccagaacttgccatcaacccactgggggaccggatcatcaatgccttctttccagagggagaggaccaggtaaacttccgtggattcatgcgaactttggctcatttccgccccattgaggataatgaaaagagcaaagatgtgaatggacccgaaccactcaacagccgaagcaacaaactgcactttgcttttcgactatatgatttggataaagatgaaaagatctcccgtgatgagctgttacagtagagacggggtttcagcatattggccaggctggtctcgaactcctaacctcaagtgatccacccacctcggcctcccaaagtgctgggagtacaagcacgagccatcatgcctggccccaactgtccattttaaatatgtacagcttattgtatattatttatacttcaataaagatagttactcttctccccaa

SEQ ID NO: 112946 - DNA, 568 bp, Homo sapiens
  Payload ID: 2098
  Gene Symbol: CHP1
  Gene Name: calcineurin-like EF-hand protein 1
  ENST ID: ENST00000560397
  CDS Start-End: 91-555
ttgacccctagcccttccttccctccctccttccctcctgtcgccgtctcttctggcgccgctgctcccggaggagctcccggcacggcgatgggttctcgggcctccacgttactgcgggacgaagagctcgaggagatcaagaaggagaccggcttttcccacagtcaaatcactcgcctctacagccggttcaccagcctggacaaaggagagaatgggactctcagccgggaagatttccagaggattccagaacttgccatcaacccactgggggaccggatcatcaatgccttctttccagagggagaggaccaggtaaacttccgtggattcatgcgaactttggctcatttccgccccattgaggataatgaaaagagcaaagatgtgaatggacccgaaccactcaacagccgaagcaacaaactgcactttgcttttcgactatatgatttggataaagatgaaaagatctcccgtgatgagctgttacaggttttggagaaggtggatgtagaacagaaaatgagcatccgatttcttcactaaaggagaccaaact

SEQ ID NO: 112947 - DNA, 2382 bp, Homo sapiens
  Payload ID: 2099
  Gene Symbol: CHP2
  Gene Name: calcineurin-like EF-hand protein 2
  Uniprot ID: O43745
  ENST ID: ENST00000300113
  CDS Start-End: 424-1014
caggtctcccaggcttcctcagcgtcgacgccggggagcgccctggggttgggagcgcccggggcccgcgaaggaggaggtggctcaggtgtcagggcgcaccgtgggaaccggccccgggggaggcgtggaaacgcggggcctgggactcgaccagcctctcccgtgcggatcgcaaaatctcggagctgaaacagcccgttgttcgcagcctccctctgacccgccaccctgcacattgttttccattcgcccgggtcgcgggtgggaggagaggcacgccggggttctggagcttggccgcgcgccaggcttgtggccttcgtccccctggggccactggggcggccacgcctctccggcgggaggagagaacgcgtgggtccgggtggctgctccggcccttccgcctccagctcggccatggggtcgcgcagctcccacgccgcggtcattcccgacggggacagtattcggcgagagaccggcttctcccaagccagcctgctccgcctgcaccaccggttccgggcactggacaggaataagaagggctacctgagccgcatggatctccagcagataggggcgctcgccgtgaaccccctgggagaccgaattatagaaagcttcttccccgatgggagccagcgagtggatttcccaggctttgtcagggtcttggctcattttcgccctgtagaagatgaggacacagaaacccaagaccccaagaaacctgaacctctcaacagcagaaggaacaaacttcactatgcatttcagctctatgacctggatcgcgatgggaagatctccaggcatgagatgctgcaggttctccgtctgatggttggggtacaggtgacagaagagcagctggagaacatcgctgaccgcacggtgcaggaggctgatgaagatggggatggggctgtgtccttcgtggagttcaccaagtccttagagaagatggacgttgagcaaaaaatgagcatccggatcctgaagtgactccgtttgtgccttgggcttgctcctgcaaccagtatctccttggaattcatccaaagcccccatggacgcatggacgcagggcgacaataaactgtattttcgtttctaactctatttagggccaagagaagaaagctggaaggatgtgtactaaagtctagctcagcagtccccaacctttttggcatcagggacagtttttccacggatgggtgacaggggatggttttgggatgattcaagtgcattacatttattgtgcactttatttctattatgattacattgtaatatataatgaaataattatacaactcaccataatgtagaatcagcaggagccctgagcttgttttcctgcaattagacggtcccatatgggagtgatgggagacagtgacagatcatcaggcattagattctcataaggagtgcacaatctagatcctttggtgtgcagttcacagtaggatttgggctcctatgataatctaatgccactgctgatctgacaggaggcagagctcaggcggtaatgcaagcaatggggagtggctgtaaatatagatgaagcttcagctcgcctgccgctcaccttgtgctgtgcagcccggttcctaacagaccacagaccccacaccaggtctatctcatttggtctcagagctgtgaatcagccagcaatattttagttgcaaatcactgaaaacccaactcaaagtgacttaagtcagaaagaaattttatgaattcaggtaattaaaaagtccagaagtatctgcctttaggcacagctggatccaagggcacaaatgatgtcatcaggctccagttattctccatctcccagctcagctttttctgtctgtaagcctgattttcaggaaggctctttcctagtgatggagatgaccaccatcagctccaggcttctatcctgctaacccagtaacccagtgggaagagatttacttattccaataattccaagtggagagtgtcattgacccgtttggggtctcatctctacttctaggggaatgaaacactctgagtggccaggcctgtgtcatgtgctaattcctagagccagggaaataaggtctgaggattcaggatggggtgaaaggtggttgcttaaaggaaaatgaaatacaattagcagaataaggggaaacgagtggtctgctctgctcgggcaaaacaagagatgcccattactgtgagggacccttgaagtctggactcttaaatgggtttttgctgatttcctgggtgcatgctaggatgatggggcttgatgcagtagggaagagacgatgtaaaaataataaacaatatataccttcctagagtgtgaatgca

SEQ ID NO: 112948 - DNA, 1898 bp, Homo sapiens
  Payload ID: 2100
  Gene Symbol: CPPED1
  Gene Name: calcineurin-like phosphoesterase domain containing 1
  Uniprot ID: Q9BRF8
  ENST ID: ENST00000261660
  CDS Start-End: 76-444
agcggttgttctgtgtgaagtcgcgcggcttccacccacgcagtgttctaagtgaaggccagaaactcgctcgccatgtcggctgcagaggcggggggtgttttccacagagccaggggcaggaccctggccgcgtttcccgcagaaaaggaaagcgaatggaaaggcccattctacttcatcctgggcgcagacccacagtttgggctgatcaaggcctggtccactggggactgtgacaatggcggtgacgaatgggaacaggagatccgtctaactgagcaagccgtccaggccatcaacaagctgaaccccaaacccaaattcttcgttctgtgcggcgacctcatccacgccatgccagctgggcagagacccccacgggctccgagtcgtggtggtcaccgccgagaaaattgttcaccgatactacagtctagatgagctgagtgagaaaggaatagaagacgatctcatggatttgatcaagaaaaaatgacgctccttcccgttcccgttcacttttcacttgcactatttttttattttgccagaaacagcagctgcacacaacctcttgctgaaatataaaaatagcccaggcaggtttgtgaatttatgtccttttgcataaatcagagagctggggccctgtcctgaattatattcaaaatagaactgcatttcctttaaaatggagcgaatgatcctggaaatcagtttttaaaatattagactatctctgcatggatgtttgaataaattctcctaatgctgtgtttctcaactccacttttgaattggattgtattctggttagcatatggtcaaagtctgcctatcgacctcaattccaatctgacagccaagtatgatctttgataattccttaaacaaactacacctgattgtattaaattgtggtcacgattcccaaaacgctaggcaaaacaaagttcatctcctttcctttccagcggaacgaacagctgtctcccttgttgtgagagccatgcagacttattttgacaaggagccaagtaggcaccatttactgttcaattctgagacttctgatgataggaacagaatgcagttgatacagctcggagcttaaatttgccttcctgggtgcctagaaaagtcacctttgcacataaattggccatttctgaaaatctcctccaagagactgaaaccaaagctctaaaacgccgcttcttcagtctctggggagcacgttgagttggttcacatccacattctggctgtgtagccactccacagatgggtggtctcttgggatcagaatgcccctccactcatgagactcttcattttgtccactttgacaggaaaagtgggaatgtatgcagagctctcaaaagaaacaaaaaaggccaaaacggtgccttcagccacatcctctgaattggccctgacttggactaaatgcactaatgcaaaatcccttgacaaaagcgcataggttatttcaaaccagcattgttttttatgtaacctgttttaccgcatcttctcagcagcttctgaccactgctcaattttctcctttacagccattgttctggtggacaaataacctaggtactccaaatcctggcaggaaaaatatacagcattatgaaacagcactcagtaatcctaaaatgatttccaaagctggttacacatgacctgcaaagtctattaaattaaaagactttctcattacagagtttagtcaacgtagcaaaaccatgggaaattaaatggaaagataattaaatatgtaaattcataaggaacaaaagacgagaagttaattatacaataggctggtgacaccagagttcattgttatgtgccacaagaaaattaaattttttaaaaaacta

SEQ ID NO: 112949 - DNA, 6273 bp, Homo sapiens
  Payload ID: 2100
  Gene Symbol: CPPED1
  Gene Name: calcineurin-like phosphoesterase domain containing 1
  Uniprot ID: Q9BRF8
  ENST ID: ENST00000381774
  CDS Start-End: 242-1186
tagacagtctccactcgccaggcgcgcaggtcgatcccagaggggccgctggcgcctccgctccgcccaggcagcactagtggcgccccgagccaccgggcccctccccgtcccgccccagtcccgccccgagatcaaagggcgtcgcccaaagcgggacaggtccagcggttgttctgtgtgaagtcgcgcggcttccacccacgcagtgttctaagtgaaggccagaaactcgctcgccatgtcggctgcagaggcggggggtgttttccacagagccaggggcaggaccctggccgcgtttcccgcagaaaaggaaagcgaatggaaaggcccattctacttcatcctgggcgcagacccacagtttgggctgatcaaggcctggtccactggggactgtgacaatggcggtgacgaatgggaacaggagatccgtctaactgagcaagccgtccaggccatcaacaagctgaaccccaaacccaaattcttcgttctgtgcggcgacctcatccacgccatgccagggaagccgtggcggacggagcagacggaggacctgaagcgagtgcttagggcagtggacagggccatcccactggtccttgtcagcggcaaccatgacattggcaacacccccacggccgagaccgtcgaggagttctgccggacttggggagatgactacttcagcttctgggtcgggggcgtcctgttcctggtcctcaactcccagttctacgagaacccctccaaatgccccagcctgaagcaggctcaggaccagtggctggacgagcagctgagcatcgcgaggcagcggcactgccagcatgccatcgtcttccagcacatcccgctgttcctggagagcatcgacgaggacgacgactactacttcaacctcagcaagtccactcggaagaagttggcagacaagttcatccacgcaggtgtcaaagtcgtgttctcaggccactaccacaggaatgccgggggtacctaccagaacctcgacatggtggtgtcatctgccattggatgccagctgggcagagacccccacgggctccgagtcgtggtggtcaccgccgagaaaattgttcaccgatactacagtctagatgagctgagtgagaaaggaatagaagacgatctcatggatttgatcaagaaaaaatgacgctccttcccgttcccgttcacttttcacttgcactatttttttattttgccagaaacagcagctgcacacaacctcttgctgaaatataaaaatagcccaggcaggtttgtgaatttatgtccttttgcataaatcagagagctggggccctgtcctgaattatattcaaaatagaactgcatttcctttaaaatggagcgaatgatcctggaaatcagtttttaaaatattagactatctctgcatggatgtttgaataaattctcctaatgctgtgtttctcaactccacttttgaattggattgtattctggttagcatatggtcaaagtctgcctatcgacctcaattccaatctgacagccaagtatgatctttgataattccttaaacaaactacacctgattgtattaaattgtggtcacgattcccaaaacgctaggcaaaacaaagttcatctcctttcctttccagcggaacgaacagctgtctcccttgttgtgagagccatgcagacttattttgacaaggagccaagtaggcaccatttactgttcaattctgagacttctgatgataggaacagaatgcagttgatacagctcggagcttaaatttgccttcctgggtgcctagaaaagtcacctttgcacataaattggccatttctgaaaatctcctccaagagactgaaaccaaagctctaaaacgccgcttcttcagtctctggggagcacgttgagttggttcacatccacattctggctgtgtagccactccacagatgggtggtctcttgggatcagaatgcccctccactcatgagactcttcattttgtccactttgacaggaaaagtgggaatgtatgcagagctctcaaaagaaacaaaaaaggccaaaacggtgccttcagccacatcctctgaattggccctgacttggactaaatgcactaatgcaaaatcccttgacaaaagcgcataggttatttcaaaccagcattgttttttatgtaacctgttttaccgcatcttctcagcagcttctgaccactgctcaattttctcctttacagccattgttctggtggacaaataacctaggtactccaaatcctggcaggaaaaatatacagcattatgaaacagcactcagtaatcctaaaatgatttccaaagctggttacacatgacctgcaaagtctattaaattaaaagactttctcattacagagtttagtcaacgtagcaaaaccatgggaaattaaatggaaagataattaaatatgtaaattcataaggaacaaaagacgagaagttaattatacaataggctggtgacaccagagttcattgttatgtgccacaagaaaattaaattttttaaaaaactagaacgctcttcttttagtgttttgctgaaatcctgttttgtatttgtttctttacaacaggtgtaggtataggaggtcaagaaaaggagttcggtaaagggcatagctaataacaaccacacattgggccaggcacagtggcttacgcctgtaatcccagcactttgggaggctgagacgggcagatcacctgagatcaggagtttgagaacagcctggccaacatggtgaaactccatctctactaaaaatacaaaaattagccaggcatgctggtgcacacctgtaatcccagctactcgggaggctgaggcaggagatcgctggaactcaggaggcagaggttgcagtgagccaagatcatgccactgcactccagcctgggcaacagagcaagactctgtctcaaaaaaaaaaaaaaaaaaccacacacacacacattgagacttgagatgtggtgacacttggatcataaacagagggcttcgattccaggatgggggttcctccagggggaaatgaaaaggagctctcactctgttcttacgtatgcacaatgctctgaattgtggcacatgggtttgcagaaggataatggagataattgaaagtaatgaaaatgaaaccaaatctccttccccaaaaacttaaaagaactgattcaaaagtaccccaagaatatgcaaagaaaagggaatcacatcaacagatgattggataaagaacatgtggtatgtatacataatggaatactattcagccactaaaaagaatgaaaccatgtcttttgcagcaacctggatggaactggaggctgttatcttaagtgaaataacttagaagtagaaagtcgaatacttcatgttctcactcataaatgggagctacataaagtgtacccatgaacatagagtgtggaacaaacattggagactcagaagggtgggaggagggtaagggatgagaaagtacctgatgggtacagtgtacacttttctggtgttggttgcaggaaaagcctggacttcaccacttcgcaatatatccgtgtaacaaaactgcacttgtacgccttatatttatacaaatttaattttttaaaagggaagagagaatcatattaatttctcaccactttttaagtaagcaaacagcagtatttcccagaggcaagaggttcagcaagaagtcaggaaatgtttttgtagataagcatctatcattctgatgggccatgactagtgtgttcacttgtaattcctttgcctttaaaaaaagagaatgatatcaaaaaataagtgccttatactgtgaaaaacgataaaaggacttcctgattctaagtgctatggttttgaatgtttattatgtgttttaagtgctttggctcagaaaggtgggggtcacgtggccaaggtcgcctaactcatcttggtggagaaagaacggatgtagatggcccaaggcttgagtccatgctccataacactgtcctgtcttggaaaacgtttctcagaggtgaaaggttgcaccagctcagccagtggcaacacactgagtacggtattcagcaccttggacagcgttagctggaggcccagggatttcctcccagctctgcaaagcctagaccagaccctgattgcaccaggttcagggggcagaagcttgtccaaagagcagatggttccagggggaggatttttactgggggagatttagaaaccgaactgaaccataatgagtcacgggacacagccctgtctgcagcagtaactgtccgcagctctagctgctccatgtctggagttaccaccacagggtgtaggaaaccaccagctgtctcaaggcaaggaatgtcacctaatgctcccctttccaattaatcactttaattggaggaaaaaacaaaaacacaaggacatgttacgggggaaggttttttaaagtgatctcaaattggattgcaaaggctcaagtgactttgggaatggggctggggagatgatcatttactttttacaataaataattttatctcacatctttagtcaagtttctcctaagtttggggagaatggggaaaaaatgtagtaagctttatgggactagcaacagaacgttttatcctattttgtgattttcagtattaagagattattgatcacttgcagagttacaaggcaagcactagtttaaatctgaattagactagggccattgaccttatatacctgtaaaagacactacggtgtatacaactgtagaaacaatatacacatagtagtttaatattacagtctgtattccaatgcagaatcttttgagaaaaggttgccaaaacatcatttgcatttacttgaacccttttttagacagaatcttgctctatcacccaggctggagtgcagtggtgtgatcacagctcactgcagccttgaactcttgggctcaaccaaccttcccacctcagcctcccaaattagctgggactataggctcgtgtcaccacatctaattttttatttttatatttgtggagttgaaggtcttgctctgttacccaggctggtcttgaactcctggccccaagcagtccttccaccttggcctcccaaagtgttgggattacaggcgttggccactgtacccagccttacttgaactcttaatacttattcccaagtggtacctaaaatggttttgtgcagtcacaatattaggtagcaatattatattgagctggaggaaaaagaagatttaggagtaaattgccaaggcaagttctgttaaaagctttctgtaatagacatcagggattttttttattcaggtaacctcaacagttttgattgcacatgtaacatagtacttgacaggtaatactgatttttataacttcataaaatattctcaagccatggaggagctcttatgtattttttaatgagtacacacacacacacacacacacacacacacacacacatatagtaaaagtggaggattcttttcttggaataatgatttctagcatttatctagaaaagattttgctgactaaattttccttttcctccagtggatttttaaacatcagtgcatgcacataaatacagattggatttttcctttaggctttatctatgtaaatgaagtcgattaaatgtgaataatcatgttacccttcattattctgaccattatgtttgagaagtagatttcttcactaaaggggctttgcagcacacttagaatgagtgagccactgtgcctctctagaaactggcttcttgtcatcatttcaacatccactcaaacgctcacccctgaaagtggccttcctgcttgatatggtttggctctgtgtctccacccaaattggtttggctctgtgtccccactgaaatctcatctcgaattgtaatccccataatccccatgtgtcaagggacggacctggtgggaggtaattggatcatggaggcagtttctcccatgctattcttgtgatagtgagttctcatgacactgatggttttgtgtttgatagctccttcacactctttctttcctgttgccatgtaagacatgcctgcttccccttccaccaggattgtaagtttcctgaggcctccccagccatgcggaactgtgagtctattaaatctcttttctttgtaaatta

SEQ ID NO: 112950 - DNA, 1993 bp, Homo sapiens
  Payload ID: 2100
  Gene Symbol: CPPED1
  Gene Name: calcineurin-like phosphoesterase domain containing 1
  Uniprot ID: Q9BRF8
  ENST ID: ENST00000433677
  CDS Start-End: 76-594
agcggttgttctgtgtgaagtcgcgcggcttccacccacgcagtgttctaagtgaaggccagaaactcgctcgccatgtcggctgcagaggcggggggtgttttccacagagccaggggcaggaccctggccgcgtttcccgcagaaaaggaaagcgaatggaaaggcccattctacttcatcctgggcgcagacccacagtttgggctgatcaaggcctggtccactggggactgtgacaatggcggtgacgaatgggaacaggagatccgtctaactgagcaagccgtccaggccatcaacaagctgaaccccaaacccaaattcttcgttctgtgcggcgacctcatccacgccatgccaggtgtcaaagtcgtgttctcaggccactaccacaggaatgccgggggtacctaccagaacctcgacatggtggtgtcatctgccattggatgccagctgggcagagacccccacgggctccgagtcgtggtggtcaccgccgagaaaattgttcaccgatactacagtctagatgagctgagtgagaaaggaatagaagacgatctcatggatttgatcaagaaaaaatgacgctccttcccgttcccgttcacttttcacttgcactatttttttattttgccagaaacagcagctgcacacaacctcttgctgaaatataaaaatagcccaggcaggtttgtgaatttatgtccttttgcataaatcagagagctggggccctgtcctgaattatattcaaaatagaactgcatttcctttaaaatggagcgaatgatcctggaaatcagtttttaaaatattagactatctctgcatggatgtttgaataaattctcctaatgctgtgtttctcaactccacttttgaattggattgtattctggttagcatatggtcaaagtctgcctatcgacctcaattccaatctgacagccaagtatgatctttgataattccttaaacaaactacacctgattgtattaaattgtggtcacgattcccaaaacgctaggcaaaacaaagttcatctcctttcctttccagcggaacgaacagctgtctcccttgttgtgagagccatgcagacttattttgacaaggagccaagtaggcaccatttactgttcaattctgagacttctgatgataggaacagaatgcagttgatacagctcggagcttaaatttgccttcctgggtgcctagaaaagtcacctttgcacataaattggccatttctgaaaatctcctccaagagactgaaaccaaagctctaaaacgccgcttcttcagtctctggggagcacgttgagttggttcacatccacattctggctgtgtagccactccacagatgggtggtctcttgggatcagaatgcccctccactcatgagactcttcattttgtccactttgacaggaaaagtgggaatgtatgcagagctctcaaaagaaacaaaaaaggccaaaacggtgccttcagccacatcctctgaattggccctgacttggactaaatgcactaatgcaaaatcccttgacaaaagcgcataggttatttcaaaccagcattgttttttatgtaacctgttttaccgcatcttctcagcagcttctgaccactgctcaattttctcctttacagccattgttctggtggacaaataacctaggtactccaaatcctggcaggaaaaatatacagcattatgaaacagcactcagtaatcctaaaatgatttccaaagctggttacacatgacctgcaaagtctattaaattaaaagactttctcattacagagtttagtcaacgtagcaaaaccatgggaaattaaatggaaagataattaaatatgtaaattcataaggaacaaaagacgagaagttaattatacaataggctggtgacaccagagttcattgttatgtgccacaagaaaattaaattttttaaaaaacta

SEQ ID NO: 112951 - DNA, 3696 bp, Homo sapiens
  Payload ID: 2101
  Gene Symbol: CALCR
  Gene Name: calcitonin receptor
  ENST ID: ENST00000359558
  CDS Start-End: 301-1827
agcttcacagctgggagagcgcaggaaggcgccgggaaggaaagccagcccaccagcgtctgggtgggctgcgccgcgcggctggcggaccttcccgggttggagaagtgcgcacgtccgcacctcaccctgcggctgacatctcctgcccaggagatgggcgctgaagcttgagcgcctgagtccctggagccacacctgcgaacaccctttgcttctattgagctgtgcccagccgcccagtgacagaattccagaataaatgattcccactgatccacccacttttgccaccccaggatgcaattttctggagagaagattagtggacaaagagatcttcaaaaatcaaaaatgaggttcacatttacaagccggtgcttggcactgtttcttcttctaaatcacccaaccccaattcttcctgccttttcaaatcaaacctatccaacaatagagcccaagccatttctttacgtcgtaggacgaaagaagatgatggatgcacagtacaaatgctatgaccgaatgcagcagttacccgcataccaaggagaaggtccatattgcaatcgcacctgggatggatggctgtgctgggatgacacaccggctggagtattgtcctatcagttctgcccagattattttccggattttgatccatcagaaaaggttacaaaatactgtgatgaaaaaggtgtttggtttaaacatcctgaaaacaatcgaacctggtccaactatactatgtgcaatgctttcactcctgagaaactgaagaatgcatatgttctgtactatttggctattgtgggtcattctttgtcaattttcaccctagtgatttccctggggattttcgtgtttttcagaaaattgacaactatttttcctttgaattggaaatataggaaggcattgagccttggctgccaaagggtaaccctgcacaagaacatgtttcttacttacattctgaattctatgattatcatcatccacctggttgaagtagtacccaatggagagctcgtgcgaagggacccggtgagctgcaagattttgcattttttccaccagtacatgatggcctgcaactatttctggatgctctgtgaagggatctatcttcatacactcattgtcgtggctgtgtttactgagaagcaacgcttgcggtggtattatctcttgggctgggggttcccgctggtgccaaccactatccatgctattaccagggccgtgtacttcaatgacaactgctggctgagtgtggaaacccatttgctttacataatccatggacctgtcatggcggcacttgtggtcaatttcttctttttgctcaacattgtccgggtgcttgtgaccaaaatgagggaaacccatgaggcggaatcccacatgtacctgaaggctgtgaaggccaccatgatccttgtgcccctgctgggaatccagtttgtcgtctttccctggagaccttccaacaagatgcttgggaagatatatgattacgtgatgcactctctgattcatttccagggcttctttgttgcgaccatctactgcttctgcaacaatgaggtccaaaccaccgtgaagcgccaatgggcccaattcaaaattcagtggaaccagcgttgggggaggcgcccctccaaccgctctgctcgcgctgcagccgctgctgcggaggctggcgacatcccaatttacatctgccatcaggagctgaggaatgaaccagccaacaaccaaggcgaggagagtgctgagatcatccctttgaatatcatagagcaagagtcatctgcttgaatgtgaagcaaacacagcatcgtgatcactgagccatcatttcctgggagaaagaccatgcatttaaagtattctccatcctcccaggaaccgaacatatcatttgtgaagaattattcagtgaatttgtccattgtaaatctgaagaaagttattcttggtactgttgctttgggagacagtctaggaatggagtctcccactgcaacttgtgaactccatcattcatccaggactgagatgcaaatgtcacagtaatgcaagcaaagtatcaaagaaaaacaatgaaattgacctagttcagatacagggtgctccttgtcaatactgagccatttatacctttgaaatattaaaatcactgtcaatatttttatttttaactctggattttgaattagattatttctgtatttggctatggatctgatttttaatttttttaaatttcagtcaattctgatgttactgagatgttttaccatccttacaatgtaaaccacatgaactacgtgacctctgcaagacaaagcggctttctaatagagagattagtaaatatgtgaagaaaaagacctgcatttggcaggaagatgtatgctttgaatgcaaaagaaatttagagtcaatttgctgaaaacattacatgctcagcttggttttggacaagcctgtccattgggcaggacctagctgttgtaaagaattggtcttaatgttgaatgtattttggttgctgatgtttataaactgagaggtcacaaagaatctatcactaaaaatttttacaaaactgccaaaaatataattcttagtggaagacaatactccctttaaagagagtttgccactcccctaaactccaggatttataaagcaaattactccaaggtttataaagcagattacctcttgcccttgggtgctatctagcagtaaaagataaatttgttgaatattggtaattaaaagactccacataagtccattaactgctttccacccagcttcaaagcttaaaaagagctcaggcttttccaggaagatccaggagggctaattagaaatcaacttgtggttgaccgcttgtttcttgttattaccaaaacaggaggggaaaaaattaactgctccaaatttaaccataaatcaattcatgtttaacgtttctcattaaaatccagtattatattatcatatctctctttacttcccagtataagatttttgaaaatcctgaataaaccagtatcgttactggcacctgaaattaatttgtgaatttgcaacagtaatcagagttaccattatttaatttgtatgctaaatgaggaggtacattgaaaccctccaaatctccagtctcatctatgtcatattttgccactgcctttcagaagtgatttagttgtggaaagataataaattgatttgttatggttacatatttagcgcacccagagaaaattaattatatttctacagagaaaatgaatttgggatactaaagtagtttaagtctcctttactgaatgtaagggggggatcgaaaagaaggtatttttccaatcacagtgttatgtagtattgttctatttttgtttacaaacatggaaaacagagtatttctggcagctgtggtacaaatgtgataatatattgctaaaatattttagatgttattatgctaatatagtaggggttgaagaaaacaaaatagcttattatagaattgcacatagttctgcccaaattatgtgaaatgcttatgcttgtgtatatgtataaattaatacagagtacgttaaaagcaaaaagatgtatatttgcatatttttctaaagaaatatattattcatcttttcattc

SEQ ID NO: 112952 - DNA, 1502 bp, Homo sapiens
  Payload ID: 2101
  Gene Symbol: CALCR
  Gene Name: calcitonin receptor
  ENST ID: ENST00000360249
  CDS Start-End: 33-521
ttctaggacaaagagatcttcaaaaatcaaaaatgaggttcacatttacaagccggtgcttggcactgtttcttcttctaaatcacccaaccccaattcttcctgccttttcaaatcaaacctatccaacaatagagcccaagccatttctttacgtcgtaggacgaaagaagatgatggatgcacagtacaaatgctatgaccgaatgcagcagttacccgcataccaaggagaaggtccatattgcaatcgcacctgggatggatggctgtgctgggatgacacaccggctggagtattgtcctatcagttctgcccagattattttccggattttgatccatcagaaaaggttacaaaatactgtgatgaaaaaggtgtttggtttaaacatcctgaaaacaatcgaacctggtccaactatactatgtgcaatgctttcactcctgagaaactgaagaatgcatatgttctgtactatttggctattgtgggtcattcttgtcaattttcaccctagtgatttccctggggattttcgtgtttttcaggagccttggctgccaaagggtaaccctgcacaagaacatgtttcttacttacattctgaattctatgattatcatcatccacctggttgaagtagtacccaatggagagctcgtgcgaagggacccggtgagctgcaagattttgcattttttccaccagtacatgatggcctgcaactatttctggatgctctgtgaagggatctatcttcatacactcattgtcgtggctgtgtttactgagaagcaacgcttgcggtggtattatctcttgggctgggggttcccgctggtgccaaccactatccatgctattaccagggccgtgtacttcaatgacaactgctggctgagtgtggaaacccatttgctttacataatccatggacctgtcatggcggcacttgtggtcaatttcttctttttgctcaacattgtccgggtgcttgtgaccaaaatgagggaaacccatgaggcggaatcccacatgtacctgaaggctgtgaaggccaccatgatccttgtgcccctgctgggaatccagtttgtcgtctttccctggagaccttccaacaagatgcttgggaagatatatgattacgtgatgcactctctgattcatttccagggcttctttgttgcgaccatctactgcttctgcaacaatgaggtccaaaccaccgtgaagcgccaatgggcccaattcaaaattcagtggaaccagcgttgggggaggcgcccctccaaccgctctgctcgcgctgcagccgctgctgcggaggctggcgacatcccaatttacatctgccatcaggagctgaggaatgaaccagccaacaaccaaggcgaggagagtgctgagatcatccctttgaatatcatagagcaagagtcatctgcttgaatgtgaagcaaacacagcatcgtgatcactgagccatcatttcctg

SEQ ID NO: 112953 - DNA, 1774 bp, Homo sapiens
  Payload ID: 2101
  Gene Symbol: CALCR
  Gene Name: calcitonin receptor
  ENST ID: ENST00000394441
  CDS Start-End: 317-1741
agttataagagacaggaataccagtgagaagtatgagagagtgggtgggagataatgtttagaatctcttttgctgcccgcaatttatgaaaatggcttgaaaatatttatggtcaaagaccgaaatatttcttcaaagaagattagctttgctccattaaaagtaatgagtagaaatattaaaaaaaaaaaaagttttaagtacctgagtatcttgccagcaactgaccaccactgctaaaagtgaggagagacacagctttcatcattgggactgcagtttatttcaggacaaagagatcttcaaaaatcaaaaatgaggttcacatttacaagccggtgcttggcactgtttcttcttctaaatcacccaaccccaattcttcctgccttttcaaatcaaacctatccaacaatagagcccaagccatttctttacgtcgtaggacgaaagaagatgatggatgcacagtacaaatgctatgaccgaatgcagcagttacccgcataccaaggagaaggtccatattgcaatcgcacctgggatggatggctgtgctgggatgacacaccggctggagtattgtcctatcagttctgcccagattattttccggattttgatccatcagaaaaggttacaaaatactgtgatgaaaaaggtgtttggtttaaacatcctgaaaacaatcgaacctggtccaactatactatgtgcaatgctttcactcctgagaaactgaagaatgcatatgttctgtactatttggctattgtgggtcattctttgtcaattttcaccctagtgatttccctggggattttcgtgtttttcaggagccttggctgccaaagggtaaccctgcacaagaacatgtttcttacttacattctgaattctatgattatcatcatccacctggttgaagtagtacccaatggagagctcgtgcgaagggacccggtgagctgcaagattttgcattttttccaccagtacatgatggcctgcaactatttctggatgctctgtgaagggatctatcttcatacactcattgtcgtggctgtgtttactgagaagcaacgcttgcggtggtattatctcttgggctgggggttcccgctggtgccaaccactatccatgctattaccagggccgtgtacttcaatgacaactgctggctgagtgtggaaacccatttgctttacataatccatggacctgtcatggcggcacttgtggtcaatttcttctttttgctcaacattgtccgggtgcttgtgaccaaaatgagggaaacccatgaggcggaatcccacatgtacctgaaggctgtgaaggccaccatgatccttgtgcccctgctgggaatccagtttgtcgtctttccctggagaccttccaacaagatgcttgggaagatatatgattacgtgatgcactctctgattcatttccagggcttctttgttgcgaccatctactgcttctgcaacaatgaggtccaaaccaccgtgaagcgccaatgggcccaattcaaaattcagtggaaccagcgttgggggaggcgcccctccaaccgctctgctcgcgctgcagccgctgctgcggaggctggcgacatcccaatttacatctgccatcaggagctgaggaatgaaccagccaacaaccaaggcgaggagagtgctgagatcatccctttgaatatcatagagcaagagtcatctgcttgaatgtgaagcaaacacagcatcgtgatcactgag

SEQ ID NO: 112954 - DNA, 1741 bp, Homo sapiens
  Payload ID: 2101
  Gene Symbol: CALCR
  Gene Name: calcitonin receptor
  ENST ID: ENST00000426151
  CDS Start-End: 284-1708
agcttcacagctgggagagcgcaggaaggcgccgggaaggaaagccagcccaccagcgtctgggtgggctgcgccgcgcggctggcggaccttcccgggttggagaagtgcgcacgtccgcacctcaccctgcggctgacatctcctgcccaggagatgggcgctgaagcttgagcgcctgagtccctggagccacacctgcgaacaccctttgcttctattgagctgtgcccagccgcccagtgacagaattccaggacaaagagatcttcaaaaatcaaaaatgaggttcacatttacaagccggtgcttggcactgtttcttcttctaaatcacccaaccccaattcttcctgccttttcaaatcaaacctatccaacaatagagcccaagccatttctttacgtcgtaggacgaaagaagatgatggatgcacagtacaaatgctatgaccgaatgcagcagttacccgcataccaaggagaaggtccatattgcaatcgcacctgggatggatggctgtgctgggatgacacaccggctggagtattgtcctatcagttctgcccagattattttccggattttgatccatcagaaaaggttacaaaatactgtgatgaaaaaggtgtttggtttaaacatcctgaaaacaatcgaacctggtccaactatactatgtgcaatgctttcactcctgagaaactgaagaatgcatatgttctgtactatttggctattgtgggtcattctttgtcaattttcaccctagtgatttccctggggattttcgtgtttttcaggagccttggctgccaaagggtaaccctgcacaagaacatgtttcttacttacattctgaattctatgattatcatcatccacctggttgaagtagtacccaatggagagctcgtgcgaagggacccggtgagctgcaagattttgcattttttccaccagtacatgatggcctgcaactatttctggatgctctgtgaagggatctatcttcatacactcattgtcgtggctgtgtttactgagaagcaacgcttgcggtggtattatctcttgggctgggggttcccgctggtgccaaccactatccatgctattaccagggccgtgtacttcaatgacaactgctggctgagtgtggaaacccatttgctttacataatccatggacctgtcatggcggcacttgtggtcaatttcttctttttgctcaacattgtccgggtgcttgtgaccaaaatgagggaaacccatgaggcggaatcccacatgtacctgaaggctgtgaaggccaccatgatccttgtgcccctgctgggaatccagtttgtcgtctttccctggagaccttccaacaagatgcttgggaagatatatgattacgtgatgcactctctgattcatttccagggcttctttgttgcgaccatctactgcttctgcaacaatgaggtccaaaccaccgtgaagcgccaatgggcccaattcaaaattcagtggaaccagcgttgggggaggcgcccctccaaccgctctgctcgcgctgcagccgctgctgcggaggctggcgacatcccaatttacatctgccatcaggagctgaggaatgaaccagccaacaaccaaggcgaggagagtgctgagatcatccctttgaatatcatagagcaagagtcatctgcttgaatgtgaagcaaacacagcatcgtgatcactgag

SEQ ID NO: 112955 - DNA, 1523 bp, Homo sapiens
  Payload ID: 2101
  Gene Symbol: CALCR
  Gene Name: calcitonin receptor
  Uniprot ID: P30988
  ENST ID: ENST00000423724
  CDS Start-End: 1-873
atgaggttcacatttacaagccggtgcttggcactgtttcttcttctaaatcacccaaccccaattcttcctgccttttcaaatcaaacctatccaacaatagagcccaagccatttctttacgtcgtaggacgaaagaagatgatggatgcacagtacaaatgctatgaccgaatgcagcagttacccgcataccaaggagaaggtccatattgcaatcgcacctgggatggatggctgtgctgggatgacacaccggctggagtattgtcctatcagttctgcccagattattttccggattttgatccatcagaaaaggttacaaaatactgtgatgaaaaaggtgtttggtttaaacatcctgaaaacaatcgaacctggtccaactatactatgtgcaatgctttcactcctgagaaactgaagaatgcatatgttctgtactatttggctattgtgggtcattctttgtcaattttcaccctagtgatttccctggggattttcgtgtttttcagaaaattgacaactatttttcctttgaattggaaatataggaaggcattgagccttggctgccaaagggtaaccctgcacaagaacatgtttcttacttacattctgaattctatgattatcatcatccacctggttgaagtagtacccaatggagagctcgtgcgaagggacccggtgagctgcaagattttgcattttttccaccagtacatgatggcctgcaactatttctggatgctctgtgaagggatctatcttcatacactcattgtcgtggctgtgtttactgagaagcaacgcttgcggtggtattatctcttgggctgggccccagccttccacagagactaatctttcctttccctggccttctcatccggttcccgctggtgccaaccactatccatgctattaccagggccgtgtacttcaatgacaactgctggctgagtgtggaaacccatttgctttacataatccatggacctgtcatggcggcacttgtggtcaatttcttctttttgctcaacattgtccgggtgcttgtgaccaaaatgagggaaacccatgaggcggaatcccacatgtacctgaaggctgtgaaggccaccatgatccttgtgcccctgctgggaatccagtttgtcgtctttccctggagaccttccaacaagatgcttgggaagatatatgattacgtgatgcactctctgattcatttccagggcttctttgttgcgaccatctactgcttctgcaacaatgaggtccaaaccaccgtgaagcgccaatgggcccaattcaaaattcagtggaaccagcgttgggggaggcgcccctccaaccgctctgctcgcgctgcagccgctgctgcggaggctggcgacatcccaatttacatctgccatcaggagctgaggaatgaaccagccaacaaccaaggcgaggagagtgctgagatcatccctttgaatatcatagagcaagagtcatctgcttga

SEQ ID NO: 112956 - DNA, 3626 bp, Homo sapiens
  Payload ID: 2101
  Gene Symbol: CALCR
  Gene Name: calcitonin receptor
  ENST ID: ENST00000421592
  CDS Start-End: 290-1762
gggctgcgccgcgcggctggcggaccttcccgggttggagaagtgcgcacgtccgcacctcaccctgcggctgacatctcctgcccaggagatgggcgctgaagcttgagcgcctgagtccctggagccacacctgcgaacaccctttgcttctattgagctgtgcccagccgcccagtgacagaattccagaataaatgattcccactgatccacccacttttgccaccccaggatgcaattttctggagagaagattagtggacaaagagatcttcaaaaatcaaaaatgaggttcacatttacaagccggtgcttggcactgtttcttcttctaaatcacccaaccccaattcttcctgccttttcaaatcaaacctatccaacaatagagcccaagccatttctttacgtcgtaggacgaaagaagatgatggatgcacagtacaaatgctatgaccgaatgcagcagttacccgcataccaaggagaaggtccatattgcaatcgcacctgggatggatggctgtgctgggatgacacaccggctggagtattgtcctatcagttctgcccagattattttccggattttgatccatcagaaaaggttacaaaatactgtgatgaaaaaggtgtttggtttaaacatcctgaaaacaatcgaacctggtccaactatactatgtgcaatgctttcactcctgagaaactgaagaatgcatatgttctgtactatttggctattgtgggtcattctttgtcaattttcaccctagtgatttccctggggattttcgtgtttttcagaaaattgacaactatttttcctttgaattggaaatataggaaggcattgagccttggctgccaaagggtaaccctgcacaagaacatgtttcttacttacattctgaattctatgattatcatcatccacctggttgaagtagtacccaatggagagctcgtgcgaagggacccggtgagctgcaagattttgcattttttccaccagtacatgatggcctgcaactatttctggatgctctgtgaagggatctatcttcatacactcattgtcgtggctgtgtttactgagaagcaacgcttgcggtggtattatctcttgggctgggggttcccgctggtgccaaccactatccatgctattaccagggccgtgtacttcaatgacaactgctggctgagtgtggaaacccatttgctttacataatccatggacctgtcatggcggcacttgtggtcaatttcttctttttgctcaacattgtccgggtgcttgtgaccaaaatgagggaaacccatgaggcggaatcccacatgtacctgaaggctgtgaaggccaccatgatccttgtgcccctgctgggaatccagtttgtcgtctttccctggagaccttccaacaagatgcttgggaagatatatgattacgtgatgcactctctgattcatttccagggcttctttgttgcgaccatctactgcttctgcaacaatgaggtccaaaccaccgtgaagcgccaatgggcccaattcaaaattcagtggaaccagcgttgggggaggcgcccctccaaccgctctgctcgcgctgcagccgctgctgcggaggctggcgacatcccaatttacatctgccatcaggagctgaggaatgaaccagccaacaaccaaggcgaggagagtgctgagatcatccctttgaatatcatagagcaagagtcatctgcttgaatgtgaagcaaacacagcatcgtgatcactgagccatcatttcctgggagaaagaccatgcatttaaagtattctccatcctcccaggaaccgaacatatcatttgtgaagaattattcagtgaatttgtccattgtaaatctgaagaaagttattcttggtactgttgctttgggagacagtctaggaatggagtctcccactgcaacttgtgaactccatcattcatccaggactgagatgcaaatgtcacagtaatgcaagcaaagtatcaaagaaaaacaatgaaattgacctagttcagatacagggtgctccttgtcaatactgagccatttatacctttgaaatattaaaatcactgtcaatatttttatttttaactctggattttgaattagattatttctgtatttggctatggatctgatttttaatttttttaaatttcagtcaattctgatgttactgagatgttttaccatccttacaatgtaaaccacatgaactacgtgacctctgcaagacaaagcggctttctaatagagagattagtaaatatgtgaagaaaaagacctgcatttggcaggaagatgtatgctttgaatgcaaaagaaatttagagtcaatttgctgaaaacattacatgctcagcttggttttggacaagcctgtccattgggcaggacctagctgttgtaaagaattggtcttaatgttgaatgtattttggttgctgatgtttataaactgagaggtcacaaagaatctatcactaaaaatttttacaaaactgccaaaaatataattcttagtggaagacaatactccctttaaagagagtttgccactcccctaaactccaggatttataaagcaaattactccaaggtttataaagcagattacctcttgcccttgggtgctatctagcagtaaaagataaatttgttgaatattggtaattaaaagactccacataagtccattaactgctttccacccagcttcaaagcttaaaaagagctcaggcttttccaggaagatccaggagggctaattagaaatcaacttgtggttgaccgcttgtttcttgttattaccaaaacaggaggggaaaaaattaactgctccaaatttaaccataaatcaattcatgtttaacgtttctcattaaaatccagtattatattatcatatctctctttacttcccagtataagatttttgaaaatcctgaataaaccagtatcgttactggcacctgaaattaatttgtgaatttgcaacagtaatcagagttaccattatttaatttgtatgctaaatgaggaggtacattgaaaccctccaaatctccagtctcatctatgtcatattttgccactgcctttcagaagtgatttagttgtggaaagataataaattgatttgttatggttacatatttagcgcacccagagaaaattaattatatttctacagagaaaatgaatttgggatactaaagtagtttaagtctcctttactgaatgtaagggggggatcgaaaagaaggtatttttccaatcacagtgttatgtagtattgttctatttttgtttacaaacatggaaaacagagtatttctggcagctgtggtacaaatgtgataatatattgctaaaatattttagatgttattatgctaatatagtaggggttgaagaaaacaaaatagcttattatagaattgcacatagttctgcccaaattatgtgaaatgcttatgcttgtgtatatgtataaattaatacagagtacgttaaaagcaaaaagatgtatatttgcatatttttctaaagaaatatattattcatctttt

SEQ ID NO: 112957 - DNA, 1475 bp, Homo sapiens
  Payload ID: 2101
  Gene Symbol: CALCR
  Gene Name: calcitonin receptor
  Uniprot ID: P30988
  ENST ID: ENST00000415529
  CDS Start-End: 1-825
atgaggttcacatttacaagccggtgcttggcactgtttcttcttctaaatcacccaaccccaattcttcctgccttttcaaatcaaacctatccaacaatagagcccaagccatttctttacgtcgtaggacgaaagaagatgatggatgcacagtacaaatgctatgaccgaatgcagcagttacccgcataccaaggagaaggtccatattgcaatcgcacctgggatggatggctgtgctgggatgacacaccggctggagtattgtcctatcagttctgcccagattattttccggattttgatccatcagaaaaggttacaaaatactgtgatgaaaaaggtgtttggtttaaacatcctgaaaacaatcgaacctggtccaactatactatgtgcaatgctttcactcctgagaaactgaagaatgcatatgttctgtactatttggctattgtgggtcattctttgtcaattttcaccctagtgatttccctggggattttcgtgtttttcaggagccttggctgccaaagggtaaccctgcacaagaacatgtttcttacttacattctgaattctatgattatcatcatccacctggttgaagtagtacccaatggagagctcgtgcgaagggacccggtgagctgcaagattttgcattttttccaccagtacatgatggcctgcaactatttctggatgctctgtgaagggatctatcttcatacactcattgtcgtggctgtgtttactgagaagcaacgcttgcggtggtattatctcttgggctgggccccagccttccacagagactaatctttcctttccctggccttctcatccggttcccgctggtgccaaccactatccatgctattaccagggccgtgtacttcaatgacaactgctggctgagtgtggaaacccatttgctttacataatccatggacctgtcatggcggcacttgtggtcaatttcttctttttgctcaacattgtccgggtgcttgtgaccaaaatgagggaaacccatgaggcggaatcccacatgtacctgaaggctgtgaaggccaccatgatccttgtgcccctgctgggaatccagtttgtcgtctttccctggagaccttccaacaagatgcttgggaagatatatgattacgtgatgcactctctgattcatttccagggcttctttgttgcgaccatctactgcttctgcaacaatgaggtccaaaccaccgtgaagcgccaatgggcccaattcaaaattcagtggaaccagcgttgggggaggcgcccctccaaccgctctgctcgcgctgcagccgctgctgcggaggctggcgacatcccaatttacatctgccatcaggagctgaggaatgaaccagccaacaaccaaggcgaggagagtgctgagatcatccctttgaatatcatagagcaagagtcatctgcttga

SEQ ID NO: 112958 - DNA, 5155 bp, Homo sapiens
  Payload ID: 2102
  Gene Symbol: CALCRL
  Gene Name: calcitonin receptor-like
  Uniprot ID: Q16602
  ENST ID: ENST00000392370
  CDS Start-End: 715-2100
acacagcctatgatctctctctgttcaggctgcttcttgctcttgtctcacaataagaaaggagtgctgctttcctggggtatgctatttgagaaagaaagtaacctaacactaactgcaggcggggtcagagtgatgtaacaggaagctctgatgtttcccttctgctgctgatcacttacaatctgacaacacttacaatctactcagaacaacctctctctctccagcagagagtgtcacctcctgctttaggaccatcaagctctgctaactgaatctcatcctaattgcaggatcacattgcaaagctttcactctttcccaccttgcttgtgggtaaatctcttctgcggaatctcagaaagtaaagttccatcctgagaatatttcacaaagaatttccttaagagctggactgggtcttgacccctgaatttaagaaattcttaaagacaatgtcaaatatgatccaagagaaaatgtgatttgagactggagacaattgtgcatatcgtctaataataaaaacccatactagcctatagaaaacaatatttgaaagattgctaccactaaaaagaaaactactacaacttgacaagactgctgcaaacttcaatttgtcaaccacaacttgacaaggttgctataaaacaagattgctacaacttctagtttatgttatacagcatatttcattttggcttaatgatggagaaaaagtgtaccctgtattttctggttctcttgcctttttttatgattcttgttacagcagaattagaagagagtcctgaggactcaattcagttgggagttactagaaataaaatcatgacagctcaatatgaatgttaccaaaagattatgcaagaccccattcaacaagcagaaggcgtttactgcaacagaacctgggatggatggctctgctggaacgatgttgcagcaggaactgaatcaatgcagctctgccctgattactttcaggactttgatccatcagaaaaagttacaaagatctgtgaccaagatggaaactggtttagacatccagcaagcaacagaacatggacaaattatacccagtgtaatgttaacacccacgagaaagtgaagactgcactaaatttgttttacctgaccataattggacacggattgtctattgcatcactgcttatctcgcttggcatattcttttatttcaagagcctaagttgccaaaggattaccttacacaaaaatctgttcttctcatttgtttgtaactctgttgtaacaatcattcacctcactgcagtggccaacaaccaggccttagtagccacaaatcctgttagttgcaaagtgtcccagttcattcatctttacctgatgggctgtaattacttttggatgctctgtgaaggcatttacctacacacactcattgtggtggccgtgtttgcagagaagcaacatttaatgtggtattattttcttggctggggatttccactgattcctgcttgtatacatgccattgctagaagcttatattacaatgacaattgctggatcagttctgatacccatctcctctacattatccatggcccaatttgtgctgctttactggtgaatctttttttcttgttaaatattgtacgcgttctcatcaccaagttaaaagttacacaccaagcggaatccaatctgtacatgaaagctgtgagagctactcttatcttggtgccattgcttggcattgaatttgtgctgattccatggcgacctgaaggaaagattgcagaggaggtatatgactacatcatgcacatccttatgcacttccagggtcttttggtctctaccattttctgcttctttaatggagaggttcaagcaattctgagaagaaactggaatcaatacaaaatccaatttggaaacagcttttccaactcagaagctcttcgtagtgcgtcttacacagtgtcaacaatcagtgatggtccaggttatagtcatgactgtcctagtgaacacttaaatggaaaaagcatccatgatattgaaaatgttctcttaaaaccagaaaatttatataattgaaaatagaaggatggttgtctcactgttttgtgcttctcctaactcaaggacttggacccatgactctgtagccagaagacttcaatattaaatgactttttgaatgtcataaagaagagccttcacatgaaattagtagtgtgttgataagagtgtaacatccagctctatgtgggaaaaaagaaatcctggtttgtaatgtttgtcagtaaatactcccactatgcctgatgtgacgctactaacctgacatcaccaagtgtggaattggagaaaagcacaatcaacttttctgagctggtgtaagccagttccagcacaccattgcatgaattcacaaacaaatggctgtaaaactaaacatacatgttgggcatgattctacccttattgccccaagagacctagctaaggtctataaacatgaagggaaaattagcttttagttttaaaactctttatcccatcttgattggggcagttgactttttttttgcccagagtgccgtagtcctttttgtaactaccctctcaaatggacaataccagaagtgaattatccctgctggctttcttttctctatgaaaagcaactgagtacaattgttatgatctactcatttgctgacacatcagttatatcttgtggcatatccattgtggaaactggatgaacaggatgtataatatgcaatcctacttctatatcattaggaaaacatcttagttgatgctacaaaacaccttgtcaacctcttcctgtcttaccaaacagtgggagggaattcctagctgtaaatataaattttgtcccttccatttctactgtataaacaaattagcaatcattttatataaagaaaatcaatgaaggatttcttattttcttggaattttgtaaaaagaaattgtgaaaaatgagcttgtaaatactccattattttattttatagtctcaaatcaaatacatacaacctatgtaatttttaaagcaaatatataatgcaacaatgtgtgtatgttaatatctgatactgtatctgggctgattttttaaataaaatagagtctggaatgctatatttggtaaatattttaaagacaaccagatgccagcatcagaagtctgtttgagaactaagagaacagaaacatctatcataagatatatttattttaaaaacacaaggtcactattttattgaatatatttgttttgataactcataccttaataataggtgtgtttgacatatttcttttttcattttgacaatgaactcacattctaatccagaaattttaaacaactactgtgataaataccaatctgctacttttatagattttaccccattaaaatattactttactgacttttactatgtgaagatatatagctttggaaatgtcccaggctattcaagaaatataaaaaactagaaggatactatatataccatatacaatgctttaatattttaatagagctactgtatataatacaaattagggaaatacttgaatatatcattgagaaaaaattattgtcagatcttactgaattattgtcagactttattaaataaagatagaagaaaaccttgctaatgaattaaagtgaaatttgcatgggattcagtttctctaatgttattttccgctgaaatctctaaagaacaagaatgacttcaattagtaaaagtcaattttgggaaaagtcatgggtatctgttttttaagtgtgtcaatctgattaaaatggatgaaacaaattactcatcataagttgtttcttaagctgtcaatatgtcaatagatggtgagttcagaacttatttcaaattgctaagacaaattatctaaattcgtaagaattaacatatagaatggtctggtcagtacatttataatttatctatgcatgaaaaagtattgttttgtttgaaacatgaatttcatagcaagctgccatagaaaggaacgcaggctgttctagaccttcaactgcctaaattatacaaaaattcattttaataaactcaattattagctatttattattcaaagacccatatttaaatcctttgctgaccatgttgacatatatcagccttcttctagacaaactgtcaactctcaaccatcttgacagtagaagtgacagtaaaaaatgttgaatgatcagagattatattaaaataaacatgtaattttcaagtatttttgttgtgcttttataatattaattctagatcagatttattttatagccagggtttgtctgttgtagagtcttgaggcgtagcagtcattcatgattaatcactgttagttttgtacccatatatttttagaatagttttaaatgttagatttctcaaaagctaaatgctacttaatatctttgtatcatactcataaagcaaagtaaatctgacactttttttaaagcaaacttctttgctgtcaaaaaaataaatttggggaaatttctagcttttaaaatgtagatctgcattttactgtgattacttgtgaaagtcatattttaattttctaaattctaatttgtcattttatttcctaaagttaatttccaatgcatttattcataaaatattcattctggaatgcagtgtttgtttaaatgtaatccaatgtatatagaattagtggtggctgtagtgctgtatttattgcttataattttttttaaatgtgaacttacttttaattttctcttggttttaatctgctagtagaaaccactagttatctgtaaaaatatattcaagatattctgatcaattataacaatttatgttatgcctagagtatatctctattttttgattgtatgaaaatattaaagttatgagttaaagtttattttcactgatatttactacagtgccaaataatctaatttataaacataattcttacagtaatcaatgggatacttctcaaaattaacaaatctcttaacaaaatatatcttttgccctctttaaagtcttcagtaaaccagtaaatgaattcaataaaccaa

SEQ ID NO: 112959 - DNA, 591 bp, Homo sapiens
  Payload ID: 2102
  Gene Symbol: CALCRL
  Gene Name: calcitonin receptor-like
  ENST ID: ENST00000410102
  CDS Start-End: 479-591
agaacaacctctctctctccagcagagagtgtcacctcctgctttaggaccatcaagctctgctaactgaatctcatcctaattgcaggatcacattgcaaagctttcactctttcccaccttgcttgtgggtaaatctcttctgcggaatctcagaaagtaaagttccatcctgagaatatttcacaaagaatttccttaagagctggactgggtcttgacccctgaatttaagaaattcttaaagacaatgtcaaatatgatccaagagaaaatgtgatttgagactggagacaattgtgcatcctatagaaaacaatatttgaaagattgctaccactaaaaagaaaactactacaacttgacaagactgctgcaaacttcaatttgtcaaccacaacttgacaaggttgctataaaacaagattgctacaacttctagtttatgttatacagcatatttcattttggcttaatgatggagaaaaagtgtaccctgtattttctggttctcttgcctttttttatgattcttgttacagcagaattagaagagagtcctgaggactcaattcagttgggagttactag

SEQ ID NO: 112960 - DNA, 5223 bp, Homo sapiens
  Payload ID: 2102
  Gene Symbol: CALCRL
  Gene Name: calcitonin receptor-like
  Uniprot ID: Q16602
  ENST ID: ENST00000409998
  CDS Start-End: 783-2168
acacagcctatgatctctctctgttcaggctgcttcttgctcttgtctcacaataagaaaggagtgctgctttcctggggtatgctatttgagaaagaaagtaacctaacactaactgcaggcggggtcagagtgatgtaacaggaagctctgatgtttcccttctgctgctgatcacttacaatctgacaacacttacaatctactcagaacaacctctctctctccagcagagagtgtcacctcctgctttaggaccatcaagctctgctaactgaatctcatcctaattgcaggatcacattgcaaagctttcactctttcccaccttgcttgtgggtaaatctcttctgcggaatctcagaaagtaaagttccatcctgagaatatttcacaaagaatttccttaagagctggactggggtcctacgatgatacaccaaccacttgtgctaccatctgtcaaaactttggatggccctactttcaggtcttgacccctgaatttaagaaattcttaaagacaatgtcaaatatgatccaagagaaaatgtgatttgagactggagacaattgtgcatatcgtctaataataaaaacccatactagcctatagaaaacaatatttgaaagattgctaccactaaaaagaaaactactacaacttgacaagactgctgcaaacttcaatttgtcaaccacaacttgacaaggttgctataaaacaagattgctacaacttctagtttatgttatacagcatatttcattttggcttaatgatggagaaaaagtgtaccctgtattttctggttctcttgcctttttttatgattcttgttacagcagaattagaagagagtcctgaggactcaattcagttgggagttactagaaataaaatcatgacagctcaatatgaatgttaccaaaagattatgcaagaccccattcaacaagcagaaggcgtttactgcaacagaacctgggatggatggctctgctggaacgatgttgcagcaggaactgaatcaatgcagctctgccctgattactttcaggactttgatccatcagaaaaagttacaaagatctgtgaccaagatggaaactggtttagacatccagcaagcaacagaacatggacaaattatacccagtgtaatgttaacacccacgagaaagtgaagactgcactaaatttgttttacctgaccataattggacacggattgtctattgcatcactgcttatctcgcttggcatattcttttatttcaagagcctaagttgccaaaggattaccttacacaaaaatctgttcttctcatttgtttgtaactctgttgtaacaatcattcacctcactgcagtggccaacaaccaggccttagtagccacaaatcctgttagttgcaaagtgtcccagttcattcatctttacctgatgggctgtaattacttttggatgctctgtgaaggcatttacctacacacactcattgtggtggccgtgtttgcagagaagcaacatttaatgtggtattattttcttggctggggatttccactgattcctgcttgtatacatgccattgctagaagcttatattacaatgacaattgctggatcagttctgatacccatctcctctacattatccatggcccaatttgtgctgctttactggtgaatctttttttcttgttaaatattgtacgcgttctcatcaccaagttaaaagttacacaccaagcggaatccaatctgtacatgaaagctgtgagagctactcttatcttggtgccattgcttggcattgaatttgtgctgattccatggcgacctgaaggaaagattgcagaggaggtatatgactacatcatgcacatccttatgcacttccagggtcttttggtctctaccattttctgcttctttaatggagaggttcaagcaattctgagaagaaactggaatcaatacaaaatccaatttggaaacagcttttccaactcagaagctcttcgtagtgcgtcttacacagtgtcaacaatcagtgatggtccaggttatagtcatgactgtcctagtgaacacttaaatggaaaaagcatccatgatattgaaaatgttctcttaaaaccagaaaatttatataattgaaaatagaaggatggttgtctcactgttttgtgcttctcctaactcaaggacttggacccatgactctgtagccagaagacttcaatattaaatgactttttgaatgtcataaagaagagccttcacatgaaattagtagtgtgttgataagagtgtaacatccagctctatgtgggaaaaaagaaatcctggtttgtaatgtttgtcagtaaatactcccactatgcctgatgtgacgctactaacctgacatcaccaagtgtggaattggagaaaagcacaatcaacttttctgagctggtgtaagccagttccagcacaccattgcatgaattcacaaacaaatggctgtaaaactaaacatacatgttgggcatgattctacccttattgccccaagagacctagctaaggtctataaacatgaagggaaaattagcttttagttttaaaactctttatcccatcttgattggggcagttgactttttttttgcccagagtgccgtagtcctttttgtaactaccctctcaaatggacaataccagaagtgaattatccctgctggctttcttttctctatgaaaagcaactgagtacaattgttatgatctactcatttgctgacacatcagttatatcttgtggcatatccattgtggaaactggatgaacaggatgtataatatgcaatcctacttctatatcattaggaaaacatcttagttgatgctacaaaacaccttgtcaacctcttcctgtcttaccaaacagtgggagggaattcctagctgtaaatataaattttgtcccttccatttctactgtataaacaaattagcaatcattttatataaagaaaatcaatgaaggatttcttattttcttggaattttgtaaaaagaaattgtgaaaaatgagcttgtaaatactccattattttattttatagtctcaaatcaaatacatacaacctatgtaatttttaaagcaaatatataatgcaacaatgtgtgtatgttaatatctgatactgtatctgggctgattttttaaataaaatagagtctggaatgctatatttggtaaatattttaaagacaaccagatgccagcatcagaagtctgtttgagaactaagagaacagaaacatctatcataagatatatttattttaaaaacacaaggtcactattttattgaatatatttgttttgataactcataccttaataataggtgtgtttgacatatttcttttttcattttgacaatgaactcacattctaatccagaaattttaaacaactactgtgataaataccaatctgctacttttatagattttaccccattaaaatattactttactgacttttactatgtgaagatatatagctttggaaatgtcccaggctattcaagaaatataaaaaactagaaggatactatatataccatatacaatgctttaatattttaatagagctactgtatataatacaaattagggaaatacttgaatatatcattgagaaaaaattattgtcagatcttactgaattattgtcagactttattaaataaagatagaagaaaaccttgctaatgaattaaagtgaaatttgcatgggattcagtttctctaatgttattttccgctgaaatctctaaagaacaagaatgacttcaattagtaaaagtcaattttgggaaaagtcatgggtatctgttttttaagtgtgtcaatctgattaaaatggatgaaacaaattactcatcataagttgtttcttaagctgtcaatatgtcaatagatggtgagttcagaacttatttcaaattgctaagacaaattatctaaattcgtaagaattaacatatagaatggtctggtcagtacatttataatttatctatgcatgaaaaagtattgttttgtttgaaacatgaatttcatagcaagctgccatagaaaggaacgcaggctgttctagaccttcaactgcctaaattatacaaaaattcattttaataaactcaattattagctatttattattcaaagacccatatttaaatcctttgctgaccatgttgacatatatcagccttcttctagacaaactgtcaactctcaaccatcttgacagtagaagtgacagtaaaaaatgttgaatgatcagagattatattaaaataaacatgtaattttcaagtatttttgttgtgcttttataatattaattctagatcagatttattttatagccagggtttgtctgttgtagagtcttgaggcgtagcagtcattcatgattaatcactgttagttttgtacccatatatttttagaatagttttaaatgttagatttctcaaaagctaaatgctacttaatatctttgtatcatactcataaagcaaagtaaatctgacactttttttaaagcaaacttctttgctgtcaaaaaaataaatttggggaaatttctagcttttaaaatgtagatctgcattttactgtgattacttgtgaaagtcatattttaattttctaaattctaatttgtcattttatttcctaaagttaatttccaatgcatttattcataaaatattcattctggaatgcagtgtttgtttaaatgtaatccaatgtatatagaattagtggtggctgtagtgctgtatttattgcttataattttttttaaatgtgaacttacttttaattttctcttggttttaatctgctagtagaaaccactagttatctgtaaaaatatattcaagatattctgatcaattataacaatttatgttatgcctagagtatatctctattttttgattgtatgaaaatattaaagttatgagttaaagtttattttcactgatatttactacagtgccaaataatctaatttataaacataattcttacagtaatcaatgggatacttctcaaaattaacaaatctcttaacaaaatatatcttttgccctctttaaagtcttcagtaaaccagtaaatgaattcaataaaccaa

SEQ ID NO: 112961 - DNA, 1984 bp, Homo sapiens
  Payload ID: 2102
  Gene Symbol: CALCRL
  Gene Name: calcitonin receptor-like
  Uniprot ID: Q16602
  ENST ID: ENST00000410068
  CDS Start-End: 342-1727
agaacaacctctctctctccagcagagagtgtcacctcctgctttaggaccatcaagctctgctaactgaatctcatcctaattgcaggatcacattgcaaagctttcactctttcccaccttgcttgtgggtaaatctcttctgcggaatctcagaaagtaaagttccatcctgagaatatttcacaaagaatttccttaagagctggactgggtcttgacccctgaatttaagaaattcttaaagacaatgtcaaatatgatccaagagaaaatgtgatttgagactggagacaattgtgcattttatgttatacagcatatttcattttggcttaatgatggagaaaaagtgtaccctgtattttctggttctcttgcctttttttatgattcttgttacagcagaattagaagagagtcctgaggactcaattcagttgggagttactagaaataaaatcatgacagctcaatatgaatgttaccaaaagattatgcaagaccccattcaacaagcagaaggcgtttactgcaacagaacctgggatggatggctctgctggaacgatgttgcagcaggaactgaatcaatgcagctctgccctgattactttcaggactttgatccatcagaaaaagttacaaagatctgtgaccaagatggaaactggtttagacatccagcaagcaacagaacatggacaaattatacccagtgtaatgttaacacccacgagaaagtgaagactgcactaaatttgttttacctgaccataattggacacggattgtctattgcatcactgcttatctcgcttggcatattcttttatttcaagagcctaagttgccaaaggattaccttacacaaaaatctgttcttctcatttgtttgtaactctgttgtaacaatcattcacctcactgcagtggccaacaaccaggccttagtagccacaaatcctgttagttgcaaagtgtcccagttcattcatctttacctgatgggctgtaattacttttggatgctctgtgaaggcatttacctacacacactcattgtggtggccgtgtttgcagagaagcaacatttaatgtggtattattttcttggctggggatttccactgattcctgcttgtatacatgccattgctagaagcttatattacaatgacaattgctggatcagttctgatacccatctcctctacattatccatggcccaatttgtgctgctttactggtgaatctttttttcttgttaaatattgtacgcgttctcatcaccaagttaaaagttacacaccaagcggaatccaatctgtacatgaaagctgtgagagctactcttatcttggtgccattgcttggcattgaatttgtgctgattccatggcgacctgaaggaaagattgcagaggaggtatatgactacatcatgcacatccttatgcacttccagggtcttttggtctctaccattttctgcttctttaatggagaggttcaagcaattctgagaagaaactggaatcaatacaaaatccaatttggaaacagcttttccaactcagaagctcttcgtagtgcgtcttacacagtgtcaacaatcagtgatggtccaggttatagtcatgactgtcctagtgaacacttaaatggaaaaagcatccatgatattgaaaatgttctcttaaaaccagaaaatttatataattgaaaatagaaggatggttgtctcactgttttgtgcttctcctaactcaaggacttggacccatgactctgtagccagaagacttcaatattaaatgactttttgaatgtcataaagaagagccttcacatgaaattagtagtgtgttgataagagtgtaacatccagctctatgtgggaaaaaagaaatcctggtttgtaatgtttgtcagtaaatactcccactatgcctgatgtgacgctactaacctgacatcacc

SEQ ID NO: 112962 - DNA, 642 bp, Homo sapiens
  Payload ID: 2102
  Gene Symbol: CALCRL
  Gene Name: calcitonin receptor-like
  ENST ID: ENST00000447403
  CDS Start-End: 410-642
agaacaacctctctctctccagcagagagtgtcacctcctgctttaggaccatcaagctctgctaactgaatctcatcctaattgcaggatcacattgcaaagctttcactctttcccaccttgcttgtgggtaaatctcttctgcggaatctcagaaagtaaagttccatcctgagaatatttcacaaagaatttccttaagagctggactggggtcctacgatgatacaccaaccacttgtgctaccatctgtcaaaactttggatggccctactttcaggtcttgacccctgaatttaagaaattcttaaagacaatgtcaaatatgatccaagagaaaatgtgatttgagactggagacaattgtgcattttatgttatacagcatatttcattttggcttaatgatggagaaaaagtgtaccctgtattttctggttctcttgcctttttttatgattcttgttacagcagaattagaagagagtcctgaggactcaattcagttgggagttactagaaataaaatcatgacagctcaatatgaatgttaccaaaagattatgcaagaccccattcaacaagcagaaggcgtttactgcaacagaacctgggatggatggctctgctggaacgatgt

SEQ ID NO: 112963 - DNA, 843 bp, Homo sapiens
  Payload ID: 2103
  Gene Symbol: CALCA
  Gene Name: calcitonin-related polypeptide alpha
  Uniprot ID: P01258
  ENST ID: ENST00000331587
  CDS Start-End: 120-545
ggcatcagagacactgcccagcccaagtgtcgccgccgcttccacagggctctggctggacgccgccgccgccgctgccaccgcctctgatccaagccacctcccgccagagaggtgtcatgggcttccaaaagttctcccccttcctggctctcagcatcttggtcctgttgcaggcaggcagcctccatgcagcaccattcaggtctgccctggagagcagcccagcagacccggccacgctcagtgaggacgaagcgcgcctcctgctggctgcactggtgcaggactatgtgcagatgaaggccagtgagctggagcaggagcaagagagagagggctccagcctggacagccccagatctaagcggtgcggtaatctgagtacttgcatgctgggcacatacacgcaggacttcaacaagtttcacacgttcccccaaactgcaattggggttggagcacctggaaagaaaagggatatgtccagcgacttggagagagaccatcgccctcatgttagcatgccccagaatgccaactaaactcctccctttccttcctaatttcccttcttgcatccttcctataacttgatgcatgtggtttggttcctctctggtggctctttgggctggtattggtggctttccttgtggcagaggatgtctcaaacttcagatgggaggaaagagagcaggactcacaggttggaagagaatcacctgggaaaataccagaaaatgagggccgctttgagtcccccagagatgtcatcagagctcctctgtcctgcttctgaatgtgctgatcatttgaggaataaaattatttttccccaaa

SEQ ID NO: 112964 - DNA, 916 bp, Homo sapiens
  Payload ID: 2103
  Gene Symbol: CALCA
  Gene Name: calcitonin-related polypeptide alpha
  Uniprot ID: P06881
  ENST ID: ENST00000361010
  CDS Start-End: 76-462
ccgccgctgccaccgcctctgatccaagccacctcccgccaggtgagccccgagatcctggctcagagaggtgtcatgggcttccaaaagttctcccccttcctggctctcagcatcttggtcctgttgcaggcaggcagcctccatgcagcaccattcaggtctgccctggagagcagcccagcagacccggccacgctcagtgaggacgaagcgcgcctcctgctggctgcactggtgcaggactatgtgcagatgaaggccagtgagctggagcaggagcaagagagagagggctccagaatcattgcccagaagagagcctgtgacactgccacctgtgtgactcatcggctggcaggcttgctgagcagatcagggggtgtggtgaagaacaactttgtgcccaccaatgtgggttccaaagcctttggcaggcgccgcagggaccttcaagcctgagcagctgaatgactcaagaaggtcacaataaagctgaactccttttaatgtgtaatgaaagcaatttgtaggaaaggctccatggaagacatacatataggcatccttcttgatactgaaaactatcttctttgtttgaaaggaactattgctaaatgcagaacaagctcattgcagttacctattgtgcatctttttaaatacttgattatgtaaccataaatctgacagcatgtctcattggcttatctggtagcaaatctaggccccgtcagccaccctattgacattggtggctctgctaaacctcagggggacatgaaatcactgcctcttgggcatctggggacacatggtaatgctgtgccttgacagaagtatttgtttaaagaaatgtcaatgctgtcatttgtgaactctatcaaaattaaaaatgtattttctatacccttca

SEQ ID NO: 112965 - DNA, 581 bp, Homo sapiens
  Payload ID: 2103
  Gene Symbol: CALCA
  Gene Name: calcitonin-related polypeptide alpha
  Uniprot ID: P01258
  ENST ID: ENST00000396372
  CDS Start-End: 63-488
cgcctctgatccaagccacctcccgccaggtgagccccgagatcctggctcagagaggtgtcatgggcttccaaaagttctcccccttcctggctctcagcatcttggtcctgttgcaggcaggcagcctccatgcagcaccattcaggtctgccctggagagcagcccagcagacccggccacgctcagtgaggacgaagcgcgcctcctgctggctgcactggtgcaggactatgtgcagatgaaggccagtgagctggagcaggagcaagagagagagggctccagcctggacagccccagatctaagcggtgcggtaatctgagtacttgcatgctgggcacatacacgcaggacttcaacaagtttcacacgttcccccaaactgcaattggggttggagcacctggaaagaaaagggatatgtccagcgacttggagagagaccatcgccctcatgttagcatgccccagaatgccaactaaactcctccctttccttcctaatttcccttcttgcatccttcctataacttgatgcatgtggtttggttcctctctggtggctctttgggctgg

SEQ ID NO: 112966 - DNA, 851 bp, Homo sapiens
  Payload ID: 2103
  Gene Symbol: CALCA
  Gene Name: calcitonin-related polypeptide alpha
  Uniprot ID: P06881
  ENST ID: ENST00000486207
  CDS Start-End: 10-396
agaggtgtcatgggcttccaaaagttctcccccttcctggctctcagcatcttggtcctgttgcaggcaggcagcctccatgcagcaccattcaggtctgccctggagagcagcccagcagacccggccacgctcagtgaggacgaagcgcgcctcctgctggctgcactggtgcaggactatgtgcagatgaaggccagtgagctggagcaggagcaagagagagagggctccagaatcattgcccagaagagagcctgtgacactgccacctgtgtgactcatcggctggcaggcttgctgagcagatcagggggtgtggtgaagaacaactttgtgcccaccaatgtgggttccaaagcctttggcaggcgccgcagggaccttcaagcctgagcagctgaatgactcaagaaggtcacaataaagctgaactccttttaatgtgtaatgaaagcaatttgtaggaaaggctccatggaagacatacatataggcatccttcttgatactgaaaactatcttctttgtttgaaaggaactattgctaaatgcagaacaagctcattgcagttacctattgtgcatctttttaaatacttgattatgtaaccataaatctgacagcatgtctcattggcttatctggtagcaaatctaggccccgtcagccaccctattgacattggtggctctgctaaacctcagggggacatgaaatcactgcctcttgggcatctggggacacatggtaatgctgtgccttgacagaagtatttgtttaaagaaatgtcaatgctgtcatttgtgaactctatcaaaattaaaaatgtattttctatacccttcaa

SEQ ID NO: 112967 - DNA, 679 bp, Homo sapiens
  Payload ID: 2103
  Gene Symbol: CALCA
  Gene Name: calcitonin-related polypeptide alpha
  Uniprot ID: P01258
  ENST ID: ENST00000469608
  CDS Start-End: 38-463
gcctctgatccaagccacctcccgccagagaggtgtcatgggcttccaaaagttctcccccttcctggctctcagcatcttggtcctgttgcaggcaggcagcctccatgcagcaccattcaggtctgccctggagagcagcccagcagacccggccacgctcagtgaggacgaagcgcgcctcctgctggctgcactggtgcaggactatgtgcagatgaaggccagtgagctggagcaggagcaagagagagagggctccagcctggacagccccagatctaagcggtgcggtaatctgagtacttgcatgctgggcacatacacgcaggacttcaacaagtttcacacgttcccccaaactgcaattggggttggagcacctggaaagaaaagggatatgtccagcgacttggagagagaccatcgccctcataatcattgcccagaagagagcctgtgacactgccacctgtgtgactcatcggctggcaggcttgctgagcagatcagggggtgtggtgaagaacaactttgtgcccaccaatgtgggttccaaagcctttggcaggcgccgcagggaccttcaagcctgagcagctgaatgactcaagaaggtcacaataaagctgaactccttttaatgtgtaatgaaagcaatttgtaggaaaggctccat

SEQ ID NO: 112968 - DNA, 1070 bp, Homo sapiens
  Payload ID: 2104
  Gene Symbol: CALCB
  Gene Name: calcitonin-related polypeptide beta
  Uniprot ID: P10092
  ENST ID: ENST00000324229
  CDS Start-End: 112-495
gtaataagagcggggtctccgcggggaaggcgcccacagcaggtgtggtgttcatcccgggtcgaccggccgctcgcgctgccctgaaactctagtcgccagagaggcggcatgggtttccggaagttctcccccttcctggctctcagtatcttggtcctgtaccaggcgggcagcctccaggcggcgccattcaggtctgccctggagagcagcccagacccggccacactcagtaaagaggacgcgcgcctcctgctggctgcactggtgcaggactatgtgcagatgaaggccagtgagctgaagcaggagcaggagacacagggctccagctccgctgcccagaagagagcctgcaacactgccacctgtgtgactcatcggctggcaggcttgctgagcagatcagggggcatggtgaagagcaacttcgtgcccaccaatgtgggttccaaagcctttggcaggcgccgcagggaccttcaagcctgagcagatgaatgactccaggaagaaggttatcatgaaactgaactcaccatttctattaatttctgttggtaagaacttggtgagaatgccccgtggaagatacacatgtttgcatcctaagatactgaaaaaagggcacctttgtcacttgaaaggaatgaaactgaatgcaaaataagctaattccatatttgctgtgcatcatttttatatttaattctatgtccagtaaaagtgatggcatctctcattgacttatctggtagcaaactggttctttcggagccatcctgttgatcatgcagctccaccaaaccttagggggacgtgaaatcactgcctgttgtggtctccgaggacacatggtaatggtgatgctgtgccttgttatctaagaacatgattgtataatttgtttaagaaaatgtcaatattgtgccatttgtgaacttcatcaagattaaaagcatattttgggtacatttgtttcaaaaccttggtgatgcattacaacttgttttcttatgtaataataatgatgatgatgatgataataataaatatttttgagtgct

SEQ ID NO: 112969 - DNA, 2258 bp, Homo sapiens
  Payload ID: 2104
  Gene Symbol: CALCB
  Gene Name: calcitonin-related polypeptide beta
  ENST ID: ENST00000523376
  CDS Start-End: 1263-1679
gtcggccgcgaaggcgtggcggcccgcggaccggcggaccccgggtcataccagctgtccgggtgcacaggcccaggggccccacgaccgcgggtgtcgggaccgtgggctccactgaggagcccaccgaatccttcggcctggccaggcggggggtcttcttcccagtccgcggaagccaggtccgggagacggcggggctcactgtgccttcggacctacactctgctcgggggccggatttctgcaaagcgtccacttggaaagaagtttcacttgcagggaaggcgggtgtacgcaatgatggtccgtgtgtccgggatgtgaatgccaaccaagactgcgtccgttggtggagtgtgcgcgggtcctccgtgagggtgcttctggcagtcacagttcacgagttagcgagaagatggctgggaggcggcgagcccccgctcccggggcgcgcatttcgaactccataggtctcccgtggagagcagcccagacccggccacactcagtgaggaggaagtgcgcctcctgctggctgcactggtgcaggactatgtgcagatgaaggccagtgagctggagcaggagcaggagacagagctccagatttaatttatgtccttttcttctatcttctttggatggaggctgagtttcagttcttgccggagagtttccagatttctcctcctgatggcctgttctgtggattttggatttgccaaggcagccctcacaatccgagtcctggggctgtctaaggaactatggtgagatagagtgttatgggttgaattttgtccccctcaaaaaggtaccattgtcttctaaaagaacaactgaggagttcaacatgaaggaggaaggatatgtcattctttgcagtgacacaatcagaaaaggtactgctcccccacctaaatatgagggataagtgattttcagaagagacaggagaagaagggacaaatgtcctggtccttgtctccttgtcaacaaaagatgtactggtaccctttgaaaggggacagagaggatgccagctgaactgggagcactaagttctctgctttgtgaaaatgaatctgcaatgaactcctggtctttgtctggatgcccatctttctgcaagttgtcagcagaagcttttcaatgtggctacttggtgagttcacatacagcccaacccatagttctgatggagcctgaaaatcagccctgaaaagttctcctcagaggatgcctctgaagtgagaggcatgaaaaaagaggctaaccttcagagaggcggcatgggtttccggaagttctcccccttcctggctctcagtatcttggtcctgtaccaggcgggcagcctccaggcggcgccattcaggtctgccctggagagcagcccagacccggccacactcagtaaagaggacgcgcgcctcctgctggctgcactggtgcaggactatgtgcagatgaaggccagtgagctgaagcaggagcaggagacacagggctccagctccgctgcccagaagagagcctgcaacactgccacctgtgtgactcatcggctggcaggcttgctgagcagatcagggggcatggtgaagagcaacttcgtgcccaccaatgtgggttccaaagcctttggcaggcgccgcagggaccttcaagcctgagcagatgaatgactccaggaagaaggttatcatgaaactgaactcaccatttctattaatttctgttggtaagaacttggtgagaatgccccgtggaagatacacatgtttgcatcctaagatactgaaaaaagggcacctttgtcacttgaaaggaatgaaactgaatgcaaaataagctaattccatatttgctgtgcatcatttttatatttaattctatgtccagtaaaagtgatggcatctctcattgacttatctggtagcaaactggttctttcggagccatcctgttgatcatgcagctccaccaaaccttagggggacgtgaaatcactgcctgttgtggtctccgaggacacatggtaatggtgatgctgtgccttgttatctaagaacatgattgtataatttgtttaagaaaatgtcaatattgtgccatttgtgaacttcatcaagattaaaagcatattttgggtacatttgtttcaaaaccttggtgatgcattacaacttgttttcttatgtaataataatgatgatgatgatgataataataaatatttttgagtgcttact

SEQ ID NO: 112970 - DNA, 2097 bp, Homo sapiens
  Payload ID: 2104
  Gene Symbol: CALCB
  Gene Name: calcitonin-related polypeptide beta
  Uniprot ID: P10092
  ENST ID: ENST00000533448
  CDS Start-End: 112-495
gtaataagagcggggtctccgcggggaaggcgcccacagcaggtgtggtgttcatcccgggtcgaccggccgctcgcgctgccctgaaactctagtcgccagagaggcggcatgggtttccggaagttctcccccttcctggctctcagtatcttggtcctgtaccaggcgggcagcctccaggcggcgccattcaggtctgccctggagagcagcccagacccggccacactcagtaaagaggacgcgcgcctcctgctggctgcactggtgcaggactatgtgcagatgaaggccagtgagctgaagcaggagcaggagacacagggctccagctccgctgcccagaagagagcctgcaacactgccacctgtgtgactcatcggctggcaggcttgctgagcagatcagggggcatggtgaagagcaacttcgtgcccaccaatgtgggttccaaagcctttggcaggcgccgcagggaccttcaagcctgagcagatgaatgactccaggaagaaggtgtgtcctaaatccaatgacatatccttataagagattcactcagaagacacatgtggagaaggtgacatgacagaggcaaggaggcacaagccaaggaagtctgtgtctaccagaagccagaatcacagaacagtctctggaagaagagcagccctgctgacacctagagtttggacttccagcttccagaactgtgagagaataatttctgttgttttaagccacaaagtttgtggtaatttgttatgacagccctaggaaactaatacaatacattttcatttattttgggtaaatgccttggagtgggattgctgggttatttggaaagtgtgtatttaactctgtaagaaactgccaaactattttctgaagtgactgtaccacttcgccttcttgccagccacatatgagagctctagtatttccacaaataggtatgtagcagtatctcattgctgttttaatttgtatttccccaatgactaatgacgttgagcatctattttaccatatgtttatcacctttattgaagggtctgtttaaatcttctgctaaatttttgttggcttgcttgctttattagtgttgagtttttagagctctttatatgttgtggatgcaagattgttttcagatatatagtttggaaacttccttcccctgaatctgcggattgctttttcattttcttagcagtgtctctcacagagaaaaagttgtaatttgaataagatccaattcatctttttttttcttttatgtattgtgcttttagttcatgtctaagaactctttgcctaactaaggtcccaaggtcacaataaccttattctatactttcttgtaaaagttttatagttttatattttatatgtagattagtgatctattttgagttaatttttgtataaggtgagaggtgtaggttgaaattcatacctgtgaatatagatacccaattgtttcagtgccatttgttaaaaagactgttatttcaccatttaattgcccctgcacctttgtcaaaaagcaactgatcatatttgtgtgggtatatttctgggttctcaattctgtctcattgattgatttgaccattcttttgccaatgtcatactgccttgattagtgtagtgttaaagtgaatctcaaaaccaggtaatgtgggtctaccaacattgttcattcttgttcaaaaagattttagctacatctaaaatattttctacatcttttatacattttagaatcagtgtgttactatctacaaaatttctgatgagatttttaatgggattgtgttaaatcagtgggttaattttgggagaattagcatattaataatattaagtcgttcaattcatgaacacaatacatgttttcacttatttaggttttctctgtttttttttttttaacagtgttctcagttttcaacagaaatattctacacatatcttgttagatttttaactattttattttttggtgctaatgtaaatggtacttaaacatttttgtttttaattgttcattgctagtagatagaaatacaatatttaaaatatta

SEQ ID NO: 112971 - DNA, 3534 bp, Homo sapiens
  Payload ID: 2105
  Gene Symbol: CANT1
  Gene Name: calcium activated nucleotidase 1
  Uniprot ID: Q8WVQ1
  ENST ID: ENST00000302345
  CDS Start-End: 496-1701
agaggctgccgggaacgcgggcccagaggcggggcgagcgcgcgcggggcggaagtcggccaccttcctccgtcccggccgttagcccagccaagcccagccaagcccagccaagccccgccgatcgcgggcaccggagccagccccgcagcggagggaccacagagcaccagcctgcatggaacttccttcctcactcagcttcccacgttgccagctgggacaggggagatggagtaattttgctgtggaaagacttcacgtcttgccgaatgaaagtaagcaaagatactgctagagtcgggaatctagagtcgggaattcattaagccaagggagtaagaatggccacagagtagtgaaatactgtttcttctggaaaagtcagcctccagcgcctgcagcttccggaactaagatgtgactgggcttgcggaggcgctgactcctctcctccctccctggctgtgcaggtcccgcctgtctgtcacgctgatgcccgtgcagctgtctgagcacccggaatggaatgagtctatgcactccctccggatcagtgtggggggccttcctgtgctggcgtccatgaccaaggccgcggacccccgcttccgcccccgctggaaggtgatcctgacgttctttgtgggtgctgccatcctctggctgctctgctcccaccgcccggcccccggcaggccccccacccacaatgcacacaactggaggctcggccaggcgcccgccaactggtacaatgacacctaccccctgtctcccccacaaaggacaccggctgggattcggtatcgaatcgcagttatcgcagacctggacacagagtcaagggcccaagaggaaaacacctggttcagttacctgaaaaagggctacctgaccctgtcagacagtggggacaaggtggccgtggaatgggacaaagaccatggggtcctggagtcccacctggcggagaaggggagaggcatggagctatccgacctgattgttttcaatgggaaactctactccgtggatgaccggacgggggtcgtctaccagatcgaaggcagcaaagccgtgccctgggtgattctgtccgacggcgacggcaccgtggagaaaggcttcaaggccgaatggctggcagtgaaggacgagcgtctgtacgtgggcggcctgggcaaggagtggacgaccactacgggtgatgtggtgaacgagaacccggagtgggtgaaggtggtgggctacaagggcagcgtggaccacgagaactgggtgtccaactacaacgccctgcgggctgctgccggcatccagccgccaggctacctcatccatgagtctgcctgctggagtgacacgctgcagcgctggttcttcctgccgcgccgcgccagccaggagcgctacagcgagaaggacgacgagcgcaagggcgccaacctgctgctgagcgcctcccctgacttcggcgacatcgctgtgagccacgtcggggcggtggtccccactcacggcttctcgtccttcaagttcatccccaacaccgacgaccagatcattgtggccctcaaatccgaggaggacagcggcagagtcgcctcctacatcatggccttcacgctggacgggcgcttcctgttgccggagaccaagatcggaagcgtgaaatacgaaggcatcgagttcatttaactcaaaacggaaacactgagcaaggccatcaggactcagcttttataaaaacaagaggagtgcacttttgttttgttttgttctttttggaactgtgcctgggttggaggtctggacagggagcccagtcccgggccccatagtggtgcgggcactggacccccgggccccacggaggccgcggtctgaactgctttccatgctgccatctggtggtgatttcggtcacttcaggcattgactcaaggcctgcctaactggctgggtcgtttcttccatccgacctcgtttcttttctttcctatgttcttttgttcagtgaatatccctagagctcctaccatatgtcaggccctatgcctcaccctgagaacgcagtgagcatgaggtggacctgtttgctgggaaccccaggtcacccccttttcttcctactctgtgcctggagcatcatgtccacccctgcagatccttggaaaagaaaatgtttatgttgcagggtattgcatggtcacgagtgagggcaggcccctggggacacatctgcccacagctgcacaggccagggcgcaggcacatctgttggttctcaggcctcagataaaaccatctccgcatcatatggccagtgaccgctttctcccttcaagaaaattctgtggctgtgcagtactttgaagttttaattattaacctgctttaattaaagcagtttcctttcttataaagtggaatcaccaaatcttatcacacagagcacagtcctgtagttacccagcccgctccagcagtgcgggagattgtaaggaagcggtggcggctggtgaagcaagtctcacatgtcggcgttcttggccaatggatacaaagataaagaaaatgttgcctttttctaggaactgtcagaaatcctcatgcctttcaagacttctgtgaatgacttgaattttttattccctgcctagggtctgtgaacgaggcctgtctcttccctggggtttctttccatggcctttatttctcctcttccagtgggagttttgcaggctcttctctgtggaaacttcacgagcgttggctgggcctcggcttcgctggagtgtactccagggtgaaggcagagtgggatttgagacccaggttaggcacgacccaggctgagaagggacgtttccatcattcacagtgccctccccacagcactacctcaccccgacccccaccctcactcctaccccaccccgcgatcgtcaggggtgccacggtgggccggagggtgccggctctggctgtccctgtgccggtccctcacaaacctctccccctttgaaactcaagcacagctgcgaggagggcagcgaggagggacccctctctcatggttgtctctttcccccgctatgtcataggtagtggaggaagcgaaggaagtgaacgctgaatgtgacgcatttctgaagagctcagctgtcaccgggcatagcctggaagccccaagtctgttctgactttgcctggctgtctccttgacccgcctcctagatcattgtccttgatgtccaggctgggtcatttaaaatagagatgcaatcaggaaggttgggggacttgggactgtggctgaattgagaccttgctgatgtattcatgtcagcacctgagtcacagcccaggtgcccggaagcagcctcttcgcataggcagtgatttgcgattactttaaagctcaccttttttcttcccctctctgttcgctgctgtcagcataatgattgtgttccttccctatgggatccatctgttttgtaaacaataaagcgtctgagggagtgt

SEQ ID NO: 112972 - DNA, 3252 bp, Homo sapiens
  Payload ID: 2105
  Gene Symbol: CANT1
  Gene Name: calcium activated nucleotidase 1
  Uniprot ID: Q8WVQ1
  ENST ID: ENST00000392446
  CDS Start-End: 214-1419
cagccaagcccagccaagcccagccaagccccgccgatcgcgggcaccggagccagccccgcagcggagggaccacagagcaccagcctgcatggaacttccttcctcactcagcttcccacgttgccagctgggacaggggagatggagtaattttgctgtggaaagacttcacgtcttgccgaatgaaagtcccgcctgtctgtcacgctgatgcccgtgcagctgtctgagcacccggaatggaatgagtctatgcactccctccggatcagtgtggggggccttcctgtgctggcgtccatgaccaaggccgcggacccccgcttccgcccccgctggaaggtgatcctgacgttctttgtgggtgctgccatcctctggctgctctgctcccaccgcccggcccccggcaggccccccacccacaatgcacacaactggaggctcggccaggcgcccgccaactggtacaatgacacctaccccctgtctcccccacaaaggacaccggctgggattcggtatcgaatcgcagttatcgcagacctggacacagagtcaagggcccaagaggaaaacacctggttcagttacctgaaaaagggctacctgaccctgtcagacagtggggacaaggtggccgtggaatgggacaaagaccatggggtcctggagtcccacctggcggagaaggggagaggcatggagctatccgacctgattgttttcaatgggaaactctactccgtggatgaccggacgggggtcgtctaccagatcgaaggcagcaaagccgtgccctgggtgattctgtccgacggcgacggcaccgtggagaaaggcttcaaggccgaatggctggcagtgaaggacgagcgtctgtacgtgggcggcctgggcaaggagtggacgaccactacgggtgatgtggtgaacgagaacccggagtgggtgaaggtggtgggctacaagggcagcgtggaccacgagaactgggtgtccaactacaacgccctgcgggctgctgccggcatccagccgccaggctacctcatccatgagtctgcctgctggagtgacacgctgcagcgctggttcttcctgccgcgccgcgccagccaggagcgctacagcgagaaggacgacgagcgcaagggcgccaacctgctgctgagcgcctcccctgacttcggcgacatcgctgtgagccacgtcggggcggtggtccccactcacggcttctcgtccttcaagttcatccccaacaccgacgaccagatcattgtggccctcaaatccgaggaggacagcggcagagtcgcctcctacatcatggccttcacgctggacgggcgcttcctgttgccggagaccaagatcggaagcgtgaaatacgaaggcatcgagttcatttaactcaaaacggaaacactgagcaaggccatcaggactcagcttttataaaaacaagaggagtgcacttttgttttgttttgttctttttggaactgtgcctgggttggaggtctggacagggagcccagtcccgggccccatagtggtgcgggcactggacccccgggccccacggaggccgcggtctgaactgctttccatgctgccatctggtggtgatttcggtcacttcaggcattgactcaaggcctgcctaactggctgggtcgtttcttccatccgacctcgtttcttttctttcctatgttcttttgttcagtgaatatccctagagctcctaccatatgtcaggccctatgcctcaccctgagaacgcagtgagcatgaggtggacctgtttgctgggaaccccaggtcacccccttttcttcctactctgtgcctggagcatcatgtccacccctgcagatccttggaaaagaaaatgtttatgttgcagggtattgcatggtcacgagtgagggcaggcccctggggacacatctgcccacagctgcacaggccagggcgcaggcacatctgttggttctcaggcctcagataaaaccatctccgcatcatatggccagtgaccgctttctcccttcaagaaaattctgtggctgtgcagtactttgaagttttaattattaacctgctttaattaaagcagtttcctttcttataaagtggaatcaccaaatcttatcacacagagcacagtcctgtagttacccagcccgctccagcagtgcgggagattgtaaggaagcggtggcggctggtgaagcaagtctcacatgtcggcgttcttggccaatggatacaaagataaagaaaatgttgcctttttctaggaactgtcagaaatcctcatgcctttcaagacttctgtgaatgacttgaattttttattccctgcctagggtctgtgaacgaggcctgtctcttccctggggtttctttccatggcctttatttctcctcttccagtgggagttttgcaggctcttctctgtggaaacttcacgagcgttggctgggcctcggcttcgctggagtgtactccagggtgaaggcagagtgggatttgagacccaggttaggcacgacccaggctgagaagggacgtttccatcattcacagtgccctccccacagcactacctcaccccgacccccaccctcactcctaccccaccccgcgatcgtcaggggtgccacggtgggccggagggtgccggctctggctgtccctgtgccggtccctcacaaacctctccccctttgaaactcaagcacagctgcgaggagggcagcgaggagggacccctctctcatggttgtctctttcccccgctatgtcataggtagtggaggaagcgaaggaagtgaacgctgaatgtgacgcatttctgaagagctcagctgtcaccgggcatagcctggaagccccaagtctgttctgactttgcctggctgtctccttgacccgcctcctagatcattgtccttgatgtccaggctgggtcatttaaaatagagatgcaatcaggaaggttgggggacttgggactgtggctgaattgagaccttgctgatgtattcatgtcagcacctgagtcacagcccaggtgcccggaagcagcctcttcgcataggcagtgatttgcgattactttaaagctcaccttttttcttcccctctctgttcgctgctgtcagcataatgattgtgttccttccctatgggatccatctgttttgtaaacaataaagcgtctgagggagtgt

SEQ ID NO: 112973 - DNA, 466 bp, Homo sapiens
  Payload ID: 2105
  Gene Symbol: CANT1
  Gene Name: calcium activated nucleotidase 1
  ENST ID: ENST00000591811
  CDS Start-End: 351-466
aaaccacagctcccagcagccctcgcgccgtccgcgcgcagccgcagagcagaggctgccgggaacgcgggcccagaggcggggcgagcgcgcgcggggcggaagtcggccaccttcctccgtcccggccgttagcccagccaagcccagccaagcccagccaagccccgccgatcgcgggcaccggagccagccccgcagcggagggaccacagagcaccagcctgcatggaacttccttcctcactcagcttcccacgttgccagctgggacaggggagatggagtaattttgctgtggaaagacttcacgtcttgccgaatgaaagtcccgcctgtctgtcacgctgatgcccgtgcagctgtctgagcacccggaatggaatgagtctatgcactccctccggatcagtgtggggggccttcctgtgctggcgtccatgaccaaggccgcggacccccgctt

SEQ ID NO: 112974 - DNA, 881 bp, Homo sapiens
  Payload ID: 2105
  Gene Symbol: CANT1
  Gene Name: calcium activated nucleotidase 1
  ENST ID: ENST00000588075
  CDS Start-End: 652-881
cgcgggcccagaggcggggcgagcgcgcgcggggcggaagtcggccaccttcctccgtcccggccgttagcccagccaagcccagccaagcccagccaagccccgccgatcgcgggcaccggagccagccccgcagcggaaaagcacatctcccaggatcctgagagagcttgaaccagaccactgtggacacggtggccacccgtcaccactacccttcccaaggggagacgaggagcaagtaggcttgagggaaaagctgcacaggactcgtgtcttgaaatgtctaagacgcatgtcagaaatgcagagggaccacagagcaccagcctgcatggaacttccttcctcactcagcttcccacgttgccagctgggacaggggagatggagtaattttgctgtggaaagacttcacgtcttgccgaatgaaagtaagcaaagatactgctagagtcgggaatctagagtcgggaattcattaagccaagggagtaagaatggccacagagtagtgaaatactgtttcttctggaaaagtcagcctccagcgcctgcagcttccggaactaagatgtgactgggcttgcggaggcgctgactcctctcctccctccctggctgtgcaggtcccgcctgtctgtcacgctgatgcccgtgcagctgtctgagcacccggaatggaatgagtctatgcactccctccggatcagtgtggggggccttcctgtgctggcgtccatgaccaaggccgcggacccccgcttccgcccccgctggaaggtgatcctgacgttctttgtgggtgctgccatcctctggctgctctgctcccaccgcccggcccccggcaggccccccacccacaatgcacacaactg

SEQ ID NO: 112975 - DNA, 900 bp, Homo sapiens
  Payload ID: 2105
  Gene Symbol: CANT1
  Gene Name: calcium activated nucleotidase 1
  ENST ID: ENST00000588611
  CDS Start-End: 545-900
gcgcgcgcggggcggaagtcggccaccttcctccgtcccggccgttagcccagccaagcccagccaagcccagccaagccccgccgatcgcgggcaccggagccagccccgcagcgggaagctggagaaacaaaccctcttggctgtctgctgtccagggagtcgccactcccttcattatagccttgctcagagtgcagcggcaggcctggggatggcctcgggagaaaagcacatctcccaggatcctgagagagcttgaaccagaccactgtggacacggtggccacccgtcaccactacccttcccaaggggagacgaggagcaagtaggcttgagggaaaagctgcacaggactcgtgtcttgaaatgtctaagacgcatgtcagaaatgcagagggaccacagagcaccagcctgcatggaacttccttcctcactcagcttcccacgttgccagctgggacaggggagatggagtaattttgctgtggaaagacttcacgtcttgccgaatgaaagtcccgcctgtctgtcacgctgatgcccgtgcagctgtctgagcacccggaatggaatgagtctatgcactccctccggatcagtgtggggggccttcctgtgctggcgtccatgaccaaggccgcggacccccgcttccgcccccgctggaaggacaccggctgggattcggtatcgaatcgcagttatcgcagacctggacacagagtcaagggcccaagaggaaaacacctggttcagttacctgaaaaagggctacctgaccctgtcagacagtggggacaaggtggccgtggaatgggacaaagaccatggggtcctggagtcccacctggcggagaaggggagaggcatggagctatccgacctgattgttt

SEQ ID NO: 112976 - DNA, 614 bp, Homo sapiens
  Payload ID: 2105
  Gene Symbol: CANT1
  Gene Name: calcium activated nucleotidase 1
  ENST ID: ENST00000590370
  CDS Start-End: 419-614
agtcggccaccttcctccgtcccggccgttagcccagccaagcccagccaagcccagccaagccccgccgatcgcgggcaccggagccagccccgcagcggaaaagcacatctcccaggatcctgagagagcttgaaccagaccactgtggacacggtggccacccgtcaccactacccttcccaaggggagacgaggagcaagtaggcttgagggaaaagctgcacaggactcgtgtcttgaaatgtctaagacgcatgtcagaaatgcagagggaccacagagcaccagcctgcatggaacttccttcctcactcagcttcccacgttgccagctgggacaggggagatggagtaattttgctgtggaaagacttcacgtcttgccgaatgaaagtcccgcctgtctgtcacgctgatgcccgtgcagctgtctgagcacccggaatggaatgagtctatgcactccctccggatcagtgtggggggccttcctgtgctggcgtccatgaccaaggccgcggacccccgcttccgcccccgctggaaggtgatcctgacgttctttgtgggtgctgccatcctctggctgctctgctcccaccgcccggccc

SEQ ID NO: 112977 - DNA, 1546 bp, Homo sapiens
  Payload ID: 2105
  Gene Symbol: CANT1
  Gene Name: calcium activated nucleotidase 1
  ENST ID: ENST00000592228
  CDS Start-End: 127-921
ggaagtcggccaccttcctccgtcccggccgttagcccagccaagcccagccaagcccagccaagccccgccgatcgcgggcaccggagccagccccgcagcgggtcccgcctgtctgtcacgctgatgcccgtgcagctgtctgagcacccggaatggaatgagtctatgcactccctccggatcagtgtggggggccttcctgtgctggcgtccatgaccaaggccgcggacccccgcttccgcccccgctggaaggtgatcctgacgttctttgtgggtgctgccatcctctggctgctctgctcccaccgcccggcccccggcaggccccccacccacaatgcacacaactggaggctcggccaggcgcccgccaactggtacaatgacacctaccccctgtctcccccacaaaggacaccggctgggattcggtatcgaatcgcagttatcgcagacctggacacagagtcaagggcccaagaggaaaacacctggttcagttacctgaaaaagggctacctgaccctgtcagacagtggggacaaggtggccgtggaatgggacaaagaccatggggtcctggagtcccacctggcggagaaggggagaggcatggagctatccgacctgattgttttcaatgggaaactctactccgtggatgaccggacgggggtcgtctaccagatcgaaggcagcaaagccgtgccctgggtgattctgtccgacggcgacggcaccgtggagaaaggtaactggaccctgagcagtgcgggagattgtaaggaagcggtggcggctggtgaagcaagtctcacatgtcggcgttcttggccaatggatacaaagataaagaaaatgttgcctttttctaggaactgtcagaaatcctcatgcctttcaagacttctgtgaatgacttgaattttttattccctgcctagggtctgtgaacgaggcctgtctcttccctggggtttctttccatggcctttatttctcctcttccagtgggagttttgcaggctcttctctgtggaaacttcacgagcgttggctgggcctcggcttcgctggagtgtactccagggtgaaggcagagtgggatttgagacccaggtagtggaggaagcgaaggaagtgaacgctgaatgtgacgcatttctgaagagctcagctgtcaccgggcatagcctggaagccccaagtctgttctgactttgcctggctgtctccttgacccgcctcctagatcattgtccttgatgtccaggctgggtcatttaaaatagagatgcaatcaggaaggttgggggacttgggactgtggctgaattgagaccttgctgatgtattcatgtcagcacctgagtcacagcccaggtgcccggaagcagcctcttcgcataggcagtgatttgcgattactttaaagctcaccttttttcttcccctctctgttcgctgctgtcagcataatgattgtgttccttccctatgggatccatctgttttgtaaacaataaagcgtctgagggag

SEQ ID NO: 112978 - DNA, 1669 bp, Homo sapiens
  Payload ID: 2105
  Gene Symbol: CANT1
  Gene Name: calcium activated nucleotidase 1
  Uniprot ID: Q8WVQ1
  ENST ID: ENST00000591773
  CDS Start-End: 401-1606
gcgcgcggggcggaagtcggccaccttcctccgtcccggccgttagcccagccaagcccagccaagcccagccaagccccgccgatcgcgggcaccggagccagccccgcagcgggagcctaacccagaggaagtggagactcctttactgcacatctgtctgctccaggccaggcactgttctaggagccaggatacagaggtggagacagaaacaaacaaaccgataactgtatacaatactctaacgtcagagggaccacagagcaccagcctgcatggaacttccttcctcactcagcttcccacgttgccagctgggacaggggagatggagtaattttgctgtggaaagacttcacgtcttgccgaatgaaagtcccgcctgtctgtcacgctgatgcccgtgcagctgtctgagcacccggaatggaatgagtctatgcactccctccggatcagtgtggggggccttcctgtgctggcgtccatgaccaaggccgcggacccccgcttccgcccccgctggaaggtgatcctgacgttctttgtgggtgctgccatcctctggctgctctgctcccaccgcccggcccccggcaggccccccacccacaatgcacacaactggaggctcggccaggcgcccgccaactggtacaatgacacctaccccctgtctcccccacaaaggacaccggctgggattcggtatcgaatcgcagttatcgcagacctggacacagagtcaagggcccaagaggaaaacacctggttcagttacctgaaaaagggctacctgaccctgtcagacagtggggacaaggtggccgtggaatgggacaaagaccatggggtcctggagtcccacctggcggagaaggggagaggcatggagctatccgacctgattgttttcaatgggaaactctactccgtggatgaccggacgggggtcgtctaccagatcgaaggcagcaaagccgtgccctgggtgattctgtccgacggcgacggcaccgtggagaaaggcttcaaggccgaatggctggcagtgaaggacgagcgtctgtacgtgggcggcctgggcaaggagtggacgaccactacgggtgatgtggtgaacgagaacccggagtgggtgaaggtggtgggctacaagggcagcgtggaccacgagaactgggtgtccaactacaacgccctgcgggctgctgccggcatccagccgccaggctacctcatccatgagtctgcctgctggagtgacacgctgcagcgctggttcttcctgccgcgccgcgccagccaggagcgctacagcgagaaggacgacgagcgcaagggcgccaacctgctgctgagcgcctcccctgacttcggcgacatcgctgtgagccacgtcggggcggtggtccccactcacggcttctcgtccttcaagttcatccccaacaccgacgaccagatcattgtggccctcaaatccgaggaggacagcggcagagtcgcctcctacatcatggccttcacgctggacgggcgcttcctgttgccggagaccaagatcggaagcgtgaaatacgaaggcatcgagttcatttaactcaaaacggaaacactgagcaaggccatcaggactcagcttttataaaaacaagaggagtgc

SEQ ID NO: 112979 - DNA, 599 bp, Homo sapiens
  Payload ID: 2105
  Gene Symbol: CANT1
  Gene Name: calcium activated nucleotidase 1
  ENST ID: ENST00000591625
  CDS Start-End: 554-599
aagtcggccaccttcctccgtcccggccgttagcccagccaagcccagccaagcccagccaagccccgccgatcgcgggcaccggagccagccccgcagcgggaagctggagaaacaaaccctcttggctgtctgctgtccagggagtcgccactcccttcattatagccttgctcagagtgcagcggcaggcctggggatggcctcgggagagggaccacagagcaccagcctgcatggaacttccttcctcactcagcttcccacgttgccagctgggacaggggagatggagtaattttgctgtggaaagacttcacgtcttgccgaatgaaagtaagcaaagatactgctagagtcgggaatctagagtcgggaattcattaagccaagggagtaagaatggccacagagtagtgaaatactgtttcttctggaaaagtcagcctccagcgcctgcagcttccggaactaagatgtgactgggcttgcggaggcgctgactcctctcctccctccctggctgtgcaggtcccgcctgtctgtcacgctgatgcccgtgcagctgtctgagcacccggaatggaatgagtctatgc

SEQ ID NO: 112980 - DNA, 502 bp, Homo sapiens
  Payload ID: 2105
  Gene Symbol: CANT1
  Gene Name: calcium activated nucleotidase 1
  ENST ID: ENST00000592033
  CDS Start-End: 387-502
agaggcggggcgagcgcgcgcggggcggaagtcggccaccttcctccgtcccggccgttagcccagccaagcccagccaagcccagccaagccccgccgatcgcgggcaccggagccagccccgcagcgggaagctggagaaacaaaccctcttggctgtctgctgtccagggagtcgccactcccttcattatagccttgctcagagtgcagcggcaggcctggggatggcctcgggagagggaccacagagcaccagcctgcatggaacttccttcctcactcagcttcccacgttgccagctgggacaggggagatggagtaattttgctgtggaaagacttcacgtcttgccgaatgaaagtcccgcctgtctgtcacgctgatgcccgtgcagctgtctgagcacccggaatggaatgagtctatgcactccctccggatcagtgtggggggccttcctgtgctggcgtccatgaccaaggccgcggacccccgctt

SEQ ID NO: 112981 - DNA, 769 bp, Homo sapiens
  Payload ID: 2105
  Gene Symbol: CANT1
  Gene Name: calcium activated nucleotidase 1
  ENST ID: ENST00000586916
  CDS Start-End: 587-769
agaggcggggcgagcgcgcgcggggcggaagtcggccaccttcctccgtcccggccgttagcccagccaagcccagccaagcccagccaagccccgccgatcgcgggcaccggagccagccccgcagcggaaaagcacatctcccaggatcctgagagagcttgaaccagaccactgtggacacggtggccacccgtcaccactacccttcccaaggggagacgaggagcaagtaggcttgagggaaaagctgcacaggactcgtgtcttgaaatgtctaagacgcatgtcagaaatgcaggagcctaacccagaggaagtggagactcctttactgcacatctgtctgctccaggccaggcactgttctaggagccaggatacagaggtggagacagaaacaaacaaaccgataactgtatacaatactctaacgtcagagggaccacagagcaccagcctgcatggaacttccttcctcactcagcttcccacgttgccagctgggacaggggagatggagtaattttgctgtggaaagacttcacgtcttgccgaatgaaagtcccgcctgtctgtcacgctgatgcccgtgcagctgtctgagcacccggaatggaatgagtctatgcactccctccggatcagtgtggggggccttcctgtgctggcgtccatgaccaaggccgcggacccccgcttccgcccccgctggaaggtgatcctgacgttctttgtgggtgctgccatcctctggctgctctgctcc

SEQ ID NO: 112982 - DNA, 3337 bp, Homo sapiens
  Payload ID: 2105
  Gene Symbol: CANT1
  Gene Name: calcium activated nucleotidase 1
  Uniprot ID: Q8WVQ1
  ENST ID: ENST00000620915
  CDS Start-End: 299-1504
gctgcaggagcctaacccagaggaagtggagactcctttactgcacatctgtctgctccaggccaggcactgttctaggagccaggatacagaggtggagacagaaacaaacaaaccgataactgtatacaatactctaacgtcagaatggccacagagtagtgaaatactgtttcttctggaaaagtcagcctccagcgcctgcagcttccggaactaagatgtgactgggcttgcggaggcgctgactcctctcctccctccctggctgtgcaggtcccgcctgtctgtcacgctgatgcccgtgcagctgtctgagcacccggaatggaatgagtctatgcactccctccggatcagtgtggggggccttcctgtgctggcgtccatgaccaaggccgcggacccccgcttccgcccccgctggaaggtgatcctgacgttctttgtgggtgctgccatcctctggctgctctgctcccaccgcccggcccccggcaggccccccacccacaatgcacacaactggaggctcggccaggcgcccgccaactggtacaatgacacctaccccctgtctcccccacaaaggacaccggctgggattcggtatcgaatcgcagttatcgcagacctggacacagagtcaagggcccaagaggaaaacacctggttcagttacctgaaaaagggctacctgaccctgtcagacagtggggacaaggtggccgtggaatgggacaaagaccatggggtcctggagtcccacctggcggagaaggggagaggcatggagctatccgacctgattgttttcaatgggaaactctactccgtggatgaccggacgggggtcgtctaccagatcgaaggcagcaaagccgtgccctgggtgattctgtccgacggcgacggcaccgtggagaaaggcttcaaggccgaatggctggcagtgaaggacgagcgtctgtacgtgggcggcctgggcaaggagtggacgaccactacgggtgatgtggtgaacgagaacccggagtgggtgaaggtggtgggctacaagggcagcgtggaccacgagaactgggtgtccaactacaacgccctgcgggctgctgccggcatccagccgccaggctacctcatccatgagtctgcctgctggagtgacacgctgcagcgctggttcttcctgccgcgccgcgccagccaggagcgctacagcgagaaggacgacgagcgcaagggcgccaacctgctgctgagcgcctcccctgacttcggcgacatcgctgtgagccacgtcggggcggtggtccccactcacggcttctcgtccttcaagttcatccccaacaccgacgaccagatcattgtggccctcaaatccgaggaggacagcggcagagtcgcctcctacatcatggccttcacgctggacgggcgcttcctgttgccggagaccaagatcggaagcgtgaaatacgaaggcatcgagttcatttaactcaaaacggaaacactgagcaaggccatcaggactcagcttttataaaaacaagaggagtgcacttttgttttgttttgttctttttggaactgtgcctgggttggaggtctggacagggagcccagtcccgggccccatagtggtgcgggcactggacccccgggccccacggaggccgcggtctgaactgctttccatgctgccatctggtggtgatttcggtcacttcaggcattgactcaaggcctgcctaactggctgggtcgtttcttccatccgacctcgtttcttttctttcctatgttcttttgttcagtgaatatccctagagctcctaccatatgtcaggccctatgcctcaccctgagaacgcagtgagcatgaggtggacctgtttgctgggaaccccaggtcacccccttttcttcctactctgtgcctggagcatcatgtccacccctgcagatccttggaaaagaaaatgtttatgttgcagggtattgcatggtcacgagtgagggcaggcccctggggacacatctgcccacagctgcacaggccagggcgcaggcacatctgttggttctcaggcctcagataaaaccatctccgcatcatatggccagtgaccgctttctcccttcaagaaaattctgtggctgtgcagtactttgaagttttaattattaacctgctttaattaaagcagtttcctttcttataaagtggaatcaccaaatcttatcacacagagcacagtcctgtagttacccagcccgctccagcagtgcgggagattgtaaggaagcggtggcggctggtgaagcaagtctcacatgtcggcgttcttggccaatggatacaaagataaagaaaatgttgcctttttctaggaactgtcagaaatcctcatgcctttcaagacttctgtgaatgacttgaattttttattccctgcctagggtctgtgaacgaggcctgtctcttccctggggtttctttccatggcctttatttctcctcttccagtgggagttttgcaggctcttctctgtggaaacttcacgagcgttggctgggcctcggcttcgctggagtgtactccagggtgaaggcagagtgggatttgagacccaggttaggcacgacccaggctgagaagggacgtttccatcattcacagtgccctccccacagcactacctcaccccgacccccaccctcactcctaccccaccccgcgatcgtcaggggtgccacggtgggccggagggtgccggctctggctgtccctgtgccggtccctcacaaacctctccccctttgaaactcaagcacagctgcgaggagggcagcgaggagggacccctctctcatggttgtctctttcccccgctatgtcataggtagtggaggaagcgaaggaagtgaacgctgaatgtgacgcatttctgaagagctcagctgtcaccgggcatagcctggaagccccaagtctgttctgactttgcctggctgtctccttgacccgcctcctagatcattgtccttgatgtccaggctgggtcatttaaaatagagatgcaatcaggaaggttgggggacttgggactgtggctgaattgagaccttgctgatgtattcatgtcagcacctgagtcacagcccaggtgcccggaagcagcctcttcgcataggcagtgatttgcgattactttaaagctcaccttttttcttcccctctctgttcgctgctgtcagcataatgattgtgttccttccctatgggatccatctgttttgtaaacaataaagcgtctgagggagtgt

SEQ ID NO: 112983 - DNA, 1247 bp, Homo sapiens
  Payload ID: 2106
  Gene Symbol: CIB1
  Gene Name: calcium and integrin binding 1 (calmyrin)
  Uniprot ID: Q99828
  ENST ID: ENST00000328649
  CDS Start-End: 163-738
ggctgggaacgcctggcagcttttaggagggggcgggcccgggggtggtggccccaggagcggttgccgcggggaccgggcagtgacgcggcccaagggcggaagtgagaaagttgtctgcgtctcgaggcgagttggcggagctgtgcgcgcggcggggcgatggggggctcgggcagtcgcctgtccaaggagctgctggccgagtaccaggacttgacgttcctgacgaagcaggagatcctcctagcccacaggcggttttgtgagctgcttccccaggagcagcggagcgtggagtcgtcacttcgggcacaagtgcccttcgagcagattctcagccttccagagctcaaggccaaccccttcaaggagcgaatctgcagggtcttctccacatccccagccaaagacagccttagctttgaggacttcctggatctcctcagtgtgttcagtgacacagccacgccagacatcaagtcccattatgccttccgcatctttgactttgatgatgacggaaccttgaacagagaagacctgagccggctggtgaactgcctcacgggagagggcgaggacacacggcttagtgcgtctgagatgaagcagctcatcgacaacatcctggaggagtctgacattgacagggatggaaccatcaacctctctgagttccagcacgtcatctcccgttctccagactttgccagctcctttaagattgtcctgtgacagcagccccagcgtgtgtcctggcaccctgtccaagaacctttctactgctgagctgtggccaaggtcaagcctgtgttgccagtgcgggccaagctggcccagcctggagctggcgctgtgcagcctcaccccgggcaggggcggccctcgttgtcagggcctctcctcactgctgttgtcattgctccgtttgtgtttgtactaatcagtaataaaggtttagaagtttgaccctatgtgtgacatgagatacactggtatgaggaaggactggacttctcttctaagagccttcaatcatcctaggaataagcagcatatcgagcagaggccagcgggaagtcaagccgcacccacgctggctgtccccgtgggagggtgtgaggatgaaggggcagcaggaggtgtgggactcgcctgtatcctgattggggtggtggttagatgagtctctgcatgcatcaaaatgtaaagaaccgtacatcagtaaagtctattttactgca

SEQ ID NO: 112984 - DNA, 1096 bp, Homo sapiens
  Payload ID: 2106
  Gene Symbol: CIB1
  Gene Name: calcium and integrin binding 1 (calmyrin)
  Uniprot ID: Q99828
  ENST ID: ENST00000612800
  CDS Start-End: 163-858
ggctgggaacgcctggcagcttttaggagggggcgggcccgggggtggtggccccaggagcggttgccgcggggaccgggcagtgacgcggcccaagggcggaagtgagaaagttgtctgcgtctcgaggcgagttggcggagctgtgcgcgcggcggggcgatggggggctcgggcagtcgcctgtccaaggagctgctggccgagtaccaggacttgacgttcctgacgaagcaggagatcctcctttctgtgtacgtggttttagctcctcacctggttgacaatgagcagcaggcaaggagtgggaatgaacacacagggagaccgatcgctgagaacaccgacagttcccctctctctaccagagcccacaggcggttttgtgagctgcttccccaggagcagcggagcgtggagtcgtcacttcgggcacaagtgcccttcgagcagattctcagccttccagagctcaaggccaaccccttcaaggagcgaatctgcagggtcttctccacatccccagccaaagacagccttagctttgaggacttcctggatctcctcagtgtgttcagtgacacagccacgccagacatcaagtcccattatgccttccgcatctttgactttgatgatgacggaaccttgaacagagaagacctgagccggctggtgaactgcctcacgggagagggcgaggacacacggcttagtgcgtctgagatgaagcagctcatcgacaacatcctggaggagtctgacattgacagggatggaaccatcaacctctctgagttccagcacgtcatctcccgttctccagactttgccagctcctttaagattgtcctgtgacagcagccccagcgtgtgtcctggcaccctgtccaagaacctttctactgctgagctgtggccaaggtcaagcctgtgttgccagtgcgggccaagctggcccagcctggagctggcgctgtgcagcctcaccccgggcaggggcggccctcgttgtcagggcctctcctcactgctgttgtcattgctccgtttgtgtttgtactaatcagtaataaaggtttagaagtttgaccct

SEQ ID NO: 112985 - DNA, 1598 bp, Homo sapiens
  Payload ID: 2107
  Gene Symbol: CIB2
  Gene Name: calcium and integrin binding family member 2
  Uniprot ID: O75838
  ENST ID: ENST00000258930
  CDS Start-End: 330-893
gcgggagccaagggttcgtgccgggcagcgtctcccggggccaggtcgcctcctgccgggacccgggcgcgctgcagccgcggagccgggtgccccgccctcttcccgccggcggcggagtcgctgccgctccgggttcccgtccccgcctccgagacccccgcgcgcctcctccaggcgagctgcggggcgggaagggtccggccaccgtgggccgctgccagccgcggggctgccgagggccgcgggcacggggcgctggctccgggtctggcggccgctgatgggagtcggagcccgggcgggcgagcggcggcgcggcggccaccatggggaacaagcagaccatcttcaccgaagagcagctagacaactaccaggactgcaccttcttcaataagaaggacatcctcaagctgcattcgcgattctatgagctggcccccaacctcgtcccaatggactacaggaagagccccatcgtccacgtgcccatgagcctcatcatccagatgccagagctccgggagaatcccttcaaagaaaggatcgtggcggcgttttccgaggatggtgaggggaacctcactttcaacgactttgtggacatgttttccgtgctctgcgagtcggctccccgagagctcaaggcaaactatgccttcaagatctatgacttcaacactgacaacttcatctgcaaggaggacctggagctgacgctggcccggctcactaagtcagagctggatgaggaggaggtggtgcttgtgtgcgacaaggtcattgaggaggctgacttggacggtgacggcaagctgggctttgctgacttcgaggacatgattgccaaggcccctgacttcctcagcactttccacatccggatctgaggacactgccgaggctgtaggggcctagaagtccaccatcctgccctgcagtcacatgggtgtggcctccaagctccccaggaaagcagtggcagcctctggggtttacaccacaaatatatcctgtggccctttcagcaaaaaaaaaaccttaaccaggaagggggcctgtgaaggttaggacccttcccacagccccgctgtggtccagccccgggacccatggcctctctccaggccctccgcaccccgccccatgccccagtcctttcctactccagaaatgctccccacccccccaaagagggaaaagcagataacccaacaggaggtggtggggtctgacgtgtccaagtgctggcagacaccctggtcacccaggacagagcggaaaaaaaaaaaagaggtcagggttttaacgagctatgcaatctttttccaaaacccaaggttgggctgcttcccacccctgcctgttccccttctcccggcctccttcacaatgtgaagctgtgggtgcagtgggcccaagggctcttgctcctgtctctgcctctgggtcatgagtaccaccctgcctgcctccccaacaccgtggaatcctcactggtgtgctgtccacagatttgtgaactcctggtagtaaaacacttttgcatccctttgctctccatgtatgctaatgttaggaaatgtttgagggta

SEQ ID NO: 112986 - DNA, 1511 bp, Homo sapiens
  Payload ID: 2107
  Gene Symbol: CIB2
  Gene Name: calcium and integrin binding family member 2
  Uniprot ID: O75838
  ENST ID: ENST00000539011
  CDS Start-End: 415-849
aagggttcgtgccgggcagcgtctcccggggccaggtcgcctcctgccgggacccgggcgcgctgcagccgcggagccgggtgccccgccctcttcccgccggcggcggagtcgctgccgctccgggttcccgtccccgcctccgagacccccgcgcgcctcctccaggcgagctgcggggcgggaagggtccggccaccgtgggccgctgccagccgcggggctgccgagggccgcgggcacggggcgctggctccgggtctggcggccgctgatgggagtcggagcccgggcgggcgagcggcggcgcggcggccaccatggggaacaagcagaccatcttcaccgaagagcagctagacaactaccaggctgcattcgcgattctatgagctggcccccaacctcgtcccaatggactacaggaagagccccatcgtccacgtgcccatgagcctcatcatccagatgccagagctccgggagaatcccttcaaagaaaggatcgtggcggcgttttccgaggatggtgaggggaacctcactttcaacgactttgtggacatgttttccgtgctctgcgagtcggctccccgagagctcaaggcaaactatgccttcaagatctatgacttcaacactgacaacttcatctgcaaggaggacctggagctgacgctggcccggctcactaagtcagagctggatgaggaggaggtggtgcttgtgtgcgacaaggtcattgaggaggctgacttggacggtgacggcaagctgggctttgctgacttcgaggacatgattgccaaggcccctgacttcctcagcactttccacatccggatctgaggacactgccgaggctgtaggggcctagaagtccaccatcctgccctgcagtcacatgggtgtggcctccaagctccccaggaaagcagtggcagcctctggggtttacaccacaaatatatcctgtggccctttcagcaaaaaaaaaaccttaaccaggaagggggcctgtgaaggttaggacccttcccacagccccgctgtggtccagccccgggacccatggcctctctccaggccctccgcaccccgccccatgccccagtcctttcctactccagaaatgctccccacccccccaaagagggaaaagcagataacccaacaggaggtggtggggtctgacgtgtccaagtgctggcagacaccctggtcacccaggacagagcggaaaaaaaaaaaagaggtcagggttttaacgagctatgcaatctttttccaaaacccaaggttgggctgcttcccacccctgcctgttccccttctcccggcctccttcacaatgtgaagctgtgggtgcagtgggcccaagggctcttgctcctgtctctgcctctgggtcatgagtaccaccctgcctgcctccccaacaccgtggaatcctcactggtgtgctgtccacagatttgtgaactcctggtagtaaaacacttttgcatccc

SEQ ID NO: 112987 - DNA, 804 bp, Homo sapiens
  Payload ID: 2107
  Gene Symbol: CIB2
  Gene Name: calcium and integrin binding family member 2
  ENST ID: ENST00000560618
  CDS Start-End: 143-646
tgatgggagtcggagcccgggcgggcgagcggcggcgcggcggccaccatggggaacaagcagaccatcttcaccgaagagcagctagacaactaccaggctgcattcgcgattctatgagctggcccccaacctcgtcccaatggactacaggaagagccccatcgtccacgtgcccatgagcctcatcatccagatgccagagctccgggagaatcccttcaaagaaaggatcgtggcggcgttttccgaggatggtgaggggaacctcactttcaacgactttgtggacatgttttccgtgctctgcgagtcggctccccgagagctcaaggcaaactatgccttcaagatctatgacttcaacactgacaacttcatctgcaaggaggacctggagctgacgctggcccggctcactaagtcagagctggatgaggaggaggtggtgcttgtgtgcgacaaggtcattgaggaggctgacttggacggtgacggcaagctgggctttgctgacttcgaggacatgattgccaaggcccctgacttcctcaggtgctgccactacaggggccgggcttgggcagggcagagcagggcaggccgggatgttggggctgaggcccctatcactcgctatttgtgagcagtggtgtgcggccaggaagcaggaggtcacgttcaagccacccttgccctagacgtgtgactggcctttgtcccctgcagggggaaggttgaagacctgggggccccttcagtgataagtgggggcagaactccctgggcaccgctgttcctccg

SEQ ID NO: 112988 - DNA, 462 bp, Homo sapiens
  Payload ID: 2107
  Gene Symbol: CIB2
  Gene Name: calcium and integrin binding family member 2
  ENST ID: ENST00000559645
  CDS Start-End: 21-462
gcggcggcgcggcggccaccatggggaacaagcagaccatcttcaccgaagagcagctagacaactaccaggactgcaccttcttcaataagaaggacatcctcaaatggggaaaccgaggctcagagggatttggtcactcctccagggtcacacaggctgtccacagtctggctccggggccctcctgcttatcctgcacccacagtgattgctgtgtgtgttttcttcaggagaatcccttcaaagaaaggatcgtggcggcgttttccgaggatggtgaggggaacctcactttcaacgactttgtggacatgttttccgtgctctgcgagtcggctccccgagagctcaaggcaaactatgccttcaagatctatgacttcaacactgacaacttcatctgcaaggaggacctggagctgacgctggcccggctcactaagtcagagctggatgagg

SEQ ID NO: 112989 - DNA, 390 bp, Homo sapiens
  Payload ID: 2107
  Gene Symbol: CIB2
  Gene Name: calcium and integrin binding family member 2
  ENST ID: ENST00000561190
  CDS Start-End: 11-390
ggcggccaccatggggaacaagcagaccatcttcaccgaagagcagctagacaactaccaggactgcaccttcttcaataagaaggacatcctcaagctgcattcgcgattctatgagctggcccccaacctcgtcccaatggactacaggaagagccccatcgtccacgtgcccatgagcctcatcatccagatgccagagctccgggagaatcccttcaaagaaaggatcgtggcggcgttttccgaggatggtgaggggaacctcactttcaacgactttgtggacatgttttccgtgctctgcgagtcggctccccgagagctcaaggcaaactatgccttcaagatctatgcactttccacatccggatctgaggacactgccga

SEQ ID NO: 112990 - DNA, 443 bp, Homo sapiens
  Payload ID: 2107
  Gene Symbol: CIB2
  Gene Name: calcium and integrin binding family member 2
  ENST ID: ENST00000559054
  CDS Start-End: 280-443
gcggccgctgatgggagtcggagcccgggcgggcgagcggcggcgcggcggccaccatggggaacaagcagaccatcttcaccgaagagcagctagacaactaccaggactgcaccttcttcaataagaaggacatcctcaagtagatccgattgctccccaggacacagctcctgcattcccacattgaggccgagtgggcagcccaccctattcagtcaccttgctttttataggctgcattcgcgattctatgagctggcccccaacctcgtcccaatggactacaggaagagccccatcgtccacgtgcccatgagcctcatcatccagatgccagagctccgggagaatcccttcaaagaaaggatcgtggcggcgttttccgaggatggtgaggggaacctcactttcaacgactttgtggacatgttttccgtgct

SEQ ID NO: 112991 - DNA, 934 bp, Homo sapiens
  Payload ID: 2107
  Gene Symbol: CIB2
  Gene Name: calcium and integrin binding family member 2
  Uniprot ID: O75838
  ENST ID: ENST00000557846
  CDS Start-End: 219-635
gcggcggagtcgctgccgctccgggttcccgtccccgcctccgagacccccgcgcgcctcctccaggcgagctgcggggcgggaagggtccggccaccgtgggccgctgccagccgcggggctgccgagggccgcgggcacggggcgctggctccgggtctggcggccgctgatgggagtcggagcccgggcgggcgagcggcggcgcggcggccaccatggggaacaagcagaccatcttcaccgaagagcagctagacaactaccaggagaatcccttcaaagaaaggatcgtggcggcgttttccgaggatggtgaggggaacctcactttcaacgactttgtggacatgttttccgtgctctgcgagtcggctccccgagagctcaaggcaaactatgccttcaagatctatgacttcaacactgacaacttcatctgcaaggaggacctggagctgacgctggcccggctcactaagtcagagctggatgaggaggaggtggtgcttgtgtgcgacaaggtcattgaggaggctgacttggacggtgacggcaagctgggctttgctgacttcgaggacatgattgccaaggcccctgacttcctcagcactttccacatccggatctgaggacactgccgaggctgtaggggcctagaagtccaccatcctgccctgcagtcacatgggtgtggcctccaagctccccaggaaagcagtggcagcctctggggtttacaccacaaatatatcctgtggccctttcagcaaaaaaaaaaccttaaccaggaagggggcctgtgaaggttaggacccttcccacagccccgctgtggtccagccccgggacccatggcctctctccaggccctccgcaccccgccccatgccccagtcctttcctactccagaaatgctccccacccccc

SEQ ID NO: 112992 - DNA, 669 bp, Homo sapiens
  Payload ID: 2107
  Gene Symbol: CIB2
  Gene Name: calcium and integrin binding family member 2
  ENST ID: ENST00000557818
  CDS Start-End: 1-147
cgattctatgagctggcccccaacctcgtcccaatggactacaggaagagccccatcgtccacgtgcccatgagcctcatcatccagatgccagagctccggggatcttgtccaaatgccaattcaggctcagtacatgtggagtagagtcaggattctgcttttcgagcaagttcccaggagaatcccttcaaagaaaggatcgtggcggcgttttccgaggatggtgaggggaacctcactttcaacgactttgtggacatgttttccgtgctctgcgagtcggctccccgagagctcaaggcaaactatgccttcaagatctatgacttcaacactgacaacttcatctgcaaggaggacctggagctgacgctggcccggctcactaagtcagagctggatgaggaggaggtggtgcttgtgtgcgacaaggtcattgaggaggctgacttggacggtgacggcaagctgggctttgctgacttcgaggacatgattgccaaggcccctgacttcctcagcactttccacatccggatctgaggacactgccgaggctgtaggggcctagaagtccaccatcctgccctgcagtcacatgggtgtggcctccaagctccccaggaaagcagtggcagcctctggggtttacaccacaaatatatc

SEQ ID NO: 112993 - DNA, 535 bp, Homo sapiens
  Payload ID: 2107
  Gene Symbol: CIB2
  Gene Name: calcium and integrin binding family member 2
  ENST ID: ENST00000557917
  CDS Start-End: 57-335
gcggccgctgatgggagtcggagcccgggcgggcgagcggcggcgcggcggccaccatggggaacaagcagaccatcttcaccgaagagcagctagacaactaccaggactgcaccttcttcaataagaaggacatcctcaagagaatcccttcaaagaaaggatcgtggcggcgttttccgaggatggtgaggggaacctcactttcaacgactttgtggacatgttttccgtgctctgcgagtcggctccccgagagctcaaggcaaactatgccttcaagatctatgacttcaacactgacaacttcatctgcaaggaggacctggagctgacgctggcccggctcactaagtcagagctggatgaggaggaggtggtgcttgtgtgcgacaaggtcattgaggaggctgacttggacggtgacggcaagctgggctttgctgacttcgaggacatgattgccaaggcccctgacttcctcagcactttccacatccggatctgaggacactgccgaggctgtaggggccta

SEQ ID NO: 112994 - DNA, 711 bp, Homo sapiens
  Payload ID: 2108
  Gene Symbol: CIB3
  Gene Name: calcium and integrin binding family member 3
  Uniprot ID: Q96Q77
  ENST ID: ENST00000269878
  CDS Start-End: 51-614
agctgggagcctttggggtgcatccccaagtctgggctgtggttcacaccatgggcaacaagcagacagtcttcacacacgagcagctggaagcgtatcaggactgcacatttttcacaaggaaggagatcatgaggctcttctatcgctaccaggacctggccccacagctcgtgcccctcgactataccacctgccccgatgtgaaggtgccctacgagctcattggcagcatgcccgagctgaaggacaaccccttccgccagaggattgcccaggtattctctgaggatggggatggccacatgaccctggacaactttttggacatgttttccgtgatgagtgaaatggctccccgcgacctcaaggcttactatgcttttaaaatttatgattttaacaacgacgactacatttgtgcgtgggacctggagcagacggtgaccaaactgacgcggggggggctgagtgccgaggaggtgagcctggtatgtgagaaggtgctggatgaggctgatggagaccatgatgggcggctgtccctggaagatttccagaacatgatcctccgggcaccagacttcctcagcaccttccacatccgaatctgatggcaccacagaggagccgagctataggagggcggggtgacccctcacccgctgtggactctggtttctgagaataaacacaagtcactgagtcaca

SEQ ID NO: 112995 - DNA, 467 bp, Homo sapiens
  Payload ID: 2108
  Gene Symbol: CIB3
  Gene Name: calcium and integrin binding family member 3
  Uniprot ID: Q96Q77
  ENST ID: ENST00000379859
  CDS Start-End: 1-417
atgggcaacaagcagacagtcttcacacacgagcagctggaagcgtatcaggacaaccccttccgccagaggattgcccaggtattctctgaggatggggatggccacatgaccctggacaactttttggacatgttttccgtgatgagtgaaatggctccccgcgacctcaaggcttactatgcttttaaaatttatgattttaacaacgacgactacatttgtgcgtgggacctggagcagacggtgaccaaactgacgcggggggggctgagtgccgaggaggtgagcctggtatgtgagaaggtgctggatgaggctgatggagaccatgatgggcggctgtccctggaagatttccagaacatgatcctccgggcaccagacttcctcagcaccttccacatccgaatctgatggcaccacagaggagccgagctataggagggcggggtgacccctcaccc

SEQ ID NO: 112996 - DNA, 595 bp, Homo sapiens
  Payload ID: 2108
  Gene Symbol: CIB3
  Gene Name: calcium and integrin binding family member 3
  ENST ID: ENST00000597251
  CDS Start-End: 1-138
atgggcaacaagcagacagtcttcacacacgagcagctggaagcgtatcaggactgcacatttttcacaaggaaggagatcatgaggacctggccccacagctcgtgcccctcgactataccacctgccccgatgtgaaggtgccctacgagctcattggcagcatgcccgagctgaaggacaaccccttccgccagaggattgcccaggtattctctgaggatggggatggccacatgaccctggacaactttttggacatgttttccgtgatgagtgaaatggctccccgcgacctcaaggcttactatgcttttaaaatttatgattttaacaacgacgactacatttgtgcgtgggacctggagcagacggtgaccaaactgacgcggggggggctgagtgccgaggaggtgagcctggtatgtgagaaggtgctggatgaggctgatggagaccatgatgggcggctgtccctggaagatttccagaacatgatcctccgggcaccagacttcctcagcaccttccacatccgaatctgatggcaccacagaggagccgagctataggagggcggggtgacccctcaccc

SEQ ID NO: 112997 - DNA, 773 bp, Homo sapiens
  Payload ID: 2109
  Gene Symbol: CIB4
  Gene Name: calcium and integrin binding family member 4
  Uniprot ID: A0PJX0
  ENST ID: ENST00000288861
  CDS Start-End: 55-612
gcgagtccttgaggctgaggttctactgctggcagacagaaaggtgtggttggcatggggcaatgcttgaggtatcagatgcactgggaggacctggaagagtaccaggccctgaccttcctgaccagaaatgaaattctgtgcatccatgacaccttcctgaagctctgccctcctgggaagtactacaaggaggcaacgctcaccatggaccaggtcagctccctgccagctctgcgggtcaaccctttcagagaccgtatctgcagagtgttctcccacaaaggcatgttctcctttgaggatgtgctgggcatggcatctgtgttcagcgagcaggcctgcccaagcctgaagattgagtatgcctttcgcatctatgattttaatgagaatggcttcattgatgaggaggatctgcagaggatcatcctgcgactgctgaacagtgatgacatgtctgaggacctcctgatggacctcacgaaccacgtcctgagtgagtcggatctggacaatgacaacatgctgtccttctcagagtttgaacatgcaatggccaagtctccagatttcatgaactcctttcggattcacttctggggatgctgatgtagcggcaaacacctgacatggcagcctcgagggagaccacaggaatcgaaccccctccagcactggagggagctggtttgaagtatgactttgtactgggcccacactcacctctagaatattgtttattagataaaagaaaaagcttttccttagcc

SEQ ID NO: 112998 - DNA, 5866 bp, Homo sapiens
  Payload ID: 2110
  Gene Symbol: CALCOCO1
  Gene Name: calcium binding and coiled-coil domain 1
  Uniprot ID: Q9P1Z2
  ENST ID: ENST00000262059
  CDS Start-End: 367-2439
aaaccagcagccacccctaatgcagccggccccctcctaagggatcatgggccttgaagtcctttgctggccacaccctcgttttctgtcataggagtgagaactacgcctcccaggatgccgcggtgaggccgccgtcacggacgccctcttccccgccctccttgcgcgcagccttctgggatgtatagtcctagatccgagcacgcagcggcaaaagggcgcagaagaaccacaaaccccagaagccctcgcgcccactcttctccctcccctccagaagtcggagtgctgtttttgttgttggtgaaaggtgaggggaacagctgatccgtctgttgggaggacagatatctcaaggccaggatggaagaatcaccactaagccgggcaccatcccgtggtggagtcaactttctcaatgtagcccggacctacatccccaacaccaaggtggaatgtcactacacccttcccccaggcaccatgcccagtgccagtgactggattggcatcttcaaggtggaggctgcctgtgttcgggattaccacacatttgtgtggtcttccgtgcctgaaagtacaactgatggttcccccattcacaccagtgtccagttccaagccagctacctgcccaaaccaggagctcagctctaccagttccgatatgtgaaccgccagggccaggtgtgtgggcagagcccccctttccagttccgagagccaaggcccatggatgaactggtgaccctggaggaggctgatgggggctctgacatcctgctggttgtccccaaggcaactgtgttacagaaccagctcgatgagagccagcaagaacggaatgacctgatgcagctgaagctacagctggagggacaggtgacagagctgaggagccgagtgcaggagctcgagagggctctggcaactgccaggcaggagcacacggagctgatggaacagtacaaggggatttcccggtcccatggggagatcacagaagagagggacatcctgagccggcaacagggagaccatgtggcacgcatcctggagctagaggatgacatccagaccatcagtgagaaagtgctgacgaaggaagtggagctggacaggcttagagacacagtgaaggccctgactcgggaacaagagaagctccttgggcaactgaaagaagtacaagcagacaaggagcaaagtgaggctgagctccaagtggcacaacaggagaaccatcacttaaatttggacctgaaggaggcgaagagctggcaagaggagcagagtgctcaggctcagcgactgaaagacaaggtggcccagatgaaggacaccctaggccaggcccagcagcgggtggccgagctggagcccttgaaggagcagcttcgaggggcccaggagcttgcagcctcaagccagcagaaagccacccttcttggggaggagttggccagtgcagcagcagccagggaccgcaccatagccgaactacaccgcagccgcctggaagtggctgaagttaacggcaggctggctgagctcggtttgcacttgaaggaagaaaaatgccaatggagcaaggagcgggcagggctgctgcagagtgtggaggcagagaaggacaagatcctgaagctgagtgcagagatacttcgattggagaaggcagttcaggaggagaggacccaaaaccaagtgttcaagactgagctggcccgggagaaggattctagcctggtacagttgtcagaaagtaagcgggagctgacagagctgcggtcagccctgcgtgtgctccagaaggaaaaggagcagttacaggaggagaaacaggaattgctagagtacatgagaaagctagaggcccgcctggagaaggtggcagatgagaagtggaatgaggatgccaccacagaggatgaggaggccgctgtggggctgagctgcccggcagctctgacagactcagaggacgagtccccagaagacatgaggctcccaccctatggcctttgtgagcgtggagacccaggctcctctcctgctgggcctcgagaggcttctccccttgttgtcatcagccagccggctcccatttctcctcacctctctgggccagctgaggacagtagctctgactcggctgaagatgagaagtcagtcctgatggcagctgtgcagagtgggggtgaggaggccaacttactgcttcctgaactgggcagtgccttctatgacatggccagtggctttacagtgggtaccctgtcagaaaccagcactgggggccctgccacccccacatggaaggagtgtcctatctgtaaggagcgctttcctgctgagagtgacaaggatgccctggaggaccacatggatggacacttctttttcagcacccaggaccccttcacctttgagtgatcttactccctcgtacatgcacaaatacacactcatgcacacacacactcacacacatgcatacacttaggtttcatgcccattttctatcacactgggctccatgatattctgttccctaagaactgcttctgtgtgccctgttttcatcccaagatttctcacttcatcctctcctacctggctcttttgtcccagggaggggtcctgttcggaagcagtggctgaatttatcccctgaaagtggttttggaggaaccgggatggaggaggccttcccctgtgggaatagaatcgtccactcctagccctggttgcttctgatacacagccactgcacacacacactcacactcacactcccttgtctgatgccccaaagccaattcctggggcaccctaccctctcttatttggagtttccgttggtttacctgagttttctctggggtctgcacagaggcagcagcatggacatcatggcctctcaggtcccttttggttctcagtttcattggttcctctttctgttcccccattgacttctgtgccccaccctagccttttccataaccttaggtattcagtttggaggggttttttgtatttttgaggattcctgtattctgtatcctctcctcgcatctcctcacatggaaagaaataatgtatttgtgccttctgtgaggaatggggggaacaagtggtcccaggtatccccatttccaaggcccccctccctctccaggtccccccacagcaataaaagcttccccctgatatccatccctttgtagtttgaacaaatatatttatatgatatgtatgactgttgtcacaaaatgtgttcttatcatgaggtgtgactggaacacagggcccagacctccagctcttagaccctggtggagggaggagggaaagaggggacgcatccctgcctcatggcaggggatgctgggcagttactgtcctgtcgtgcctcctggtgtgctggccatgagtgggttgtctcaagtgggagtctggcttggataatgcggcagttggggagggagcaaactcatgggtccctgtcacttctgctcagggtttagtcccagggtgggtgcatgccatggaaaagtgggacaagtttcccactgccgagaacttcacccttcatagcagccatcactgtaccttatgccaaaggacaggctttattcctgtcaagagcgtacacctttgagtatctacttagtaaaaaatgccctaagcctcatacctctaaaggcgattttatattcctcctgtttctgtttctgtttctttctctgttgccatcccctcatacctgtatgcacactctgcctcaacagtcacaaaaacacattcatccactctaaccagcttcacaggctagacagacacatacacagcatcgtaaagcatttgttaaggacctgcacgctcaccaaggctctcagcaatggcctgcacaagcacatgcctacaaccccctcgtcctccaacccaatagctcccttctcagctgccctcctctcccttcagggcccctgtgtggaccacccccaccattccctttctccattcacctgaaatgctcctgtccaccccctttccagccccacctggatgacttcttacatcgttccttcttccctcacgtctccgtctcctagcaaccccatcccgttccctgaatcccttccaaggaaattagagataatggatctctcctctctccatcccaacccctctttattgatcctcctttaatgaaagttaattataacaatgatttaattaatagaatccctctcttcctttattgcttcccgtattaagactattaataaatacgagctgggctgacagaggcatccatcacccgcctgggattccccccatccctccttttaccttcccccctctccctctccctctcttggcctataaacttgccggggtagtgggggttaatcagagaggaattatgagccaacatccccagcaggaggtgcatttaatgaaatcatgtgtgatttattttctgggggaggttggggcgagaagaatctgggacccacacctcctggcttccagtgagtggctgccttgtgcaaaaaaggagaatagtagacaaacaggaacccaggcccctgctcccatgccacagcccctgccaagccgcacatacacccacaggagccacatggctagctgcacaaggccactgatacagacactgtcagactaaaagcacttaagaggactgcggtataggttttgttctttccaacctcgaaaacttcacatgggtccttctcacctccttcctttctctccagccctgttctgcttcactgtcccgaatctgcttcatactcccctcctccatgaagccccccaaccccccaccaggctcctcaacatggatatctagagtttctagctgctcctttctctgccctttgtgtgtctttctggcatgcaatttgcagtttcagactgggggtgccacaaaatgtggggccatttctcttccttactcatggtttgcctatcccagtatccaaagcatggtccccgacacagagggggctcaaggaagggtaattgacggcatgggctgggggaaacccaggggcagccagcttccaattctagttctctttcctactcactgaggggtatttggcaactcagcctttctacttatttctcttctataatggatcatccctttcctccctgctccccagcatccatgcaaaagccgatagatctgaatgggcttgagactctaatgtgaaaggagatgtcagccaagtagcagcaaataggaactcgcgtcagtatttggtggtgaaagaacgaatccaaacacaccactcccccacttatcgaacctcaatggccacctgttacctacaggaatgagaaatgtagattgcttagtgtgccagtcagggtcttcaccatctgtcccaacttgcccttccatttcccatctaccctaaggaaccctgtactccagtataacagaaccattccacaaaaacatacactactttcctcctagctcaaaggataccacctacatggagccttacttgactgccctcagttatcctttgacataccacgtagagcactttataaaaagatgctacatgtgtttacaactttttattctccctaaactgtaagcaacttgaaggcagattctatgcttatacatcactgtgttcctaaaatctagtatagagactggaacataggaccagtcctccagaaataatctttaagttattttaatgaaatgttttatacatacaaaataatatatgtaatgaataataaagtgaacatcattgagctcaccaactagcttcaaataaatattaccaataccattaaa

SEQ ID NO: 112999 - DNA, 2706 bp, Homo sapiens
  Payload ID: 2110
  Gene Symbol: CALCOCO1
  Gene Name: calcium binding and coiled-coil domain 1
  Uniprot ID: Q9P1Z2
  ENST ID: ENST00000430117
  CDS Start-End: 61-1881
gtgaaaggtgaggggaacagctgatccgtctgttgggaggacagatatctcaaggccaggatggaagaatcaccactaagccgggcaccatcccgtggtggagtcaactttctcaatgtagcccggacctacatccccaacaccaaggtggaatgtcactacacccttcccccaggcaccatgcccagtgccagtgactggattggcatcttcaaggtggaggctgcctgtgttcgggattaccacacatttgtgtggtcttccgtgcctgaaagtacaactgatggttcccccattcacaccagtgtccagttccaagagccaaggcccatggatgaactggtgaccctggaggaggctgatgggggctctgacatcctgctggttgtccccaaggcaactgtgttacagaaccagctcgatgagagccagcaagaacggaatgacctgatgcagctgaagctacagctggagggacaggtgacagagctgaggagccgagtgcaggagctcgagagggctctggcaactgccaggcaggagcacacggagctgatggaacagtacaaggggatttcccggtcccatggggagatcacagaagagagggacatcctgagccggcaacagggagaccatgtggcacgcatcctggagctagaggatgacatccagaccatcagtgagaaagtgctgacgaaggaagtggagctggacaggcttagagacacagtgaaggccctgactcgggaacaagagaagctccttgggcaactgaaagaagtacaagcagacaaggagcaaagtgaggccgagctggagcccttgaaggagcagcttcgaggggcccaggagcttgcagcctcaagccagcagaaagccacccttcttggggaggagttggccagtgcagcagcagccagggaccgcaccatagccgaactacaccgcagccgcctggaagtggctgaagttaacggcaggctggctgagctcggtttgcacttgaaggaagaaaaatgccaatggagcaaggagcgggcagggctgctgcagagtgtggaggcagagaaggacaagatcctgaagctgagtgcagagatacttcgattggagaaggcagttcaggaggagaggacccaaaaccaagtgttcaagactgagctggcccgggagaaggattctagcctggtacagttgtcagaaagtaagcgggagctgacagagctgcggtcagccctgcgtgtgctccagaaggaaaaggagcagttacaggaggagaaacaggaattgctagagtacatgagaaagctagaggcccgcctggagaaggtggcagatgagaagtggaatgaggatgccaccacagaggatgaggaggccgctgtggggctgagctgcccggcagctctgacagactcagaggacgagtccccagaagacatgaggctcccaccctatggcctttgtgagcgtggagacccaggctcctctcctgctgggcctcgagaggcttctccccttgttgtcatcagccagccggctcccatttctcctcacctctctgggccagctgaggacagtagctctgactcggaggctgaagatgagaagtcagtcctgatggcagctgtgcagagtgggggtgaggaggccaacttactgcttcctgaactgggcagtgccttctatgacatggccagtggctttacagtgggtaccctgtcagaaaccagcactgggggccctgccacccccacatggaaggagtgtcctatctgtaaggagcgctttcctgctgagagtgacaaggatgccctggaggaccacatggatggacacttctttttcagcacccaggaccccttcacctttgagtgatcttactccctcgtacatgcacaaatacacactcatgcacacacacactcacacacatgcatacacttaggtttcatgcccattttctatcacactgggctccatgatattctgttccctaagaactgcttctgtgtgccctgttttcatcccaagatttctcacttcatcctctcctacctggctcttttgtcccagggaggggtcctgttcggaagcagtggctgaatttatcccctgaaagtggttttggaggaaccgggatggaggaggccttcccctgtgggaatagaatcgtccactcctagccctggttgcttctgatacacagccactgcacacacacactcacactcacactcccttgtctgatgccccaaagccaattcctggggcaccctaccctctcttatttggagtttccgttggtttacctgagttttctctggggtctgcacagaggcagcagcatggacatcatggcctctcaggtcccttttggttctcagtttcattggttcctctttctgttcccccattgacttctgtgccccaccctagccttttccataaccttaggtattcagtttggaggggttttttgtatttttgaggattcctgtattctgtatcctctcctcgcatctcctcacatggaaagaaataatgtatttgtgccttctgtgaggaatggggggaacaagtggtcccaggtatccccatttccaaggcccccctccctctccaggtccccccacagcaataaaagcttccccctgatatccatccctttgtagtttgaacaaatatatttatatgatatgt

SEQ ID NO: 113000 - DNA, 567 bp, Homo sapiens
  Payload ID: 2110
  Gene Symbol: CALCOCO1
  Gene Name: calcium binding and coiled-coil domain 1
  ENST ID: ENST00000548177
  CDS Start-End: 165-567
gtttttgttgttggtgaaaggtgaggggaacagctgatccgtctgttggtgtgtctccagctaccaatacaaacagatggaaggatggaggctgaggggagcagagagaaaatgaggagagaaatactaaagtgaaaccagaggacagatatctcaaggccaggatggaagaatcaccactaagccgggcaccatcccgtggtggagtcaactttctcaatgtagcccggacctacatccccaacaccaaggtggaatgtcactacacccttcccccaggcaccatgcccagtgccagtgactggattggcatcttcaaggtggaggctgcctgtgttcgggattaccacacatttgtgtggtcttccgtgcctgaaagtacaactgatggttcccccattcacaccagtgtccagttccaagccagctacctgcccaaaccaggagctcagctctaccagttccgatatgtgaaccgccagggccaggtgtgtgggcagagcccccctttccagttccgagagccaaggcccatggatgaactggtgaccctggaggaggctgatg

SEQ ID NO: 113001 - DNA, 746 bp, Homo sapiens
  Payload ID: 2110
  Gene Symbol: CALCOCO1
  Gene Name: calcium binding and coiled-coil domain 1
  ENST ID: ENST00000549784
  CDS Start-End: 298-746
acggacgccctcttccccgccctccttgcgcgcagccttctgggatgtatagtcctagatccgagcacgcagcggcaaaagggcgcagaagaaccacaaaccccagaagccctcgcgcccactcttctccctcccctccagaagtcggagtgctgtttttgttgttggtgaaaggtgaggggaacagctgatccgtctgttggagattagttgctgctttctgatgtcataactcattcctggatacagctgggtcaacaagcttaggagtaggaggacagatatctcaaggccaggatggaagaatcaccactaagccgggcaccatcccgtggtggagtcaactttctcaatgtagcccggacctacatccccaacaccaaggtggaatgtcactacacccttcccccaggcaccatgcccagtgccagtgactggattggcatcttcaaggtggaggctgcctgtgttcgggattaccacacatttgtgtggtcttccgtgcctgaaagtacaactgatggttcccccattcacaccagtgtccagttccaagccagctacctgcccaaaccaggagctcagctctaccagttccgatatgtgaaccgccagggccaggtgtgtgggcagagcccccctttccagttccgagagccaaggcccatggatgaactggtgaccctggaggaggctgatgggggctctgacatcctgctggttgtccccaaggcaactgtgttaca

SEQ ID NO: 113002 - DNA, 3888 bp, Homo sapiens
  Payload ID: 2110
  Gene Symbol: CALCOCO1
  Gene Name: calcium binding and coiled-coil domain 1
  Uniprot ID: Q9P1Z2
  ENST ID: ENST00000548263
  CDS Start-End: 50-1951
ggggaacagctgatccgtctgttgggaggacagatatctcaaggccaggatggaagaatcaccactaagccgggcaccatcccgtggtggagtcaactttctcaatgtagcccggacctacatccccaacaccaaggtggaatgtcactacacccttcccccaggcaccatgcccagtgccagtgactggattggcatcttcaaggtggaggctgcctgtgttcgggattaccacacatttgtgtggtcttccgtgcctgaaagtacaactgatggttcccccattcacaccagtgtccagttccaagccagctacctgcccaaaccaggagctcagctctaccagttccgatatgtgaaccgccagggccaggtgtgtgggcagagcccccctttccagttccgagagccaaggcccatggatgaactggtgaccctggaggaggctgatgggggctctgacatcctgctggttgtccccaaggcaactgtgttacagaaccagctcgatgagagccagcaagaacggaatgacctgatgcagctgaagctacagctggagggacaggtgacagagctgaggagccgagtgcaggagctcgagagggctctggcaactgccaggcaggagcacacggagctgatggaacagtacaaggggatttcccggtcccatggggagatcacagaagagagggacatcctgagccggcaacagggagaccatgtggcacgcatcctggagctagaggatgacatccagaccatcagtgagaaagtgctgacgaaggaagtggagctggacaggcttagagacacagtgaaggccctgactcgggaacaagagaagctccttgggcaactgaaagaagtacaagcagacaaggagcaaagtgaggctgagctccaagtggcacaacaggagaaccatcacttaaatttggacctgaaggaggcgaagagctggcaagaggagcagagtgctcaggctcagcgactgaaagacaaggtggcccagatgaaggacaccctaggccaggcccagcagcgggtggccgagctggagcccttgaaggagcagcttcgaggggcccaggagcttgcagcctcaagccagcagaaagccacccttcttggggaggagttggccagtgcagcagcagccagggaccgcaccatagccgaactacaccgcagccgcctggaagtggctgaagttaacggcaggctggctgagctcggtttgcacttgaaggaagaaaaatgccaatggagcaaggagcgggcagggctgctgcagagtgtggaggcagagaaggacaagatcctgaagctgagtgcagagatacttcgattggagaaggcagttcaggaggagaggacccaaaaccaagtgttcaagactgagctggcccgggagaaggattctagcctggtacagttgtcagaaagtaagcgggagctgacagagctgcggtcagccctgcgtgtgctccagaaggaaaaggagcagttacaggaggagaaacaggaattgctagagtacatgagaaagctagaggcccgcctggagaaggtggcagatgagaagtggaatgaggatgccaccacagaggatgaggaggccgctgtggggctgagctgcccggcagctctgacagactcagaggacgagtccccagaagacatgaggctcccaccctatggcctttgtgagcgtggagacccaggctcctctcctgctgggcctcgagaggcttctccccttgttgtcatcagccagccggctcccatttctcctcacctctctgggccagctgaggacagtagctctgactcggaggctgaagatgagaagtcagtcctgatggcagctgtgcagagtgggggtgaggaggccaacttactgcttcctgaactgggcagtgccttctatgacatggccaggtgagttcaaccagcaaggccaggagggaggtgggaggaggtcagagggaaagggcatctgtgtggacagtcaccaggccctgctcccaacccctgcccttcttggcctcagccaagaaaaggagatacaggtatggttaacaaggaaaatgactcactgctccaaatcccagatgccttcaggtaatccctacccctatcttatcaatgcactcagaggtcctgcctttaactggcttctatgttgttctagcaccatcttctgcagagcccaaattgccctgcttcccctctctcctgcctctaccccttccccaaccaccaggtaggtacctagggtcctccggggaggaagggaggtgaccatggcccccagggataggagcagagagaagactgggatccagcatccatctggctacaactgaaatgctttccctcttccctgacttccctgggtaacccttagggaagggaacctatagaggtgggggtttcaggtatcagattgtccccttctgccttcccttttattcccaggttcaagggggcaggcacagggaagagagatttgatcatctagtcccggttttgcctggatgtgagatgggctcagggcagggagggggtgatgctgtcatccttctcggctggagcaggaagatgaaggacgatgtcagactcattttcagcctcattaggcagcagacggagatggagggaggagagcaggaggctgggggatgggctctgcactgcagagaccagcagggactaaagaagagaggacatggggaactggaaaaataagccttccaggattgtggggagaaagacgctgtgggagaggccaggatgctgcattaggcacaggataacctgggaacccaggcacatgggtcctgctctccgaagtctgcaagtcaagaagggaacagagcacgccgaccctctccctttcccctctgtctctcttagtggctttacagtgggtaccctgtcagaaaccagcactgggggccctgccacccccacatggaaggagtgtcctatctgtaaggagcgctttcctgctgagagtgacaaggatgccctggaggaccacatggatggacacttctttttcagcacccaggaccccttcacctttgagtgatcttactccctcgtacatgcacaaatacacactcatgcacacacacactcacacacatgcatacacttaggtttcatgcccattttctatcacactgggctccatgatattctgttccctaagaactgcttctgtgtgccctgttttcatcccaagatttctcacttcatcctctcctacctggctcttttgtcccagggaggggtcctgttcggaagcagtggctgaatttatcccctgaaagtggttttggaggaaccgggatggaggaggccttcccctgtgggaatagaatcgtccactcctagccctggttgcttctgatacacagccactgcacacacacactcacactcacactcccttgtctgatgccccaaagccaattcctggggcaccctaccctctcttatttggagtttccgttggtttacctgagttttctctggggtctgcacagaggcagcagcatggacatcatggcctctcaggtcccttttggttctcagtttcattggttcctctttctgttcccccattgacttctgtgccccaccctagccttttccataaccttaggtattcagtttggaggggttttttgtatttttgaggattcctgtattctgtatcctctcctcgcatctcctcacatggaaagaaataatgtatttgtgccttctgtgaggaatggggggaacaagtggtcccaggtatccccatttccaaggcccccctccctctccaggtccccccacagcaataaaagcttccccctgatatcc

SEQ ID NO: 113003 - DNA, 551 bp, Homo sapiens
  Payload ID: 2110
  Gene Symbol: CALCOCO1
  Gene Name: calcium binding and coiled-coil domain 1
  ENST ID: ENST00000552623
  CDS Start-End: 192-551
ctgtagtgtgtctccagctaccaatacaaacagatggaaggatggaggctgaggggagcagagagaaaatgaggagagaaatactaaagtgaaaccaagattagttgctgctttctgatgtcataactcattcctggatacagctgggtcaacaagcttaggagtaggaggacagatatctcaaggccaggatggaagaatcaccactaagccgggcaccatcccgtggtggagtcaactttctcaatgtagcccggacctacatccccaacaccaaggtggaatgtcactacacccttcccccaggcaccatgcccagtgccagtgactggattggcatcttcaaggtggaggctgcctgtgttcgggattaccacacatttgtgtggtcttccgtgcctgaaagtacaactgatggttcccccattcacaccagtgtccagttccaagccagctacctgcccaaaccaggagctcagctctaccagttccgatatgtgaaccgccagggccaggtgtgtgggcagagcccccctttccagttccgagag

SEQ ID NO: 113004 - DNA, 549 bp, Homo sapiens
  Payload ID: 2110
  Gene Symbol: CALCOCO1
  Gene Name: calcium binding and coiled-coil domain 1
  ENST ID: ENST00000546619
  CDS Start-End: 71-549
gtttttgttgttggtgaaaggtgaggggaacagctgatccgtctgttgggacagatatctcaaggccaggatggaagaatcaccactaagccgggcaccatcccgtggtggagtcaactttctcaatgtagcccggacctacatccccaacaccaaggtggaatgtcactacacccttcccccaggcaccatgcccagtgccagtgactggattggcatcttcaaggtggaggctgcctgtgttcgggattaccacacatttgtgtggtcttccgtgcctgaaagtacaactgatggttcccccattcacaccagtgtccagttccaagccagctacctgcccaaaccaggagctcagctctaccagttccgatatgtgaaccgccagggccaggtgtgtgggcagagcccccctttccagttccgagagccaaggcccatggatgaactggtgaccctggaggaggctgatgggggctctgacatcctgctggttgtccccaaggcaactgtgttacagaaccagctcgatgagagccagcaagaacg

SEQ ID NO: 113005 - DNA, 554 bp, Homo sapiens
  Payload ID: 2110
  Gene Symbol: CALCOCO1
  Gene Name: calcium binding and coiled-coil domain 1
  ENST ID: ENST00000549173
  CDS Start-End: 73-554
tttttgttgttggtgaaaggtgaggggaacagctgatccgtctgttgggaggacagatatctcaaggccaggatggaagaatcaccactaagccgggcaccatcccgtggtggagtcaactttctcaatgtagcccggacctacatccccaacaccaaggtggaatgtcactacacccttcccccaggcaccatgcccagtgccagtgactggattggcatcttcaaggtggaggctgcctgtgttcgggattaccacacatttgtgtggtcttccgtgcctgaaagtacaactgatggttcccccattcacaccagtgtccagttccaaggtacaagggaagatggaaaattgggagagaggagccaagggagtggaggtttgaaagaagccagctacctgcccaaaccaggagctcagctctaccagttccgatatgtgaaccgccagggccaggtgtgtgggcagagcccccctttccagttccgagagccaaggcccatggatgaactggtgaccctggaggaggctgatgggggctctgacatcctgct

SEQ ID NO: 113006 - DNA, 549 bp, Homo sapiens
  Payload ID: 2110
  Gene Symbol: CALCOCO1
  Gene Name: calcium binding and coiled-coil domain 1
  ENST ID: ENST00000549688
  CDS Start-End: 236-549
ctgtagtgtgtctccagctaccaatacaaacagatggaaggatggaggctgaggggagcagagagaaaatgaggagagaaatactaaagtgaaaccagtaggtttctagtcctgctgcaggcacagtctggagagaagaatagattagttgctgctttctgatgtcataactcattcctggatacagctgggtcaacaagcttaggagtaggaggacagatatctcaaggccaggatggaagaatcaccactaagccgggcaccatcccgtggtggagtcaactttctcaatgtagcccggacctacatccccaacaccaaggtggaatgtcactacacccttcccccaggcaccatgcccagtgccagtgactggattggcatcttcaaggtggaggctgcctgtgttcgggattaccacacatttgtgtggtcttccgtgcctgaaagtacaactgatggttcccccattcacaccagtgtccagttccaagccagctacctgcccaaaccaggagctcagctctaccagttccgatatgtgaaccg

SEQ ID NO: 113007 - DNA, 2291 bp, Homo sapiens
  Payload ID: 2110
  Gene Symbol: CALCOCO1
  Gene Name: calcium binding and coiled-coil domain 1
  Uniprot ID: Q9P1Z2
  ENST ID: ENST00000550804
  CDS Start-End: 62-2137
ggtgaaaggtgaggggaacagctgatccgtctgttgggaggacagatatctcaaggccaggatggaagaatcaccactaagccgggcaccatcccgtggtggagtcaactttctcaatgtagcccggacctacatccccaacaccaaggtggaatgtcactacacccttcccccaggcaccatgcccagtgccagtgactggattggcatcttcaaggtggaggctgcctgtgttcgggattaccacacatttgtgtggtcttccgtgcctgaaagtacaactgatggttcccccattcacaccagtgtccagttccaagccagctacctgcccaaaccaggagctcagctctaccagttccgatatgtgaaccgccagggccaggtgtgtgggcagagcccccctttccagttccgagagccaaggcccatggatgaactggtgaccctggaggaggctgatgggggctctgacatcctgctggttgtccccaaggcaactgtgttacagaaccagctcgatgagagccagcaagaacggaatgacctgatgcagctgaagctacagctggagggacaggtgacagagctgaggagccgagtgcaggagctcgagagggctctggcaactgccaggcaggagcacacggagctgatggaacagtacaaggggatttcccggtcccatggggagatcacagaagagagggacatcctgagccggcaacagggagaccatgtggcacgcatcctggagctagaggatgacatccagaccatcagtgagaaagtgctgacgaaggaagtggagctggacaggcttagagacacagtgaaggccctgactcgggaacaagagaagctccttgggcaactgaaagaagtacaagcagacaaggagcaaagtgaggctgagctccaagtggcacaacaggagaaccatcacttaaatttggacctgaaggaggcgaagagctggcaagaggagcagagtgctcaggctcagcgactgaaagacaaggtggcccagatgaaggacaccctaggccaggcccagcagcgggtggccgagctggagcccttgaaggagcagcttcgaggggcccaggagcttgcagcctcaagccagcagaaagccacccttcttggggaggagttggccagtgcagcagcagccagggaccgcaccatagccgaactacaccgcagccgcctggaagtggctgaagttaacggcaggctggctgagctcggtttgcacttgaaggaagaaaaatgccaatggagcaaggagcgggcagggctgctgcagagtgtggaggcagagaaggacaagatcctgaagctgagtgcagagatacttcgattggagaaggcagttcaggaggagaggacccaaaaccaagtgttcaagactgagctggcccgggagaaggattctagcctggtacagttgtcagaaagtaagcgggagctgacagagctgcggtcagccctgcgtgtgctccagaaggaaaaggagcagttacaggaggagaaacaggaattgctagagtacatgagaaagctagaggcccgcctggagaaggtggcagatgagaagtggaatgaggatgccaccacagaggatgaggaggccgctgtggggctgagctgcccggcagctctgacagactcagaggacgagtccccagaagacatgaggctcccaccctatggcctttgtgagcgtggagacccaggctcctctcctgctgggcctcgagaggcttctccccttgttgtcatcagccagccggctcccatttctcctcacctctctgggccagctgaggacagtagctctgactcggaggctgaagatgagaagtcagtcctgatggcagctgtgcagagtgggggtgaggaggccaacttactgcttcctgaactgggcagtgccttctatgacatggccagtggctttacagtgggtaccctgtcagaaaccagcactgggggccctgccacccccacatggaaggagtgtcctatctgtaaggagcgctttcctgctgagagtgacaaggatgccctggaggaccacatggatggacacttctttttcagcacccaggaccccttcacctttgagtgatcttactccctcgtacatgcacaaatacacactcatgcacacacacactcacacacatgcatacacttaggtttcatgcccattttctatcacactgggctccatgatattctgttccctaagaactgcttctgtgtgccctgttttcatccca

SEQ ID NO: 113008 - DNA, 586 bp, Homo sapiens
  Payload ID: 2110
  Gene Symbol: CALCOCO1
  Gene Name: calcium binding and coiled-coil domain 1
  ENST ID: ENST00000549349
  CDS Start-End: 240-586
gtgctgtttttgttgttggtgaaaggtgaggggaacagctgatccgtctgttggtgtgtctccagctaccaatacaaacagatggaaggatggaggctgaggggagcagagagaaaatgaggagagaaatactaaagtgaaaccaagattagttgctgctttctgatgtcataactcattcctggatacagctgggtcaacaagcttaggagtaggaggacagatatctcaaggccaggatggaagaatcaccactaagccgggcaccatcccgtggtggagtcaactttctcaatgtagcccggacctacatccccaacaccaaggtggaatgtcactacacccttcccccaggcaccatgcccagtgccagtgactggattggcatcttcaaggtggaggctgcctgtgttcgggattaccacacatttgtgtggtcttccgtgcctgaaagtacaactgatggttcccccattcacaccagtgtccagttccaagccagctacctgcccaaaccaggagctcagctctaccagttccgatatgtgaaccgccagggccaggtgtgtgggcagagccccccttt

SEQ ID NO: 113009 - DNA, 559 bp, Homo sapiens
  Payload ID: 2110
  Gene Symbol: CALCOCO1
  Gene Name: calcium binding and coiled-coil domain 1
  ENST ID: ENST00000551900
  CDS Start-End: 66-559
gtttttgttgttggtgaaaggtgaggggaacagctgatccgtctgttggatatctcaaggccaggatggaagaatcaccactaagccgggcaccatcccgtggtggagtcaactttctcaatgtagcccggacctacatccccaacaccaaggtggaatgtcactacacccttcccccaggcaccatgcccagtgccagtgactggattggcatcttcaaggtggaggctgcctgtgttcgggattaccacacatttgtgtggtcttccgtgcctgaaagtacaactgatggttcccccattcacaccagtgtccagttccaagccagctacctgcccaaaccaggagctcagctctaccagttccgatatgtgaaccgccagggccaggtgtgtgggcagagcccccctttccagttccgagagccaaggcccatggatgaactggtgaccctggaggaggctgatgggggctctgacatcctgctggttgtccccaaggcaactgtgttacagaaccagctcgatgagagccagcaagaacggaatgacctgatgca

SEQ ID NO: 113010 - DNA, 1523 bp, Homo sapiens
  Payload ID: 2110
  Gene Symbol: CALCOCO1
  Gene Name: calcium binding and coiled-coil domain 1
  ENST ID: ENST00000546443
  CDS Start-End: 1-698
aggaaaaggagcagttacaggaggagaaacaggaattgctagagtacatgagaaagctagaggcccgcctggagaaggtggcagatgagaagtggaatgaggatgccaccacagaggatgaggaggccgctgtggggctgagctgcccggcagctctgacagactcagaggacgagtccccagaagacatgaggctcccaccctatggcctttgtgagcgtggagacccaggctcctctcctgctgggcctcgagaggcttctccccttgttgtcatcagccagccggctcccatttctcctcacctctctgggccagctgaggacagtagctctgactcggaggctgaagatgagaagtcagtcctgatggcagctgtgcagagtgggggtgaggaggccaacttactgcttcctgaactgggcagtgccttctatgacatggccagcaccatcttctgcagagcccaaattgccctgcttcccctctctcctgcctctaccccttccccaaccaccagtggctttacagtgggtaccctgtcagaaaccagcactgggggccctgccacccccacatggaaggagtgtcctatctgtaaggagcgctttcctgctgagagtgacaaggatgccctggaggaccacatggatggacacttctttttcagcacccaggaccccttcacctttgagtgatcttactccctcgtacatgcacaaatacacactcatgcacacacacactcacacacatgcatacacttaggtttcatgcccattttctatcacactgggctccatgatattctgttccctaagaactgcttctgtgtgccctgttttcatcccaagatttctcacttcatcctctcctacctggctcttttgtcccagggaggggtcctgttcggaagcagtggctgaatttatcccctgaaagtggttttggaggaaccgggatggaggaggccttcccctgtgggaatagaatcgtccactcctagccctggttgcttctgatacacagccactgcacacacacactcacactcacactcccttgtctgatgccccaaagccaattcctggggcaccctaccctctcttatttggagtttccgttggtttacctgagttttctctggggtctgcacagaggcagcagcatggacatcatggcctctcaggtcccttttggttctcagtttcattggttcctctttctgttcccccattgacttctgtgccccaccctagccttttccataaccttaggtattcagtttggaggggttttttgtatttttgaggattcctgtattctgtatcctctcctcgcatctcctcacatggaaagaaataatgtatttgtgccttctgtgaggaatggggggaacaagtggtcccaggtatccccatttccaaggcccccctccctctccaggtccccccacagcaataaaagcttccccctgatatccatccctttgtagtttgaacaaatatatttatatgatatgt

SEQ ID NO: 113011 - DNA, 3682 bp, Homo sapiens
  Payload ID: 2111
  Gene Symbol: CALCOCO2
  Gene Name: calcium binding and coiled-coil domain 2
  Uniprot ID: Q13137
  ENST ID: ENST00000258947
  CDS Start-End: 102-1442
caggcgggacgggctctcccttgggtgcttagccccgcccccgtcccactctgccctgttgctgtcgcgccgctgctggttgctgtccctggacccctaccatggaggagaccatcaaagatccccccacatcagctgtcttgctggatcactgtcatttctctcaggtcatctttaacagtgtggagaagttctacatccctggaggggacgtcacatgtcattataccttcacccagcatttcatccctcgtcgaaaggattggattggcatctttagagtggggtggaagacaacccgtgagtattacaccttcatgtgggttactttgcccattgacctaaacaacaaatcagctaaacagcaggaagtccaattcaaagcttactacctgcccaaggatgatgagtattaccagttctgctatgtggatgaggatggtgtggtccggggagcaagtattcctttccaattccgtccagaaaatgaggaagacatcctggttgttaccactcagggagaggtggaagagattgagcagcacaacaaggagctttgcaaagaaaaccaggagctgaaggacagctgtatcagcctccagaagcagaactcagacatgcaggctgagctccaaaagaagcaggaggagctagaaaccctacagagcatcaataagaagttggaactgaaagtgaaagaacagaaggactattgggagacagagctgcttcaactgaaagaacaaaaccagaagatgtcctcagaaaatgagaagatgggaatcagagtggatcagcttcaggcccagctgtcaactcaagagaaagaaatggagaagcttgttcagggagatcaagataagacagagcagttagagcagctgaaaaaggaaaatgaccacctctttctcagtttaactgaacagaggaaggaccagaagaagctcgagcagacagtggagcaaatgaagcagaatgaaactactgcaatgaagaaacaacaggaattaatggatgaaaactttgacctgtcaaaaagactgagtgagaacgaaattatatgtaatgctctgcagagacagaaagagagattggaaggagaaaatgatcttttgaagagggagaacagcagattgctcagttacatgggtctggattttaattctttgccgtatcaagtacctacttcagatgaaggaggcgcaagacaaaatccaggacttgcctatggaaacccatattctggtatccaagaaagttcttcccccagcccgctctccatcaagaaatgccctatctgcaaagcagatgatatttgtgatcacaccttggagcaacagcagatgcagcccctttgtttcaattgtccaatttgtgacaagatcttcccagctacagagaagcagatctttgaagaccacgtgttctgccactctctctgagtatcccaacctcttggatgtatacagagattttatagaatagaacctatagcttctaccatgagttatatgagtcaagatcctgcctaacctgaaattattagggatttactcagccctgctgccgctaacagtggagttatgtcactgatctgaaggtcactgttaagggcttctgctgccatccttgtgggttgctacctttaagtcgcataactctagctgtatcatcctctcacctgtcattcttctgagggtctcagtacaagggccctgggatggagccaacctgggtattcacaacaggcctgacttgatactaagtgattagttttccaagttgtcccactgccattcaaagtcagcccttgagtgtatttgttctcagtcctaaccctggggccagagattggtccgaggttgagaattccttcctcctcatccttggtgttgctttctccaaatgattgttttagactagccaaaaatgccgtggcaaagagctcagaaatccaatttggataccaaaggtttctcatgttaatttctcagcccccaaagaagcatcttactcctgaaccttagacaggaagtattgtttcagtcacagaaagcttttctgggtacctctggttagcactttctactctctgatatttcctatgtacatagcttttattgttgtaaatcctttcttaatggttaaataggattgttagcaactatgggtttgcagttttctgagtaggtgagttttgaatatgggtaaatcagaataatgagacaacttgttaatctctttaatactaaaaataaattactcttctatttcagggacttaggtaatttaaaataaaccttcaatttatggtcttctgttttgaagctcatgggaaaattgtgatcaaaagggctatgggaagggcagaccccgccaatgatttctcttcacctgtcttaagattaaataaaaaagagtgtcctggcagttatcttgaggtggggaaggaggtgatgaaacattagtttgtgaaatccaaggccctggcttgctttctttctttttttttttttttttttgaaacagtctctctctgtcacccaggctggcgtgcaatggcgcagttgactcactacagcctctgcctcccaggttcaagcgattctcatgccttagcctcccaagtagctgggattacaggtgtgtgccgcaatgcccagctaatttttgtgtttttagtagagacagggtttcactatgttggccaggctggtctcgaactcctggcctcacgtgatctgtccacttcagccgtccaaagtgctgggattacaagcgtgagccactgtgctgggcccgaggccctgacttcttgctgtaactttccatgcattttttttaaaaggagcagtgtggattttcgcaccctttgtgaactaagttcaatgcgctctatccaaatttgcctaattgaactataagaaagtaataattccattttctatcccctcagggactgaacaaatggaaataactcccaggcagtatcaggtggtcactacagagacttccacaaaaacttttgaatgatgtgaaacacgatgtcatgaataagggttgagccaactatagctctgtgttcctactgggctttccctaatgtggttgggagttatgccctagactaactgtattgtcctagtcacagctccttgctttgatttcatccttgataaaatgaagatgaaacttacactacttctccaagccttttgctgtcttaagaataagacctgagattaacactaaccctagaatagaaatgtaatagggagatggtaataaaggagtttttctggcacataccctccctacagaatttctgttgctccccagatccagtgaagaattgcagtttcatttattttgtaccagtcagctcttaattaagtacatgaatggagaggaacagtggtgcacataatccaaatcagtgaataccattttctggtgaattacccacccctttgcccctgctaccccgagggttaccatgattgtcaacagcagcaggagcccttccacagggcttggtaaaaaaaccagttgaggtgttaatgaccctttttgctgggtgtaaaacaaagcatctttaaccactgttcattatccccagctgctcttaccaaggctttgaagggggaaattatgctctaggcagccactagtagtaaacaat

SEQ ID NO: 113012 - DNA, 1916 bp, Homo sapiens
  Payload ID: 2111
  Gene Symbol: CALCOCO2
  Gene Name: calcium binding and coiled-coil domain 2
  Uniprot ID: Q13137
  ENST ID: ENST00000448105
  CDS Start-End: 56-1468
cactctgccctgttgctgtcgcgccgctgctggttgctgtccctggacccctaccatggaggagaccatcaaagatccccccacatcagctgtcttgctggatcactgtcatttctctcaggtcatctttaacagtgtggagaagttctacatccctggaggggacgtcacatgtcattataccttcacccagcatttcatccctcgtcgaaaggattggattggcatctttagagcatttaaatgtttccaagacaaattggaacaagaactactcaaatggaggagccaaggacagaaattgcaggtggggtggaagacaacccgtgagtattacaccttcatgtgggttactttgcccattgacctaaacaacaaatcagctaaacagcaggaagtccaattcaaagcttactacctgcccaaggatgatgagtattaccagttctgctatgtggatgaggatggtgtggtccggggagcaagtattcctttccaattccgtccagaaaatgaggaagacatcctggttgttaccactcagggagaggtggaagagattgagcagcacaacaaggagctttgcaaagaaaaccaggagctgaaggacagctgtatcagcctccagaagcagaactcagacatgcaggctgagctccaaaagaagcaggaggagctagaaaccctacagagcatcaataagaagttggaactgaaagtgaaagaacagaaggactattgggagacagagctgcttcaactgaaagaacaaaaccagaagatgtcctcagaaaatgagaagatgggaatcagagtggatcagcttcaggcccagctgtcaactcaagagaaagaaatggagaagcttgttcagggagatcaagataagacagagcagttagagcagctgaaaaaggaaaatgaccacctctttctcagtttaactgaacagaggaaggaccagaagaagctcgagcagacagtggagcaaatgaagcagaatgaaactactgcaatgaagaaacaacaggaattaatggatgaaaactttgacctgtcaaaaagactgagtgagaacgaaattatatgtaatgctctgcagagacagaaagagagattggaaggagaaaatgatcttttgaagagggagaacagcagattgctcagttacatgggtctggattttaattctttgccgtatcaagtacctacttcagatgaaggaggcgcaagacaaaatccaggacttgcctatggaaacccatattctggtatccaagaaagttcttcccccagcccgctctccatcaagaaatgccctatctgcaaagcagatgatatttgtgatcacaccttggagcaacagcagatgcagcccctttgtttcaattgtccaatttgtgacaagatcttcccagctacagagaagcagatctttgaagaccacgtgttctgccactctctctgagtatcccaacctcttggatgtatacagagattttatagaatagaacctatagcttctaccatgagttatatgagtcaagatcctgcctaacctgaaattattagggatttactcagccctgctgccgctaacagtggagttatgtcactgatctgaaggtcactgttaagggcttctgctgccatccttgtgggttgctacctttaagtcgcataactctagctgtatcatcctctcacctgtcattcttctgagggtctcagtacaagggccctgggatggagccaacctgggtattcacaacaggcctgacttgatactaagtgattagttttccaagttgtcccactgccattcaaagtcagcccttgagtgtatttgttctcagtcctaaccctggggccagagattggtccgaggttgagaattccttcctcctcatccttgg

SEQ ID NO: 113013 - DNA, 1438 bp, Homo sapiens
  Payload ID: 2111
  Gene Symbol: CALCOCO2
  Gene Name: calcium binding and coiled-coil domain 2
  Uniprot ID: Q13137
  ENST ID: ENST00000416445
  CDS Start-End: 55-1269
actctgccctgttgctgtcgcgccgctgctggttgctgtccctggacccctaccatggaggagaccatcaaagatccccccacatcagctgtcttgctggatcactgtcatttctctcaggtcatctttaacagtgtggagaagttctacatccctggaggggacgtcacatgtcattataccttcacccagcatttcatccctcgtcgaaaggattggattggcatctttagagtggggtggaagacaacccgtgagtattacaccttcatgtgggttactttgcccattgacctaaacaacaaatcagctaaacagcaggaagtccaattcaaagcttactacctgcccaaggatgatgagtattaccagttctgctatgtggatgaggatggtgtggtccggggagcaagtattcctttccaattccgtccagaaaatgaggaagacatcctggttgttaccactcaggaggagctagaaaccctacagagcatcaataagaagttggaactgaaagtgaaagaacagaaggactattgggagacagagctgcttcaactgaaagaacaaaaccagaagatgtcctcagaaaatgagaagatgggaatcagagtggatcagcttcaggcccagctgtcaactcaagagaaagaaatggagaagcttgttcagggagatcaagataagacagagcagttagagcagctgaaaaaggaaaatgaccacctctttctcagtttaactgaacagaggaaggaccagaagaagctcgagcagacagtggagcaaatgaagcagaatgaaactactgcaatgaagaaacaacaggaattaatggatgaaaactttgacctgtcaaaaagactgagtgagaacgaaattatatgtaatgctctgcagagacagaaagagagattggaaggagaaaatgatcttttgaagagggagaacagcagattgctcagttacatgggtctggattttaattctttgccgtatcaagtacctacttcagatgaaggaggcgcaagacaaaatccaggacttgcctatggaaacccatattctggtatccaagaaagttcttcccccagcccgctctccatcaagaaatgccctatctgcaaagcagatgatatttgtgatcacaccttggagcaacagcagatgcagcccctttgtttcaattgtccaatttgtgacaagatcttcccagctacagagaagcagatctttgaagaccacgtgttctgccactctctctgagtatcccaacctcttggatgtatacagagattttatagaatagaacctatagcttctaccatgagttatatgagtcaagatcctgcctaacctgaaattattagggatttactcagccctgctgccgctaacagtggagttatgtcactgatctgaaggtcactgttaa

SEQ ID NO: 113014 - DNA, 495 bp, Homo sapiens
  Payload ID: 2111
  Gene Symbol: CALCOCO2
  Gene Name: calcium binding and coiled-coil domain 2
  ENST ID: ENST00000505071
  CDS Start-End: 34-495
gccgctgctggttgctgtccctggacccctaccatggaggagaccatcaaagatccccccacatcagctgtcttgctggatcactgtcatttctctcaggtcatctttaacagtgtggagaagttctacatccctggaggggacgtcacatgtcattataccttcacccagcatttcatccctcgtcgaaaggattggattggcatctttagagtggggtggaagacaacccgtgagtattacaccttcatgtgggttactttgcccattgacctaaacaacaaatcagctaaacagcaggaagtccaattcaaagcttactacctgcccaaggatgatgagtattaccagttctgctatgtggatgaggatggtgtggtccggggagcaagtattcctttccaattccgtccagaaaatgaggaagacatcctggttgttaccactcagttctggcctacagcctgtctgtcatacggagaggtggaagagatt

SEQ ID NO: 113015 - DNA, 1396 bp, Homo sapiens
  Payload ID: 2111
  Gene Symbol: CALCOCO2
  Gene Name: calcium binding and coiled-coil domain 2
  Uniprot ID: Q13137
  ENST ID: ENST00000508679
  CDS Start-End: 81-1205
actctgccctgttgctgtcgcgccgctgctggttgctgtccctggtggggtggaagacaacccgtgagtattacaccttcatgtgggttactttgcccattgacctaaacaacaaatcagctaaacagcaggaagtccaattcaaagcttactacctgcccaaggatgatgagtattaccagttctgctatgtggatgaggatggtgtggtccggggagcaagtattcctttccaattccgtccagaaaatgaggaagacatcctggttgttaccactcagggagaggtggaagagattgagcagcacaacaaggagctttgcaaagaaaaccaggagctgaaggacagctgtatcagcctccagaagcagaactcagacatgcaggctgagctccaaaagaagcaggaggagctagaaaccctacagagcatcaataagaagttggaactgaaagtgaaagaacagaaggactattgggagacagagctgcttcaactgaaagaacaaaaccagaagatgtcctcagaaaatgagaagatgggaatcagagtggatcagcttcaggcccagctgtcaactcaagagaaagaaatggagaagcttgttcagggagatcaagataagacagagcagttagagcagctgaaaaaggaaaatgaccacctctttctcagtttaactgaacagaggaaggaccagaagaagctcgagcagacagtggagcaaatgaagcagaatgaaactactgcaatgaagaaacaacaggaattaatggatgaaaactttgacctgtcaaaaagactgagtgagaacgaaattatatgtaatgctctgcagagacagaaagagagattggaaggagaaaatgatcttttgaagagggagaacagcagattgctcagttacatgggtctggattttaattctttgccgtatcaagtacctacttcagatgaaggaggcgcaagacaaaatccaggacttgcctatggaaacccatattctggtatccaagaaagttcttcccccagcccgctctccatcaagaaatgccctatctgcaaagcagatgatatttgtgatcacaccttggagcaacagcagatgcagcccctttgtttcaattgtccaatttgtgacaagatcttcccagctacagagaagcagatctttgaagaccacgtgttctgccactctctctgagtatcccaacctcttggatgtatacagagattttatagaatagaacctatagcttctaccatgagttatatgagtcaagatcctgcctaacctgaaattattagggatttactcagccctgctgccgctaacagtggagttatgtcactgatctgaaggtcactgttaagggcttctgctgccatccttgt

SEQ ID NO: 113016 - DNA, 561 bp, Homo sapiens
  Payload ID: 2111
  Gene Symbol: CALCOCO2
  Gene Name: calcium binding and coiled-coil domain 2
  ENST ID: ENST00000507306
  CDS Start-End: 1-388
gcaaatgaagcagaatgaaactactgcaatgaagaaacaacaggaattaatggatgaaaactttgacctgtcaaaaagactgagtgagaacgaaattatatgtaatgctctgcagagacagaaagagagattggaaggagaaaatgatgtatccaagaaagttcttcccccagcccgctctccatcaagaaatgccctatctgcaaagcagatgatatttgtgatcacaccttggagcaacagcagatgcagcccctttgtttcaattgtccaatttgtgacaagatcttcccagctacagagaagcagatctttgaagaccacgtgttctgccactctctctgagtatcccaacctcttggatgtatacagagattttatagaatagaacctatagcttctaccatgagttatatgagtcaagatcctgcctaacctgaaattattagggatttactcagccctgctgccgctaacagtggagttatgtcactgatctgaaggtcactgttaagggcttctgctgccatccttgtgggttgctacctttaagtcgcataa

SEQ ID NO: 113017 - DNA, 767 bp, Homo sapiens
  Payload ID: 2111
  Gene Symbol: CALCOCO2
  Gene Name: calcium binding and coiled-coil domain 2
  ENST ID: ENST00000507076
  CDS Start-End: 686-767
tctgaaggccctggagcccctcccgcggcccgggagggttgcggggcagttttgtcttgcggagggcagcgctgcagtgctgtgtggcagggtgggaggctcctcgggaagaagtgacacccctggcggcggcgagggtcttgaggcggcggctgccgccccacgggtcgtggcgtcccgtcccctcccgcgggcccaggctgtggtggttccgtaatccctcgcctggatgtcatcgccgttggcttcgaggcggaggtggagccttgttgcgtcaccctgagcaagttactttctttttgggcctcagtgtccccctttacgagtaggtttgatccctgaagcgccttgccttttgcatgctgcagctgtcggagaagacgttctaggcaggaggaaagacggtgtcgtgacctgcctctacagttaatccattgcccctccaccactgacccagcttagtttgggagctaatgttcccactcgtatattatttcaaccccactggacgtgttaactcttttctatcacttggattcttgcttcacatgcaagccaacaagtgaccatggttggagctgagtaaaatatggataatataacttattctattattggaaacaccattgcaagtaaaggactttatgtggtggggtggaagacaacccgtgagtattacaccttcatgtgggttactttgcccattgacctaaacaacaaatcagctaaacagcaggaagtccaattcaaagcttactacctgccca

SEQ ID NO: 113018 - DNA, 1512 bp, Homo sapiens
  Payload ID: 2111
  Gene Symbol: CALCOCO2
  Gene Name: calcium binding and coiled-coil domain 2
  Uniprot ID: Q13137
  ENST ID: ENST00000509507
  CDS Start-End: 64-1467
ccccgtcccactctgccctgttgctgtcgcgccgctgctggttgctgtccctggacccctaccatggaggagaccatcaaagatccccccacatcagctgtcttgctggatcactgtcatttctctcaggtcatctttaacagtgtggagaagttctacatccctggaggggacgtcacatgtcattataccttcacccagcatttcatccctcgtcgaaaggattggattggcatctttagatgtagtcttaatcagactattcaactcctcatcaccccagacactggtagtatctggcaccaggtggggtggaagacaacccgtgagtattacaccttcatgtgggttactttgcccattgacctaaacaacaaatcagctaaacagcaggaagtccaattcaaagcttactacctgcccaaggatgatgagtattaccagttctgctatgtggatgaggatggtgtggtccggggagcaagtattcctttccaattccgtccagaaaatgaggaagacatcctggttgttaccactcagggagaggtggaagagattgagcagcacaacaaggagctttgcaaagaaaaccaggagctgaaggacagctgtatcagcctccagaagcagaactcagacatgcaggctgagctccaaaagaagcaggaggagctagaaaccctacagagcatcaataagaagttggaactgaaagtgaaagaacagaaggactattgggagacagagctgcttcaactgaaagaacaaaaccagaagatgtcctcagaaaatgagaagatgggaatcagagtggatcagcttcaggcccagctgtcaactcaagagaaagaaatggagaagcttgttcagggagatcaagataagacagagcagttagagcagctgaaaaaggaaaatgaccacctctttctcagtttaactgaacagaggaaggaccagaagaagctcgagcagacagtggagcaaatgaagcagaatgaaactactgcaatgaagaaacaacaggaattaatggatgaaaactttgacctgtcaaaaagactgagtgagaacgaaattatatgtaatgctctgcagagacagaaagagagattggaaggagaaaatgatcttttgaagagggagaacagcagattgctcagttacatgggtctggattttaattctttgccgtatcaagtacctacttcagatgaaggaggcgcaagacaaaatccaggacttgcctatggaaacccatattctggtatccaagaaagttcttcccccagcccgctctccatcaagaaatgccctatctgcaaagcagatgatatttgtgatcacaccttggagcaacagcagatgcagcccctttgtttcaattgtccaatttgtgacaagatcttcccagctacagagaagcagatctttgaagaccacgtgttctgccactctctctgagtatcccaacctcttggatgtatacagagattttatagaatagaa

SEQ ID NO: 113019 - DNA, 724 bp, Homo sapiens
  Payload ID: 2111
  Gene Symbol: CALCOCO2
  Gene Name: calcium binding and coiled-coil domain 2
  ENST ID: ENST00000502761
  CDS Start-End: 146-724
taatctcagtatttgtcaggattttgcttttcctgacttgctttgcacagaatgttccctggatgaaagcccagaaatcaccaacatttcagacaatgctttctgagccttactctgttccacatttcataacaggacccctaccatggaggagaccatcaaagatccccccacatcagctgtcttgctggatcactgtcatttctctcaggtcatctttaacagtgtggagaagttctacatccctggaggggacgtcacatgtcattataccttcacccagcatttcatccctcgtcgaaaggattggattggcatctttagagtggggtggaagacaacccgtgagtattacaccttcatgtgggttactttgcccattgacctaaacaacaaatcagctaaacagcaggaagtccaattcaaagcttactacctgcccaaggatgatgagtattaccagttctgctatgtggatgaggatggtgtggtccggggagcaagtattcctttccaattccgtccagaaaatgaggaagacatcctggttgttaccactcagggagaggtggaagagattgagcagcacaacaaggagctttgcaaagaaaaccaggagctgaaggacagctgtatcagcctccagaagcagaactcagacatgcaggctgagctccaaaagaagcaggaggagctagaaaccctacagagcatcaataagaag

SEQ ID NO: 113020 - DNA, 973 bp, Homo sapiens
  Payload ID: 2111
  Gene Symbol: CALCOCO2
  Gene Name: calcium binding and coiled-coil domain 2
  ENST ID: ENST00000513119
  CDS Start-End: 195-973
actctgccctgttgctgtcgcgccgctgctggttgctgtccctggtcatctttaacagtgtggagaagttctacatccctggaggggacgtcacatgtcattataccttcacccagcatttcatccctcgtcgaaaggattggattggcatctttagagtggggtggaagacaacccgtgagtattacaccttcatgtgggttactttgcccattgacctaaacaacaaatcagctaaacagcaggaagtccaattcaaagcttactacctgcccaaggatgatgagtattaccagttctgctatgtggatgaggatggtgtggtccggggagcaagtattcctttccaattccgtccagaaaatgaggaagacatcctggttgttaccactcagggagaggtggaagagattgagcagcacaacaaggagctttgcaaagaaaaccaggagctgaaggacagctgtatcagcctccagaagcagaactcagacatgcaggctgagctccaaaagaagcaggaggagctagaaaccctacagagcatcaataagaagttggaactgaaagtgaaagaacagaaggactattgggagacagagctgcttcaactgaaagaacaaaaccagaagatgtcctcagaaaatgagaagatgggaatcagagtggatcagcttcaggcccagctgtcaactcaagagaaagaaatggagaagcttgttcagggagatcaagataagacagagcagttagagcagctgaaaaaggaaaatgaccacctctttctcagtttaactgaacagaggaaggaccagaagaagctcgagcagacagtggagcaaatgaagcagaatgaaactactgcaatgaagaaacaacaggaattaatggatgaaaactttgacctgtcaaaaagactgagtgagaacgaaattatatgtaatgctctgcagagacagaaagagagattgga

SEQ ID NO: 113021 - DNA, 558 bp, Homo sapiens
  Payload ID: 2111
  Gene Symbol: CALCOCO2
  Gene Name: calcium binding and coiled-coil domain 2
  ENST ID: ENST00000509415
  CDS Start-End: 55-558
actctgccctgttgctgtcgcgccgctgctggttgctgtccctggacccctaccatggaggagaccatcaaagatccccccacatcagctgtcttgctggatcactgtcatttctctcaggtcatctttaacagtgtggagaagttctacatccctggaggggacgtcacatgtcattataccttcacccagcatttcatccctcgtcgaaaggattggattggcatctttagagtggggtggaagacaaccccttactacctgcccaaggatgatgagtattaccagttctgctatgtggatgaggatggtgtggtccggggagcaagtattcctttccaattccgtccagaaaatgaggaagacatcctggttgttaccactcagggagaggtggaagagattgagcagcacaacaaggagctttgcaaagaaaaccaggagctgaaggacagctgtatcagcctccagaagcagaactcagacatgcaggctgagctccaaaagaagcaggaggagctagaaaccctacagagcatcaataagaagttggaactg

SEQ ID NO: 113022 - DNA, 578 bp, Homo sapiens
  Payload ID: 2111
  Gene Symbol: CALCOCO2
  Gene Name: calcium binding and coiled-coil domain 2
  ENST ID: ENST00000509784
  CDS Start-End: 1-132
tttgacctgtcaaaaagactgagtgagaacgaaattatatgtaatgctctgcagagacagaaagagagattggaaggagaaaatgatgagcagaagtggtggtctgtaccagtgctggacccatgcttttgaagagggagaacagcagattgctcagttacatgggtctggattttaattctttgccgtatcaagtacctacttcagatgaaggaggcgcaagacaaaatccaggacttgcctatggaaacccatattctggtatccaagaaagttcttcccccagcccgctctccatcaagaaatgccctatctgcaaagcagatgatatttgtgatcacaccttggagcaacagcagatgcagcccctttgtttcaattgtccaatttgtgacaagatcttcccagctacagagaagcagatctttgaagaccacgtgttctgccactctctctgagtatcccaacctcttggatgtatacagagattttatagaatagaacctatagcttctaccatgagttatatgagtcaagatcctgcctaacctgaaattattagggatttactcagccct

SEQ ID NO: 113023 - DNA, 553 bp, Homo sapiens
  Payload ID: 2111
  Gene Symbol: CALCOCO2
  Gene Name: calcium binding and coiled-coil domain 2
  ENST ID: ENST00000570513
  CDS Start-End: 191-553
actctgccctgttgctgtcgcgccgctgctggttgctgtccctgtctcactctgtcccccaggctggagtgcagtggcatgatcttggctcactgcaacctctgcctcctgggttcaagcggttctcctgcctcagcctcctgagtagctgggattacaggtgcctgccatcgtgcccgggacccctaccatggaggagaccatcaaagatccccccacatcagctgtcttgctggatcactgtcatttctctcaggtcatctttaacagtgtggagaagttctacatccctggaggggacgtcacatgtcattataccttcacccagcatttcatccctcgtcgaaaggattggattggcatctttagagtggggtggaagacaacccgtgagtattacaccttcatgtgggttactttgcccattgacctaaacaacaaatcagctaaacagcaggaagtccaattcaaagcttactacctgcccaaggatgatgagtattaccagttctgctatgtggatgaggatggtgtggtccggggagcaagtatt

SEQ ID NO: 113024 - DNA, 575 bp, Homo sapiens
  Payload ID: 2111
  Gene Symbol: CALCOCO2
  Gene Name: calcium binding and coiled-coil domain 2
  ENST ID: ENST00000576582
  CDS Start-End: 47-373
ctgttgctgtcgcgccgctgctggttgctgtccctggacccctaccatggaggagaccatcaaagatccccccacatcagctgtcttgctggatcactgtcatttctctcaggtcatctttaacagtgtggagaagttctacatccctggaggggacgtcacatgtcattataccttcacccagcatttcatccctcgtcgaaaggattggattggcatctttagaagacagagtttcgttctgttgcccaggctggagtgcaatggcgcaatctcggctcaccgcaacctccgcctcccaggttcaagcgattctcctgcctcagcctcccgagtagctgggattacaggtggggtggaagacaacccgtgagtattacaccttcatgtgggttactttgcccattgacctaaacaacaaatcagctaaacagcaggaagtccaattcaaagcttactacctgcccaaggatgatgagtattaccagttctgctatgtggatgaggatggtgtggtccggggagcaagtattcctttccaattccgtccagaaaatgaggaagacatcctggtt

SEQ ID NO: 113025 - DNA, 770 bp, Homo sapiens
  Payload ID: 2112
  Gene Symbol: CABP1
  Gene Name: calcium binding protein 1
  Uniprot ID: Q9NZU7
  ENST ID: ENST00000351200
  CDS Start-End: 132-635
ccgtcctggaggaagaacggcacagacggagggaggctggggttggcagagactgggacggaagtccctcagtcccccaggagcctccttcatggacccggggatcccaagaggggctgcctcaacttaggatgggcaactgtgtcaagtatccactgagaaatctctcaaggaaggatagatcactgcgaccagaggaaattgaagagctccgagaggccttcagagaattcgacaaggacaaggatggctacatcaactgccgggatctgggcaactgcatgcgcaccatgggctacatgcccaccgagatggagctcatcgaactgtcccagcagatcaacatgaacctgggtggccatgtagattttgatgacttcgtggagctaatggggcctaaactcctggcagagacagcagatatgattggtgtaaaggaactgcgagatgctttccgagagtttgacaccaatggtgatggggaaataagcaccagtgagctgcgagaggctatgaggaagctcctgggtcatcaggtgggacaccgagacatagaggaaattatccgagatgtggacctcaatggggatggacgagtggactttgaagagtttgtccggatgatgtcccgctgaggccgcgagggcccctccaggactgccaagctcccaaaggcggggctaagaggagctagagcttgcctcacccgctgtagccgccgagagcccaggatgtactggcggatggggcctgcctgcaccccggggagg

SEQ ID NO: 113026 - DNA, 1369 bp, Homo sapiens
  Payload ID: 2112
  Gene Symbol: CABP1
  Gene Name: calcium binding protein 1
  Uniprot ID: Q9NZU7
  ENST ID: ENST00000288616
  CDS Start-End: 554-1237
cggcaggcaccctggcttcgggaacccaaactagccagcttccctttctgggcctgctggcctaattcccagccgcagctgccattctgggcccccctccctgaggccatctccctgcagatttggcagcggggaaaggaggggccgagagaaggggagagaaccagagacaggactgagcgctaatctgatgtagatgatccggcagccttctccagcttggttcccctctgccatcagctctccaggtgactttccctgtgccctgcactctccccttctgctttcatctccttaagaaagtgcccagaaagttaaacccacacacaaacacacacacaatccacccaaaaaaaaaaaaaatcggagagcaggagcaggcagacgagtaagagagcacgcgcgcaagagagggctcacatccgtcctggaggaagaacggcacagacggagggaggctggggttggcagagactgggacggaagtccctcagtcccccaggagcctccttcatggacccggggatcccaagaggggctgcctcaacttaggatgggcaactgtgtcaagtatccactgagaaatctctcaaggaagatgtgccaggaggaacagaccagctacatggtggtgcagacgagcgaggaggggctggcggctgacgccgagctcccgggaccgctcctgatgctggcccagaactgcgcagtcatgcacaacctgctgggccctgcctgcattttcctgcgcaagggcttcgctgagaacaggcagcctgatagatcactgcgaccagaggaaattgaagagctccgagaggccttcagagaattcgacaaggacaaggatggctacatcaactgccgggatctgggcaactgcatgcgcaccatgggctacatgcccaccgagatggagctcatcgaactgtcccagcagatcaacatgaacctgggtggccatgtagattttgatgacttcgtggagctaatggggcctaaactcctggcagagacagcagatatgattggtgtaaaggaactgcgagatgctttccgagagtttgacaccaatggtgatggggaaataagcaccagtgagctgcgagaggctatgaggaagctcctgggtcatcaggtgggacaccgagacatagaggaaattatccgagatgtggacctcaatggggatggacgagtggactttgaagagtttgtccggatgatgtcccgctgaggccgcgagggcccctccaggactgccaagctcccaaaggcggggctaagaggagctagagcttgcctcacccgctgtagccgccgagagcccaggatgtactggcggatggggcctgcctgcaccccgggg

SEQ ID NO: 113027 - DNA, 1658 bp, Homo sapiens
  Payload ID: 2112
  Gene Symbol: CABP1
  Gene Name: calcium binding protein 1
  Uniprot ID: Q9NZU7
  ENST ID: ENST00000316803
  CDS Start-End: 135-1247
gggcggggcgcggcggtacctgggccgccagggagccgggggtgggctctccggggacagccggcagcgcccccagatctgcaccgccagccgccgggagctccgggctccgggcgtagaggctgcgctgtcacatgggcggcggcgacggggccgcatttaagcggccgggggacggcgcccgcctccagcgcgtcctcgggcttggctcccgccgggagccccgttctctgcccgccgggggccccgcgccgcgccgcaccgcgccgcccccgccgggccatgcgagcgcgggccccgccgcgatgagctcgcacatcgccaaaagcgagtccaagacgtcgctgctgaaggcggcggcggcggcggcgagcgggggcagccgggctccccgccacggccctgcccgggacccggggctgcctagccgccggctacccggctcctgcccggcgacgccgcagtcgtccggggaccccagttcgcggaggcccctgtgccggccggcgccgcgagaggagggcgcgcgggggagccagcgtgtgctcccccaggcgcactgcaggccccgggaggcgctgccggccgcggcgtcccgaccttcgccgtcgtcgccgctgccgccggcccgcgggcgggatggggaggaacggggactgtccccggcgctcggcctccggggctctctgcgagcccggggccgcggggactccgttccagccgccgcgtccgaggcggacccgttcctccaccggctgcgccccatgctcagctccgcctttggccaggatagatcactgcgaccagaggaaattgaagagctccgagaggccttcagagaattcgacaaggacaaggatggctacatcaactgccgggatctgggcaactgcatgcgcaccatgggctacatgcccaccgagatggagctcatcgaactgtcccagcagatcaacatgaacctgggtggccatgtagattttgatgacttcgtggagctaatggggcctaaactcctggcagagacagcagatatgattggtgtaaaggaactgcgagatgctttccgagagtttgacaccaatggtgatggggaaataagcaccagtgagctgcgagaggctatgaggaagctcctgggtcatcaggtgggacaccgagacatagaggaaattatccgagatgtggacctcaatggggatggacgagtggactttgaagagtttgtccggatgatgtcccgctgaggccgcgagggcccctccaggactgccaagctcccaaaggcggggctaagaggagctagagcttgcctcacccgctgtagccgccgagagcccaggatgtactggcggatggggcctgcctgcaccccggggaggcgcccaccccggacccccacccctccgcactgtgaaagactaactcctgcaactggaaagcgggggcgcccgccgacgaggaggccaccgtgccaagccggcagaggtcatgccaggcgccaagggccatgtgcccagctgctgctggctgggtgggccagggagcccgccagcagaccccacacagcatgtccgccccagggcaaagcctcccaccttcgctctgcgcccgtcccagctcgcctcagccctgttatctcagaaccaataaaaata

SEQ ID NO: 113028 - DNA, 1857 bp, Homo sapiens
  Payload ID: 2112
  Gene Symbol: CABP1
  Gene Name: calcium binding protein 1
  ENST ID: ENST00000453000
  CDS Start-End: 513-1433
ggtgggtgcctgtaaaccaagctactcaggaggctgaggcaggagaatcacttgaatccgggagtcagaggttgcagtgagccaagatcacgccactgcactccagcctgggcgacagagtgcactagccacacacgaaaaaggagggggcatgtttccactttgccccagtccccacctctcacaccctgcctgcttcatttatgtcagcaatggcacctgcatgtgcaacctctggtctggcagaccagccaagcctggtctccatgctgccagctccgattgccctcactgccttccagcggggatctggctggagtaggacaagtctgtttgggagctgggaggaatgacttagccctggagattgactgaattgggaggttgggagcattttgggaaaggatgttgtctcattaggctctgagtgaacacttcccattggtgagaatagaagccccccgctgcccctgtctcttcatgcacttgggtgtgtgattctgtgcatatgtatgtgccagtgcgtgcgtgcgtgtgtgtgtgtgtgtgtgtgcgcatgtgccacacagagggcatcacattcagctctccccggaaccaccatttccgtcaaggattggagactctgtctgttggaccaatttgatgcctgtgcacgctcagggctctctgaaccccgctccttgactctcagggtcccctcttgcggaaagcccctcccgggaccaggagccaggctgggcagggaggtgacaccctgcctctcttttgcatttgcttggtgctggctgaagatgtgccaggaggaacagaccagctacatggtggtgcagacgagcgaggaggggctggcggctgacgccgagctcccgggaccgctcctgatgctggcccagaactgcgcagtcatgcacaacctgctgggccctgcctgcattttcctgcgcaagggcttcgctgagaacaggcagcctgatagatcactgcgaccagaggaaattgaagagctccgagaggccttcagagaattcgacaaggacaaggatggctacatcaactgccgggatctgggcaactgcatgcgcaccatgggctacatgcccaccgagatggagctcatcgaactgtcccagcagatcaacatgaacctgggtggccatgtagattttgatgacttcgtggagctaatggggcctaaactcctggcagagacagcagatatgattggtgtaaaggaactgcgagatgctttccgagagtttgacaccaatggtgatggggaaataagcaccagtgagctgcgagaggctatgaggaagctcctgggtcatcaggtgggacaccgagacatagaggaaattatccgagatgtggacctcaatggggatggacgagtggactttgaagagtttgtccggatgatgtcccgctgaggccgcgagggcccctccaggactgccaagctcccaaaggcggggctaagaggagctagagcttgcctcacccgctgtagccgccgagagcccaggatgtactggcggatggggcctgcctgcaccccggggaggcgcccaccccggacccccacccctccgcactgtgaaagactaactcctgcaactggaaagcgggggcgcccgccgacgaggaggccaccgtgccaagccggcagaggtcatgccaggcgccaagggccatgtgcccagctgctgctggctgggtgggccagggagcccgccagcagaccccacacagcatgtccgccccagggcaaagcctcccaccttcgctctgcgcccgtcccagctcgcctcagccctgttatctcagaaccaataaaaatatttccaagagcaa

SEQ ID NO: 113029 - DNA, 925 bp, Homo sapiens
  Payload ID: 2113
  Gene Symbol: CABP2
  Gene Name: calcium binding protein 2
  Uniprot ID: Q9NPB3
  ENST ID: ENST00000294288
  CDS Start-End: 71-733
aggcagcagcatccgccgaggcccacccgggccacccccggggttccaggcctggcatggttcagggcccatggggaactgtgccaagcggccctggcgccggggccctaaggaccccttgcagtggctcggctccccaccaaggggctcctgccccagccccagctccagccccaaggagcagggggaccccgcgccaggcgtccagggctactcggtgctcaacagcctggtggggcctgcctgcatcttcctgcggcccagcattgccgccacccaactcgaccgggagctgcggcccgaggagattgaagagctgcaggtcgccttccaggagtttgaccgagaccgggacggctacattggctgccgggagctgggtgcctgcatgcggaccctgggctacatgcccaccgagatggagctcatcgagatctcacaacaaatcagtggcggaaaggtggactttgaagacttcgtggagctgatgggccccaagctgctggcagagacggcagacatgatcggtgtccgggagctacgggacgccttccgggagttcgacaccaatggggacggccgcatcagcgtgggcgagctccgggcggccctcaaggccctgctgggggagcgcctcagccagcgggaggtggacgagatcctccaggacgtggacctcaatggggacggtctggtcgacttcgaagagtttgtgcgaatgatgtctcggtgagcctgtacagaagctggaggcagcataaaggactcaaggaccacagcctctgcccaccagcatgttccttgaagcccatcgcctctagcggggaccctcctttcctccccatcccacctgtgtgcagtgcccttgcctgccttcacccccaccaccacttctccaataaagccgcctggccttgtctctgtc

SEQ ID NO: 113030 - DNA, 789 bp, Homo sapiens
  Payload ID: 2113
  Gene Symbol: CABP2
  Gene Name: calcium binding protein 2
  Uniprot ID: Q9NPB3
  ENST ID: ENST00000353903
  CDS Start-End: 71-562
aggcagcagcatccgccgaggcccacccgggccacccccggggttccaggcctggcatggttcagggcccatggggaactgtgccaagcggccctggcgccggggccctaaggaccgggagctgcggcccgaggagattgaagagctgcaggtcgccttccaggagtttgaccgagaccgggacggctacattggctgccgggagctgggtgcctgcatgcggaccctgggctacatgcccaccgagatggagctcatcgagatctcacaacaaatcagtggcggaaaggtggactttgaagacttcgtggagctgatgggccccaagctgctggcagagacggcagacatgatcggtgtccgggagctacgggacgccttccgggagttcgacaccaatggggacggccgcatcagcgtgggcgagctccgggcggccctcaaggccctgctgggggagcgcctcagccagcgggaggtggacgagatcctccaggacgtggacctcaatggggacggtctggtcgacttcgaagagtttgtgcgaatgatgtctcggtgagcctgtacagaagctggaggcagcataaaggactcaaggaccacagcctctgcccaccagcatgttccttgaagcccatcgcctctagcggggaccctcctttcctccccatcccacctgtgtgcagtgcccttgcctgccttcacccccaccaccacttctccaataaagccgcctggccttgtctctgtctctctgacaataaaatatctccaagcctggggaga

SEQ ID NO: 113031 - DNA, 960 bp, Homo sapiens
  Payload ID: 2113
  Gene Symbol: CABP2
  Gene Name: calcium binding protein 2
  ENST ID: ENST00000545205
  CDS Start-End: 103-321
tcgggagcagctgggggctggcaggagtcctcaggcagcagcatccgccgaggcccacccgggccacccccggggttccaggcctggcatggttcagggcccatggggaactgtgccaagcggccctggcgccggggccctaaggaccccttgcagtggctcggctccccaccaaggggctcctgccccagccccagctccagccccaaggagcagggggaccccgcgccaggcgtccagggctactcggtgctcaacagcctggtggggcctgcctgcatcttcctgcggcccagcattgccgccacccaactcgtatgaccgggagctgcggcccgaggagattgaagagctgcaggtcgccttccaggagtttgaccgagaccgggacggctacattggctgccgggagctgggtgcctgcatgcggaccctgggctacatgcccaccgagatggagctcatcgagatctcacaacaaatcagtggcggaaaggtggactttgaagacttcgtggagctgatgggccccaagctgctggcagagacggcagacatgatcggtgtccgggagctacgggacgccttccgggagttcgacaccaatggggacggccgcatcagcgtgggcgagctccgggcggccctcaaggccctgctgggggagcgcctcagccagcgggaggtggacgagatcctccaggacgtggacctcaatggggacggtctggtcgacttcgaagagtttgtgcgaatgatgtctcggtgagcctgtacagaagctggaggcagcataaaggactcaaggaccacagcctctgcccaccagcatgttccttgaagcccatcgcctctagcggggaccctcctttcctccccatcccacctgtgtgcagtgcccttgcctgccttcacccccaccaccacttctccaataaagccgcctggccttgtctctgt

SEQ ID NO: 113032 - DNA, 3826 bp, Homo sapiens
  Payload ID: 2114
  Gene Symbol: CAB39
  Gene Name: calcium binding protein 39
  Uniprot ID: Q9Y376
  ENST ID: ENST00000258418
  CDS Start-End: 430-1455
gtgcgcacgtcaaagccgggctcgggccgcaagcggggcgaggggttcggggagcggcgcggcctgggagacacagagccttcaggcgccggggcgggggcacaggcgaagactaaggcggcgccgggccccacagcagcagccgcagcccaagcgagcgcagcagcgcggcggcagccgcgggagcccctgggcagccgtccgcccgcgcagccgccgccgccgcgggagcccgtcgccgggagcaggagcgggcggaagacaacggaggggccgagcgtccgagccactccgcggggaccgaacgagcagcccgaagcggcggcggccgaggacggggacagcgacgacgcggaggcagagaagggaacgcccggcccagccccgtagcacaggcggagtgcagcggaggcccctgccgctgccgtcatgccgttcccgtttgggaagtctcacaaatctccagcagacattgtgaagaatctgaaggagagcatggctgttctggaaaagcaagacatttctgataaaaaagcagaaaaggctacagaagaagtttccaaaaatctggttgccatgaaagaaattctgtatggcacaaatgaaaaagagcctcagacagaagcagtagctcaacttgctcaagaactctataatagtgggctccttagcaccctggtagctgatttacagctcattgactttgagggcaaaaaagacgtggctcaaattttcaacaatattctcagaagacaaattggtacgagaactcctactgttgaatacatctgcacccaacagaatattttgttcatgttattgaaagggtatgaatctccagaaatagctctaaattgtggaataatgttaagagaatgcatcagacatgaaccacttgcaaaaatcattttgtggtcggaacagttttatgatttcttcagatatgtcgaaatgtcaacatttgacatagcttcagatgcatttgccacattcaaggatttacttacaagacataaattgctcagtgcagaatttttggaacagcattatgatagatttttcagtgaatatgagaagttacttcattcagaaaattatgtgacaaaaagacagtcactgaagcttctcggtgaactactactagatagacacaacttcacaattatgacaaaatacatcagtaaacctgagaacctcaaattaatgatgaacctgctgcgagacaaaagtcgcaacatccagtttgaggcctttcacgtttttaaggtgtttgtagccaatcctaacaagacgcagcccatcctagacatcctcctcaagaaccaggccaaactcatagagttcctcagcaagtttcagaacgacaggacggaggatgagcagtttaacgacgagaagacctatttagttaaacagatcagggatttgaagagaccagctcagcaagaagcttaatctccaataaacatctatgttaaatccaaattcagcatttgctgttagctattcagcatcaggcactcttattgattcatgaggaacattactgctaatctgctgttaagtgaacggtttttcattttacccttttgtttttcagtccaggttggagatcgtagctgctgctgcttgcacactagggcacatgtgggctttctcttgatctttgtgtcatttcagaattcaaagactgtgctacgggagttctgaacatggctgggttcatgaaggcaaatgtatggatgagagtgtggtttaggaaagagggcactgatatcagattagacctatgtgtttgcacccatctttgttggcgatctgagtgcagtgtggcaagtgcacacctggcatccctgcgtcagatcgcgcaccttcaggtcgcgcaccttcgctgaaggaagatgacgcagagctttatctgaaatcagaggggagctatccaaaatgggagtttgggggcagctaaagttgacatgcgaataaattgatactgaaacttagcaacttcttaaaagtgtaaagaagcctcataagatcataaggaaaatgtatatatgcttttcacagctttctagaattttttgacatttgattttcttgagacttgtaaacctggatatgttgaagggtatttgttaattttacttttcaaagatactttaaaacagtagagctagcaatgacaccttgcatttcatttcaacactgcttcaaggtttcttttgtatataattcttagaatgctcatttcttttaaatggtttaatttgtacagcagaggaatgttattgtagtagtatgtaactattacctaatactgagtttttgcaaaaaacaatgaatgctcatatgtaattgaaatacttcagatcacatgaaaatgctgatttaacatttaagtatcacagcattaaaagaaaaagaaagtaaaccagtcctttgtattcagttacctaatggggtgccatcaataagctgcgatacagccctggagctcagtcagccacaccttcctgcatcctattggccttattcattttaaatgagttaatgaatctgccagatctgtgaatgatagagattatgctaaattaatgctgattctttgtgtgtgtgggaaatctctgtagagcaccttttctttcttagactaagtaacccagtacaatagttgtgaactgaataattaaaactttggcttctcttaggaaaagacgacttcctagtcataggtgtcctatggggaaatttattttttttaatgtcctgttccttaatgctgcaaattatcagtatttataaagtaactgattttgcaccacttttttgttactgtgaccacggcagaacaatgtcttctagactatatctatgtaaagttattagaatggtatctgttcattttagtgatatgaagatcacaactaacaactgacaaatcagagtttgccagttcaaattcagcatggctgcagctgattaagaaattgatatgattattctttgctagcctctcttactaatggaattatatactggccagtaaaatgggcctcccaattgctgtttcagcaggttttaaaccttcaggaacaccagttaggaaaatagctccagaaaatatagatatattttatttttattaaaatggcagtctacatcataattggcatttctcaagactgtctttaccagaatctgtgtgaaataaggcaatctagtctccttgaaaaaaaaatctcttggatgtttaggaaggaagacttggccgtgatgtggtgtcctggctttgtggtgtagtgctgtgtgtatggagttagtgtaaaaacatggattacaccaagtggaagaaacgtcttcttgccaagctcattcttagaacttacacatctagaacagcttccactttggcagtgaggtcgtagccttttaggtggaagaagtgagggtgcagcgtgtcagacacaacattcatgttactcttacattggaatctgaaggtagttcagacttcgtgggttttgtttttaagcaaaacaatgtgaaaacatttaagtttgaaatgttgcatttgaagttatgatcatttaatatattcatattaccaagactattatactggaagtggtttttgtgttataaaggtttaattttacataaggcagttacttaatgtgatttttaacccttaaaaaagtggagatgtatacatttgttaacaatgccatgaaagcattttctttctcctaaggaaaagtgaatttcttatcagaatatctggctggccctgtaatttaaattaaaataaaattttggagaaacagca

SEQ ID NO: 113033 - DNA, 1626 bp, Homo sapiens
  Payload ID: 2114
  Gene Symbol: CAB39
  Gene Name: calcium binding protein 39
  Uniprot ID: Q9Y376
  ENST ID: ENST00000409788
  CDS Start-End: 555-1580
agtcgggcgggcggggaagtgcgggccgggtcaactgtcaccggctgcacccgggcttcagcgcctcgctcccgcccctggtaaacttcctgttgtcgggaggcagataccagctttgtgaccaattcaggaaaatgcctaactgatttctggttaggaattgggcggtcggagcgttctggagttcaatggaaccaccccaagcgcagactgcgtgcaggcgccgtagtcggcccgcaccggagggattcaaaggtgaagcgggccccggtcccctcccccgaggagcttaggctctggtgtgagagataagacgagaacacaaataactgcgataccgggaaggaggtgataagtcctgtgaaagaacgacggagtgctagaacggcacccggaaaaaccgaaccgatcacttctgcctcgcagaaacctggaaggcttcctgggcgggggatgctgagcagagtcttgaaggcctgatgggatttaggagaggaggattgcagaagaggtagcacaggcggagtgcagcggaggcccctgccgctgccgtcatgccgttcccgtttgggaagtctcacaaatctccagcagacattgtgaagaatctgaaggagagcatggctgttctggaaaagcaagacatttctgataaaaaagcagaaaaggctacagaagaagtttccaaaaatctggttgccatgaaagaaattctgtatggcacaaatgaaaaagagcctcagacagaagcagtagctcaacttgctcaagaactctataatagtgggctccttagcaccctggtagctgatttacagctcattgactttgagggcaaaaaagacgtggctcaaattttcaacaatattctcagaagacaaattggtacgagaactcctactgttgaatacatctgcacccaacagaatattttgttcatgttattgaaagggtatgaatctccagaaatagctctaaattgtggaataatgttaagagaatgcatcagacatgaaccacttgcaaaaatcattttgtggtcggaacagttttatgatttcttcagatatgtcgaaatgtcaacatttgacatagcttcagatgcatttgccacattcaaggatttacttacaagacataaattgctcagtgcagaatttttggaacagcattatgatagatttttcagtgaatatgagaagttacttcattcagaaaattatgtgacaaaaagacagtcactgaagcttctcggtgaactactactagatagacacaacttcacaattatgacaaaatacatcagtaaacctgagaacctcaaattaatgatgaacctgctgcgagacaaaagtcgcaacatccagtttgaggcctttcacgtttttaaggtgtttgtagccaatcctaacaagacgcagcccatcctagacatcctcctcaagaaccaggccaaactcatagagttcctcagcaagtttcagaacgacaggacggaggatgagcagtttaacgacgagaagacctatttagttaaacagatcagggatttgaagagaccagctcagcaagaagcttaatctccaataaacatctatgttaaatccaaattcagcatttgctgtt

SEQ ID NO: 113034 - DNA, 1324 bp, Homo sapiens
  Payload ID: 2114
  Gene Symbol: CAB39
  Gene Name: calcium binding protein 39
  Uniprot ID: Q9Y376
  ENST ID: ENST00000410084
  CDS Start-End: 299-1324
agtcgggcgggcggggaagtgcgggccgggtcaactgtcaccggctgcacccgggcttcagcgcctcgctcccgcccctggtaaacttcctgttgtcgggaggcagataccagctttgtgaccaattcaggaaaatgcctaactgatttctggttaggaattgggcggtcggagcgttctggagttcaatggaaccaccccaagcgcagactgcgtgcaggcgccgtagtcggcccgcaccggagggattcaaaggtagcacaggcggagtgcagcggaggcccctgccgctgccgtcatgccgttcccgtttgggaagtctcacaaatctccagcagacattgtgaagaatctgaaggagagcatggctgttctggaaaagcaagacatttctgataaaaaagcagaaaaggctacagaagaagtttccaaaaatctggttgccatgaaagaaattctgtatggcacaaatgaaaaagagcctcagacagaagcagtagctcaacttgctcaagaactctataatagtgggctccttagcaccctggtagctgatttacagctcattgactttgagggcaaaaaagacgtggctcaaattttcaacaatattctcagaagacaaattggtacgagaactcctactgttgaatacatctgcacccaacagaatattttgttcatgttattgaaagggtatgaatctccagaaatagctctaaattgtggaataatgttaagagaatgcatcagacatgaaccacttgcaaaaatcattttgtggtcggaacagttttatgatttcttcagatatgtcgaaatgtcaacatttgacatagcttcagatgcatttgccacattcaaggatttacttacaagacataaattgctcagtgcagaatttttggaacagcattatgatagatttttcagtgaatatgagaagttacttcattcagaaaattatgtgacaaaaagacagtcactgaagcttctcggtgaactactactagatagacacaacttcacaattatgacaaaatacatcagtaaacctgagaacctcaaattaatgatgaacctgctgcgagacaaaagtcgcaacatccagtttgaggcctttcacgtttttaaggtgtttgtagccaatcctaacaagacgcagcccatcctagacatcctcctcaagaaccaggccaaactcatagagttcctcagcaagtttcagaacgacaggacggaggatgagcagtttaacgacgagaagacctatttagttaaacagatcagggatttgaagagaccagctcagcaagaagcttaa

SEQ ID NO: 113035 - DNA, 1619 bp, Homo sapiens
  Payload ID: 2114
  Gene Symbol: CAB39
  Gene Name: calcium binding protein 39
  ENST ID: ENST00000614925
  CDS Start-End: 5-1024
cgtcatgccgttcccgtttgggaagtctcacaaatctccagcagacattgtgaagaatctgaaggagagcatggctgttctggaaaagcaagacatttctgataaaaaagcagaaaaggctacagaagaagtttccaaaaatctggttgccatgaaagaaattctgtatggcacaaatgaaaaagagcctcagacagaagcagtagctcaacttgctcaagaactctataatagtgggctccttagcaccctggtagctgatttacagctcattgactttgagggcaaaaaagacgtggctcaaattttcaacaatattctcagaagacaaattggtacgagaactcctactgttgaatacatctgcacccaacagaatattttgttcatgttattgaaagggtatgaatctccagaaatagctctaaattgtggaataatgttaagagaatgcatcagacatgaaccacttgcaaaaatcattttgtggtcggaacagttttatgatttcttcagatatgtcgaaatgtcaacatttgacatagcttcagatgcatttgccacattcaaggatttacttacaagacataaattgctcagtgcagaatttttggttctcttatcttttttcagtgaatatgagaagttacttcattcagaaaattatgtgacaaaaagacagtcactgaagcttctcggtgaactactactagatagacacaacttcacaattatgacaaaatacatcagtaaacctgagaacctcaaattaatgatgaacctgctgcgagacaaaagtcgcaacatccagtttgaggcctttcacgtttttaaggtgtttgtagccaatcctaacaagacgcagcccatcctagacatcctcctcaagaaccaggccaaactcatagagttcctcagcaagtttcagaacgacaggacggaggatgagcagtttaacgacgagaagacctatttagttaaacagatcagggatttgaagagaccagctcagcaagaagcttaatctccaataaacatctatgttaaatccaaattcagcatttgctgttagctattcagcatcaggcactcttattgattcatgaggaacattactgctaatctgctgttaagtgaacggtttttcattttacccttttgtttttcagtccaggttggagatcgtagctgctgctgcttgcacactagggcacatgtgggctttctcttgatctttgtgtcatttcagaattcaaagactgtgctacgggagttctgaacatggctgggttcatgaaggcaaatgtatggatgagagtgtggtttaggaaagagggcactgatatcagattagacctatgtgtttgcacccatctttgttggcgatctgagtgcagtgtggcaagtgcacacctggcatccctgcgtcagatcgcgcaccttcaggtcgcgcaccttcgctgaaggaagatgacgcagagctttatctgaaatcagaggggagctatccaaaatgggagtttgggggcagctaaagttgacatgcgaataaattgatactgaaacttagcaacttcttaaaagtgtaaagaagcctcataagatcataaggaaaatgt

SEQ ID NO: 113036 - DNA, 3361 bp, Homo sapiens
  Payload ID: 2115
  Gene Symbol: CAB39L
  Gene Name: calcium binding protein 39-like
  Uniprot ID: Q9H9S4
  ENST ID: ENST00000347776
  CDS Start-End: 189-1202
ggatttcttgtagaagccagttaaaaggagaacctagtatcacactaggcttctgaaaacaccaatcaagagttgcttaatgcaggggtcccttacccctgggctgcagacctgtacctgtccatggcctgttaggaaccgggcagcacagtaggagcattccatattggaagaagagatttctacacatgaaaaaaatgcctttgtttagtaaatcacacaaaaatccagcagaaattgtgaaaatcctgaaagacaatttggccattttggaaaagcaagacaaaaagacagacaaggcttcagaagaagtgtctaaatcactgcaagcaatgaaagaaattctgtgtggtacaaacgagaaagaacccccaacagaagcagtggctcagctagcacaagaactctacagcagtggcctgctagtgacactgatagctgacctgcagctgatagactttgagggaaaaaaagatgtgacccagatatttaacaacatcttgagaagacagataggcactcggagtcctactgtggagtatattagtgctcatcctcatatcctgtttatgctcctcaaaggatatgaagccccacagattgccttacgttgtgggattatgctgagagaatgtattcgacatgaaccacttgccaaaatcatcctcttttctaatcaattcagagatttctttaagtacgtggagttgtcaacatttgatattgcttcagatgcctttgctactttcaaggatttactaaccagacataaagtgttggtagcagacttcttagaacaaaattacgacactatttttgaagactatgagaaattgcttcagtctgagaattatgttactaagagacagtctttaaagctgctaggggagctgatcctggaccgtcacaactttgccatcatgacaaagtatatcagcaagccggagaacctgaaactcatgatgaacctccttcgggataaaagtcccaacatccagtttgaagcctttcatgtttttaaggtgtttgtggccagtcctcacaaaacacagcctattgtggagatcctgttaaaaaatcagcccaaactcattgagtttctgagcagcttccaaaaagaaaggacggatgatgagcagttcgctgacgagaagaactacttgattaaacagatccgagacttgaagaaaacggccccttgaagagctccccggcccctgtcacagtcagtcgtctcatttgtccagtttgtacagtgtgtcatttcagaaagtcatcattcttgggaagactttggaggtgcctattttttctgctgtaattgttctgggtagatggagtataaacatttgaatggaaaaaaattaacctagaataatatattcattttagtcaagtctgtgattatttatgtgaaatgagaaccattgtatcagatgttgataaaagcaattttaacttgcagatgtgagcccctgggcacaatgagccgctaaatgggagctcaattgacaggcatcaccaagtcttcaaggaggactgagttctcaggggagaactgggaatggggccagggtgcaaaaatgctttgcccatctgtaggtagacacacagatcgctcagggcactgagagatcccagaaggtaacgttaatgttttcagtcattgtgtgtcctttgttgctgccaatgtctttggactgtaatcagtgcatccacacctcccaggatccagtgctccctctcagctcagtctcccctctctccctgtcctgcattccatcccagctcctcagcatggcctcagtgggcgcacccatgcctcccgcagtccaggtgagcaggggagcaactgagcaggaagaggatggatcaacaagggtcacggggaataggggacccacggggtgtgacctgcttgctagagaactgtgaacatgtggctctggatagagtgactgctgctccatattagcttccagagggtgagtgagggacagaatatttccttcataatggtcatgggtgaatgctttctgctgtaagtgtcttttagagtaggaatcagcatagtgggatgcccagcaggcacaaaccatgggtccagggagtctcagcggggaacttctatcagtatcaataaccattggaaggagaaatgattcatgtgtgaaaaaattctcagatccatcaataaatttttttcagagccattgtatcagatgttgataaaagcaatttttttctaataagctgtcattctataattgcccatcacagtctttagtgaacacatagaaagcctatacagttttggtcctgaatagtctcttgtgactaggatgattgaggtgttaattcctcttccttataaaaaggcttggaatcaaaaatattttaaaaggccgtggtttcgtttcagacatcaaccatctaaaacgggattttaaagcgatattttacaagaatgaaaggcacaattgttgatctgtattttttacacttcagtttctaaatcatgaatcgttgccttccacaggaaccctcccttatacattacttgagtgttgtgtagtttttcttcagccaggtatttctctgcctagagaggggaagagaaatgtgttctccaggactgatcccctttgtagattttgtacctgaagagttacctggcagggcaccacccttggctaggcccaggtgtgtgtttctttcttgcctggcatggaccccgaggcaggtgatgtggggcctggcgcacctccccgctttggcagctgtggcctccctggccagtgcccttgcaggaggccggccggcagcctgatgacccgtactctttagtcactgacgtcagattatttttataacgttccctgacagttcagagtcccttcgaattgcacttttctggtttcgcttatttaattaaaagagatgagtgtaagtataaaaaatgaaggtgaaataaccattggaattgtatttggttacttaatactgttccacaacatcttgggacgtctgttttcctttggagagtgaggccttgttattattcttttctgataaagaaaacattttatttcctttgggcttgcattagctctttcctagcaacccattatcccagctcagtacctttcaaacagaaaactagagtctggggttttgttgtgatctgaatttgtaagttattaatgtgaaagggggagcaggaagctccccctttgcacaaagggggatttgtttgcacaaagttcactgtaaatactgtgagaattgaattctgaaaaggtcatatttagtgatttcaaaagcacacatttaaatgaagactgactaaataaaaggtacc

SEQ ID NO: 113037 - DNA, 3676 bp, Homo sapiens
  Payload ID: 2115
  Gene Symbol: CAB39L
  Gene Name: calcium binding protein 39-like
  Uniprot ID: Q9H9S4
  ENST ID: ENST00000355854
  CDS Start-End: 499-1512
gtgacgttacaggactgaggagggaggaagtaaaagggagctgtgactgtggtacgtatctgaaagcaagtgttagagagggagtggagaacgcataagcaagctggtttgaccagaaacagaactgcctgtgacagattaagagacaagcaaggcttggaatctgagagcaagcaaagagagtggaaatttacagctgccctatgtgagtgttcaagtgatcattttctggtaacgttttccagtggtaactgttactcttcaaaaagagggacagaaagtcaagacctaattgtggaaactcttttctctgccacgcttggtaataggaggcaacctctattaaatggacgataaaggctacttcatctaaagtgctttgagctcaagaaagagctgtcttcagcacctcaccatgtgtctacattttgttgcttagaaaagcctaggcatttctgtaacatttgcattccatattggaagaagagatttctacacatgaaaaaaatgcctttgtttagtaaatcacacaaaaatccagcagaaattgtgaaaatcctgaaagacaatttggccattttggaaaagcaagacaaaaagacagacaaggcttcagaagaagtgtctaaatcactgcaagcaatgaaagaaattctgtgtggtacaaacgagaaagaacccccaacagaagcagtggctcagctagcacaagaactctacagcagtggcctgctagtgacactgatagctgacctgcagctgatagactttgagggaaaaaaagatgtgacccagatatttaacaacatcttgagaagacagataggcactcggagtcctactgtggagtatattagtgctcatcctcatatcctgtttatgctcctcaaaggatatgaagccccacagattgccttacgttgtgggattatgctgagagaatgtattcgacatgaaccacttgccaaaatcatcctcttttctaatcaattcagagatttctttaagtacgtggagttgtcaacatttgatattgcttcagatgcctttgctactttcaaggatttactaaccagacataaagtgttggtagcagacttcttagaacaaaattacgacactatttttgaagactatgagaaattgcttcagtctgagaattatgttactaagagacagtctttaaagctgctaggggagctgatcctggaccgtcacaactttgccatcatgacaaagtatatcagcaagccggagaacctgaaactcatgatgaacctccttcgggataaaagtcccaacatccagtttgaagcctttcatgtttttaaggtgtttgtggccagtcctcacaaaacacagcctattgtggagatcctgttaaaaaatcagcccaaactcattgagtttctgagcagcttccaaaaagaaaggacggatgatgagcagttcgctgacgagaagaactacttgattaaacagatccgagacttgaagaaaacggccccttgaagagctccccggcccctgtcacagtcagtcgtctcatttgtccagtttgtacagtgtgtcatttcagaaagtcatcattcttgggaagactttggaggtgcctattttttctgctgtaattgttctgggtagatggagtataaacatttgaatggaaaaaaattaacctagaataatatattcattttagtcaagtctgtgattatttatgtgaaatgagaaccattgtatcagatgttgataaaagcaattttaacttgcagatgtgagcccctgggcacaatgagccgctaaatgggagctcaattgacaggcatcaccaagtcttcaaggaggactgagttctcaggggagaactgggaatggggccagggtgcaaaaatgctttgcccatctgtaggtagacacacagatcgctcagggcactgagagatcccagaaggtaacgttaatgttttcagtcattgtgtgtcctttgttgctgccaatgtctttggactgtaatcagtgcatccacacctcccaggatccagtgctccctctcagctcagtctcccctctctccctgtcctgcattccatcccagctcctcagcatggcctcagtgggcgcacccatgcctcccgcagtccaggtgagcaggggagcaactgagcaggaagaggatggatcaacaagggtcacggggaataggggacccacggggtgtgacctgcttgctagagaactgtgaacatgtggctctggatagagtgactgctgctccatattagcttccagagggtgagtgagggacagaatatttccttcataatggtcatgggtgaatgctttctgctgtaagtgtcttttagagtaggaatcagcatagtgggatgcccagcaggcacaaaccatgggtccagggagtctcagcggggaacttctatcagtatcaataaccattggaaggagaaatgattcatgtgtgaaaaaattctcagatccatcaataaatttttttcagagccattgtatcagatgttgataaaagcaatttttttctaataagctgtcattctataattgcccatcacagtctttagtgaacacatagaaagcctatacagttttggtcctgaatagtctcttgtgactaggatgattgaggtgttaattcctcttccttataaaaaggcttggaatcaaaaatattttaaaaggccgtggtttcgtttcagacatcaaccatctaaaacgggattttaaagcgatattttacaagaatgaaaggcacaattgttgatctgtattttttacacttcagtttctaaatcatgaatcgttgccttccacaggaaccctcccttatacattacttgagtgttgtgtagtttttcttcagccaggtatttctctgcctagagaggggaagagaaatgtgttctccaggactgatcccctttgtagattttgtacctgaagagttacctggcagggcaccacccttggctaggcccaggtgtgtgtttctttcttgcctggcatggaccccgaggcaggtgatgtggggcctggcgcacctccccgctttggcagctgtggcctccctggccagtgcccttgcaggaggccggccggcagcctgatgacccgtactctttagtcactgacgtcagattatttttataacgttccctgacagttcagagtcccttcgaattgcacttttctggtttcgcttatttaattaaaagagatgagtgtaagtataaaaaatgaaggtgaaataaccattggaattgtatttggttacttaatactgttccacaacatcttgggacgtctgttttcctttggagagtgaggccttgttattattcttttctgataaagaaaacattttatttcctttgggcttgcattagctctttcctagcaacccattatcccagctcagtacctttcaaacagaaaactagagtctggggttttgttgtgatctgaatttgtaagttattaatgtgaaagggggagcaggaagctccccctttgcacaaagggggatttgtttgcacaaagttcactgtaaatactgtgagaattgaattctgaaaaggtcatatttagtgatttcaaaagcacacatttaaatgaagactgactaaataaaaggtaccacaca

SEQ ID NO: 113038 - DNA, 1627 bp, Homo sapiens
  Payload ID: 2115
  Gene Symbol: CAB39L
  Gene Name: calcium binding protein 39-like
  Uniprot ID: Q9H9S4
  ENST ID: ENST00000410043
  CDS Start-End: 452-1465
gagccaatggagttactcgtagtcgagaggccggcatcactggagtggtggcgcagctgtttcctccggatatccatcaaatattgagaagaaagaatatcaggagcaaagtgttctaagttgctgttcagaacgtaaagatgcgaaccccaaatcagtggtttgttcattcttcatgcaagagcaatgcactaaaggagagaagcaagctgtggtgatcagtgactttggtgaaagctaagaaggttcaaacaaatttgcaaatgatatacaacttctaaggaggcaacctctattaaatggacgataaaggctacttcatctaaagtgctttgagctcaagaaagagctgtcttcagcacctcaccatgtgtctacattttgttgcttagaaaagcctaggcatttctgtaacatttgcattccatattggaagaagagatttctacacatgaaaaaaatgcctttgtttagtaaatcacacaaaaatccagcagaaattgtgaaaatcctgaaagacaatttggccattttggaaaagcaagacaaaaagacagacaaggcttcagaagaagtgtctaaatcactgcaagcaatgaaagaaattctgtgtggtacaaacgagaaagaacccccaacagaagcagtggctcagctagcacaagaactctacagcagtggcctgctagtgacactgatagctgacctgcagctgatagactttgagggaaaaaaagatgtgacccagatatttaacaacatcttgagaagacagataggcactcggagtcctactgtggagtatattagtgctcatcctcatatcctgtttatgctcctcaaaggatatgaagccccacagattgccttacgttgtgggattatgctgagagaatgtattcgacatgaaccacttgccaaaatcatcctcttttctaatcaattcagagatttctttaagtacgtggagttgtcaacatttgatattgcttcagatgcctttgctactttcaaggatttactaaccagacataaagtgttggtagcagacttcttagaacaaaattacgacactatttttgaagactatgagaaattgcttcagtctgagaattatgttactaagagacagtctttaaagctgctaggggagctgatcctggaccgtcacaactttgccatcatgacaaagtatatcagcaagccggagaacctgaaactcatgatgaacctccttcgggataaaagtcccaacatccagtttgaagcctttcatgtttttaaggtgtttgtggccagtcctcacaaaacacagcctattgtggagatcctgttaaaaaatcagcccaaactcattgagtttctgagcagcttccaaaaagaaaggacggatgatgagcagttcgctgacgagaagaactacttgattaaacagatccgagacttgaagaaaacggccccttgaagagctccccggcccctgtcacagtcagtcgtctcatttgtccagtttgtacagtgtgtcatttcagaaagtcatcattcttgggaagactttggaggtgcctattttttctgctgtaattgttctgggtagatggagtataaacatttgaatggaaaaaaa

SEQ ID NO: 113039 - DNA, 2416 bp, Homo sapiens
  Payload ID: 2115
  Gene Symbol: CAB39L
  Gene Name: calcium binding protein 39-like
  Uniprot ID: Q9H9S4
  ENST ID: ENST00000409308
  CDS Start-End: 387-1400
ccgcagtggcgcccgagcgcgccgcctcccgattgactgctagcgctctcggcttgtctcgcgcactgtagctgagccaatggagttactcgtagtcgagaggccggcatcactggagtggtggcgcagctgtttcctccggatatccatcaaatattgagaagaaagaatatcaggagcaaagtgttctaagttgctgttcagaacgtaaagatgcgaaccccaaatcagtggtttgttcattcttcatgcaagagcaatgcactaaaggagagaagcaagctgtggtgatcagtgactttggtgaaagctaagaaggttcaaacaaatttgcaaatgatatacaacttctaagcattccatattggaagaagagatttctacacatgaaaaaaatgcctttgtttagtaaatcacacaaaaatccagcagaaattgtgaaaatcctgaaagacaatttggccattttggaaaagcaagacaaaaagacagacaaggcttcagaagaagtgtctaaatcactgcaagcaatgaaagaaattctgtgtggtacaaacgagaaagaacccccaacagaagcagtggctcagctagcacaagaactctacagcagtggcctgctagtgacactgatagctgacctgcagctgatagactttgagggaaaaaaagatgtgacccagatatttaacaacatcttgagaagacagataggcactcggagtcctactgtggagtatattagtgctcatcctcatatcctgtttatgctcctcaaaggatatgaagccccacagattgccttacgttgtgggattatgctgagagaatgtattcgacatgaaccacttgccaaaatcatcctcttttctaatcaattcagagatttctttaagtacgtggagttgtcaacatttgatattgcttcagatgcctttgctactttcaaggatttactaaccagacataaagtgttggtagcagacttcttagaacaaaattacgacactatttttgaagactatgagaaattgcttcagtctgagaattatgttactaagagacagtctttaaagctgctaggggagctgatcctggaccgtcacaactttgccatcatgacaaagtatatcagcaagccggagaacctgaaactcatgatgaacctccttcgggataaaagtcccaacatccagtttgaagcctttcatgtttttaaggtgtttgtggccagtcctcacaaaacacagcctattgtggagatcctgttaaaaaatcagcccaaactcattgagtttctgagcagcttccaaaaagaaaggacggatgatgagcagttcgctgacgagaagaactacttgattaaacagatccgagacttgaagaaaacggccccttgaagagctccccggcccctgtcacagtcagtcgtctcatttgtccagtttgtacagtgtgtcatttcagaaagtcatcattcttgggaagactttggaggtgcctattttttctgctgtaattgttctgggtagatggagtataaacatttgaatggaaaaaaattaacctagaataatatattcattttagtcaagtctgtgattatttatgtgaaatgagaaccattgtatcagatgttgataaaagcaattttaacttgcagatgtgagcccctgggcacaatgagccgctaaatgggagctcaattgacaggcatcaccaagtcttcaaggaggactgagttctcaggggagaactgggaatggggccagggtgcaaaaatgctttgcccatctgtaggtagacacacagatcgctcagggcactgagagatcccagaaggtaacgttaatgttttcagtcattgtgtgtcctttgttgctgccaatgtctttggactgtaatcagtgcatccacacctcccaggatccagtgctccctctcagctcagtctcccctctctccctgtcctgcattccatcccagctcctcagcatggcctcagtgggcgcacccatgcctcccgcagtccaggtgagcaggggagcaactgagcaggaagaggatggatcaacaagggtcacggggaataggggacccacggggtgtgacctgcttgctagagaactgtgaacatgtggctctggatagagtgactgctgctccatattagcttccagagggtgagtgagggacagaatatttccttcataatggtcatgggtgaatgctttctgctgtaagtgtcttttagagtaggaatcagcatagtgggatgcccagcaggcacaaaccatgggtccagggagtctcagcggggaacttctatcagtatcaataaccattggaaggagaaatgattcatgtgtgaaaaaattctcagatccatcaataaatttttttcagagccattgta

SEQ ID NO: 113040 - DNA, 468 bp, Homo sapiens
  Payload ID: 2115
  Gene Symbol: CAB39L
  Gene Name: calcium binding protein 39-like
  ENST ID: ENST00000409082
  CDS Start-End: 189-468
ggatttcttgtagaagccagttaaaaggagaacctagtatcacactaggcttctgaaaacaccaatcaagagttgcttaatgcaggggtcccttacccctgggctgcagacctgtacctgtccatggcctgttaggaaccgggcagcacagtaggagcattccatattggaagaagagatttctacacatgaaaaaaatgcctttgtttagtaaatcacacaaaaatccagcagaaattgtgaaaatcctgaaagacaatttggccattttggaaaagcaagacaaaaagacagacaaggcttcagaagaagtgtctaaatcactgcaagcaatgaaagaaattctgtgtggtacaaacgagaaagaacccccaacagaagcagtggctcagctagcacaagaactctacagcagtggcctgctagtgacactgatagctgacctgcagctgatagactttgaggtaa

SEQ ID NO: 113041 - DNA, 1411 bp, Homo sapiens
  Payload ID: 2115
  Gene Symbol: CAB39L
  Gene Name: calcium binding protein 39-like
  ENST ID: ENST00000409130
  CDS Start-End: 145-726
gagtatatctaagtgtttcagaatacactcaaattccagaatacgtctgcaatagtgccaggcacatagtagatcttcagtggatattgaatgaatcgtgacaaatgatatgaagccccacagattgccttacgttgtgggattatgctgagagaatgtattcgacatgaaccacttgccaaaatcatcctcttttctaatcaattcagagatttctttaagtacgtggagttgtcaacatttgatattgcttcagatgcctttgctactttcaaggatttactaaccagacataaagtgttggtagcagacttcttagaacaaaattacgacactatttttgaagactatgagaaattgcttcagtctgagaattatgttactaagagacagtctttaaagctgctaggggagctgatcctggaccgtcacaactttgccatcatgacaaagtatatcagcaagccggagaacctgaaactcatgatgaacctccttcgggataaaagtcccaacatccagtttgaagcctttcatgtttttaaggtgtttgtggccagtcctcacaaaacacagcctattgtggagatcctgttaaaaaatcagcccaaactcattgagtttctgagcagcttccaaaaagaaaggacggatgatgagcagttcgctgacgagaagaactacttgattaaacagatccgagacttgaagaaaacggccccttgaagagctccccggcccctgtcacagtcagtcgtctcatttgtccagtttgtacagtgtgtcatttcagaaagtcatcattcttgggaagactttggaggtgcctattttttctgctgtaattgttctgggtagatggagtataaacatttgaatggaaaaaaattaacctagaataatatattcattttagtcaagtctgtgattatttatgtgaaatgagaaccattgtatcagatgttgataaaagcaattttaacttgcagatgtgagcccctgggcacaatgagccgctaaatgggagctcaattgacaggcatcaccaagtcttcaaggaggactgagttctcaggggagaactgggaatggggccagggtgcaaaaatgctttgcccatctgtaggtagacacacagatcgctcagggcactgagagatcccagaaggtaacgttaatgttttcagtcattgtgtgtcctttgttgctgccaatgtctttggactgtaatcagtgcatccacacctcccaggatccagtgctccctctcagctcagtctcccctctctccctgtcctgcattccatcccagctcctcagcatggcctcagtgggcgcacccatgcctcccgcagtccaggtgagcaggggagcaactgagcaggaagaggatggatcaacaagggtcacg

SEQ ID NO: 113042 - DNA, 633 bp, Homo sapiens
  Payload ID: 2115
  Gene Symbol: CAB39L
  Gene Name: calcium binding protein 39-like
  ENST ID: ENST00000413278
  CDS Start-End: 249-633
agcgttttgttagggaagaagtggagaacagatattggaaggcaattagctgtctctaatacattgataaaatatataactataactgcaaaatgctaataacccagcagaggagtagatttgggaacataagatgaaaaagtcaacaagtgcattgatcacaacatatggtaatgatagcgtgattgtgatgacctttgttttatacctccttttacattccatattggaagaagagatttctacacatgaaaaaaatgcctttgtttagtaaatcacacaaaaatccagcagaaattgtgaaaatcctgaaagacaatttggccattttggaaaagcaagacaaaaagacagacaaggcttcagaagaagtgtctaaatcactgcaagcaatgaaagaaattctgtgtggtacaaacgagaaagaacccccaacagaagcagtggctcagctagcacaagaactctacagcagtggcctgctagtgacactgatagctgacctgcagctgatagactttgagggaaaaaaagatgtgacccagatatttaacaacatcttgagaagacagataggcactcggagtcctactgtggagtatattagtgctcatcctcatatcctgtttatgc

SEQ ID NO: 113043 - DNA, 727 bp, Homo sapiens
  Payload ID: 2115
  Gene Symbol: CAB39L
  Gene Name: calcium binding protein 39-like
  ENST ID: ENST00000457041
  CDS Start-End: 163-727
agagagggagtggagaacgcataagcaagctggtttgaccagaaacagaactgcctgtgacagattaagagacaagcaaggcttggaatctgagagcaagcaaagagagtggaaatttacagctgccctatcattccatattggaagaagagatttctacacatgaaaaaaatgcctttgtttagtaaatcacacaaaaatccagcagaaattgtgaaaatcctgaaagacaatttggccattttggaaaagcaagacaaaaagacagacaaggcttcagaagaagtgtctaaatcactgcaagcaatgaaagaaattctgtgtggtacaaacgagaaagaacccccaacagaagcagtggctcagctagcacaagaactctacagcagtggcctgctagtgacactgatagctgacctgcagctgatagactttgagggaaaaaaagatgtgacccagatatttaacaacatcttgagaagacagataggcactcggagtcctactgtggagtatattagtgctcatcctcatatcctgtttatgctcctcaaaggatatgaagccccacagattgccttacgttgtgggattatgctgagagaatgtattcgacatgaaccacttgccaaaatcatcctcttttctaatcaattcagagatttctttaagtacgtggagttgtcaacatttgatattgcttcagatgcctttgctactttcaagg

SEQ ID NO: 113044 - DNA, 1035 bp, Homo sapiens
  Payload ID: 2115
  Gene Symbol: CAB39L
  Gene Name: calcium binding protein 39-like
  ENST ID: ENST00000425242
  CDS Start-End: 1-843
gcttcagaagaagtgtctaaatcactgcaagcaatgaaagaaattctgtgtggtacaaacgagaaagaacccccaacagaagcagtggctcagctagcacaagaactctacagcagtggcctgctagtgacactgatagctgacctgcagctgatagactttgagggaaaaaaagatgtgacccagatatttaacaacatcttgagaagacagataggcactcggagtcctactgtggagtatattagtgctcatcctcatatcctgtttatgctcctcaaaggatatgaagccccacagattgccttacgttgtgggattatgctgagagaatgtattcgacatgaaccacttgccaaaatcatcctcttttctaatcaattcagagatttctttaagtacgtggagttgtcaacatttgatattgcttcagatgcctttgctactttcaagatttttgaagactatgagaaattgcttcagtctgagaattatgttactaagagacagtctttaaagctgctaggggagctgatcctggaccgtcacaactttgccatcatgacaaagtatatcagcaagccggagaacctgaaactcatgatgaacctccttcgggataaaagtcccaacatccagtttgaagcctttcatgtttttaaggtgtttgtggccagtcctcacaaaacacagcctattgtggagatcctgttaaaaaatcagcccaaactcattgagtttctgagcagcttccaaaaagaaaggacggatgatgagcagttcgctgacgagaagaactacttgattaaacagatccgagacttgaagaaaacggccccttgaagagctccccggcccctgtcacagtcagtcgtctcatttgtccagtttgtacagtgtgtcatttcagaaagtcatcattcttgggaagactttggaggtgcctattttttctgctgtaattgttctgggtagatggagtataaacatttgaatggaaaaaaattaacctagaataatatattcattttagtc

SEQ ID NO: 113045 - DNA, 3692 bp, Homo sapiens
  Payload ID: 2115
  Gene Symbol: CAB39L
  Gene Name: calcium binding protein 39-like
  Uniprot ID: Q9H9S4
  ENST ID: ENST00000610540
  CDS Start-End: 520-1533
ggatttcttgtagaagccagttaaaaggagaacctagtatcacactaggcttctgaaaacaccaatcaagagttgcttaatgcaggggtcccttacccctgggctgcagacctgtacctgtccatggcctgttaggaaccgggcagcacagtaggaggactgaggagggaggaagtaaaagggagctgtgactgtggtacgtatctgaaagcaagtgttagagagggagtggagaacgcataagcaagctggtttgaccagaaacagaactgcctgtgacagattaagagacaagcaaggcttggaatctgagagcaagcaaagagagtggaaatttacagctgccctatgaggcaacctctattaaatggacgataaaggctacttcatctaaagtgctttgagctcaagaaagagctgtcttcagcacctcaccatgtgtctacattttgttgcttagaaaagcctaggcatttctgtaacatttgcattccatattggaagaagagatttctacacatgaaaaaaatgcctttgtttagtaaatcacacaaaaatccagcagaaattgtgaaaatcctgaaagacaatttggccattttggaaaagcaagacaaaaagacagacaaggcttcagaagaagtgtctaaatcactgcaagcaatgaaagaaattctgtgtggtacaaacgagaaagaacccccaacagaagcagtggctcagctagcacaagaactctacagcagtggcctgctagtgacactgatagctgacctgcagctgatagactttgagggaaaaaaagatgtgacccagatatttaacaacatcttgagaagacagataggcactcggagtcctactgtggagtatattagtgctcatcctcatatcctgtttatgctcctcaaaggatatgaagccccacagattgccttacgttgtgggattatgctgagagaatgtattcgacatgaaccacttgccaaaatcatcctcttttctaatcaattcagagatttctttaagtacgtggagttgtcaacatttgatattgcttcagatgcctttgctactttcaaggatttactaaccagacataaagtgttggtagcagacttcttagaacaaaattacgacactatttttgaagactatgagaaattgcttcagtctgagaattatgttactaagagacagtctttaaagctgctaggggagctgatcctggaccgtcacaactttgccatcatgacaaagtatatcagcaagccggagaacctgaaactcatgatgaacctccttcgggataaaagtcccaacatccagtttgaagcctttcatgtttttaaggtgtttgtggccagtcctcacaaaacacagcctattgtggagatcctgttaaaaaatcagcccaaactcattgagtttctgagcagcttccaaaaagaaaggacggatgatgagcagttcgctgacgagaagaactacttgattaaacagatccgagacttgaagaaaacggccccttgaagagctccccggcccctgtcacagtcagtcgtctcatttgtccagtttgtacagtgtgtcatttcagaaagtcatcattcttgggaagactttggaggtgcctattttttctgctgtaattgttctgggtagatggagtataaacatttgaatggaaaaaaattaacctagaataatatattcattttagtcaagtctgtgattatttatgtgaaatgagaaccattgtatcagatgttgataaaagcaattttaacttgcagatgtgagcccctgggcacaatgagccgctaaatgggagctcaattgacaggcatcaccaagtcttcaaggaggactgagttctcaggggagaactgggaatggggccagggtgcaaaaatgctttgcccatctgtaggtagacacacagatcgctcagggcactgagagatcccagaaggtaacgttaatgttttcagtcattgtgtgtcctttgttgctgccaatgtctttggactgtaatcagtgcatccacacctcccaggatccagtgctccctctcagctcagtctcccctctctccctgtcctgcattccatcccagctcctcagcatggcctcagtgggcgcacccatgcctcccgcagtccaggtgagcaggggagcaactgagcaggaagaggatggatcaacaagggtcacggggaataggggacccacggggtgtgacctgcttgctagagaactgtgaacatgtggctctggatagagtgactgctgctccatattagcttccagagggtgagtgagggacagaatatttccttcataatggtcatgggtgaatgctttctgctgtaagtgtcttttagagtaggaatcagcatagtgggatgcccagcaggcacaaaccatgggtccagggagtctcagcggggaacttctatcagtatcaataaccattggaaggagaaatgattcatgtgtgaaaaaattctcagatccatcaataaatttttttcagagccattgtatcagatgttgataaaagcaatttttttctaataagctgtcattctataattgcccatcacagtctttagtgaacacatagaaagcctatacagttttggtcctgaatagtctcttgtgactaggatgattgaggtgttaattcctcttccttataaaaaggcttggaatcaaaaatattttaaaaggccgtggtttcgtttcagacatcaaccatctaaaacgggattttaaagcgatattttacaagaatgaaaggcacaattgttgatctgtattttttacacttcagtttctaaatcatgaatcgttgccttccacaggaaccctcccttatacattacttgagtgttgtgtagtttttcttcagccaggtatttctctgcctagagaggggaagagaaatgtgttctccaggactgatcccctttgtagattttgtacctgaagagttacctggcagggcaccacccttggctaggcccaggtgtgtgtttctttcttgcctggcatggaccccgaggcaggtgatgtggggcctggcgcacctccccgctttggcagctgtggcctccctggccagtgcccttgcaggaggccggccggcagcctgatgacccgtactctttagtcactgacgtcagattatttttataacgttccctgacagttcagagtcccttcgaattgcacttttctggtttcgcttatttaattaaaagagatgagtgtaagtataaaaaatgaaggtgaaataaccattggaattgtatttggttacttaatactgttccacaacatcttgggacgtctgttttcctttggagagtgaggccttgttattattcttttctgataaagaaaacattttatttcctttgggcttgcattagctctttcctagcaacccattatcccagctcagtacctttcaaacagaaaactagagtctggggttttgttgtgatctgaatttgtaagttattaatgtgaaagggggagcaggaagctccccctttgcacaaagggggatttgtttgcacaaagttcactgtaaatactgtgagaattgaattctgaaaaggtcatatttagtgatttcaaaagcacacatttaaatgaagactgactaaataaaaggtacc

SEQ ID NO: 113046 - DNA, 2559 bp, Homo sapiens
  Payload ID: 2116
  Gene Symbol: CABP4
  Gene Name: calcium binding protein 4
  Uniprot ID: P57796
  ENST ID: ENST00000325656
  CDS Start-End: 78-905
cataagcagctttatgggtcctgaaagccaagggtgcccaggggtgtggtgtctctgagccctgttatccctcccccatgaccacagagcaggcaagggggcagcagggcccaaatctggccattggccgtcagaagccccctgcgggggttgtgactcccaagagtgatgcagaggagcccccgttgaccaggaagaggagcaagaaggagagggggctccgagggtctcgaaagcgcactggcagctctggggagcagacaggccccgaggccccggggagcagcaataaccctcccagcactggagaggggccggcgggcgcaccccctgcatcccctgggccggcctcttctcgccagtcccaccgacatcgtcctgactccctgcacgacgctgctcagaggacatacgggcccctgctcaatcgagtcttcgggaaggaccgcgaactgggccccgaggagctagacgagcttcaggccgccttcgaggagtttgacactgaccgtgacggctacatcagccaccgggagctgggtgactgcatgcggaccctgggctacatgcccaccgagatggagctcctggaggtctcgcagcacatcaagatgcgcatgggcggccgtgtggactttgaggagtttgtagaactgataggcccaaagctgagggaggagacggcgcacatgctgggggtgcgagagctgcgcatcgccttccgagagtttgacagggacagggatggacgaattacggtggcggagctgcgggaggcggtaccggctctgctcggggagccgctggcgggtcctgagctggacgagatgctccgagaagtggacctcaatggggatggcaccgtagactttgacgagtttgtgatgatgctctcccgccactgaggctccaggagggaatatctgttgcccctgcggccccagacaccagccagacccaggctgcaggcctcccccaggagcctccaggatggagatggagacccagcagcccccagactacttctatccctgaaaacacctggcctcaatgttggcttgttatgttacctgcccaccctcatccttacctcctcctactcaagctgcctggagaagacctgctctcagctgcccaccgttcctcagtgtgagcaagatttgggtctctccagacctctgggaggtagggagttccctggcactggcagcattcagtggggaccccccagtggcatgatgaatggagaggatggctggaccccttccactacttatgtttataattttttttttttttaatgaacttgagccgggtgcagtggctcacacctgtaagcccagctgtcagggggcagaagcgggaggatagcttgagcccaggagtgcaagacctgcctgggcaatatactgagaccccattctccacaaaaaggaaaaataaaagacaaaaaaacaaacaaaaaaccaaaaaacccaagtgtaaaaaaagtgagcttgaaagaaagaaagggatggctccatgtatcaaagacaaagaaatcaaagctggggttgtaagagggagctgacgctgtgggggtttcagatctggatggaggcttggccgcctggactcctacaaccatgagtgacagaagaaccatatgagtctggggagcaagaaacaaaccccccggatatattccagggtctccaaaggctaagatattaatctgtctgcactgaccagtcatagaaagtggcaaggatacagatgttcagggcccagagtggaaacagctgccctaaagagcctggaactccagggcctgcccttcaagcaggcgtgtagtctctctccagggtgtgaaaaactggaaaaaaaccctgccgctcccaaaggggaacttgtgataaaaattacagattattgggctgggagtggtggctcacgcctgtaatcccagcactttgggaggctgaggcgggtgaattacctgaggtcaggagtttgaggccagcctgaccaacatggtgaaaccccatctctactaaaaatacaaaaattaactgggcgaggtagcatgcacctgtaatctcagctactcggaggttgaggcaggagaatcgcttgagcccgggaggtggagctgcagtgagctgagatcacaccattgcaccccagcctgagcaacagatcgagactccgtctcaaaaacaaaacaaaaaaaccatactgattataaaagtaaagaaaccaccatgaaggagacgagacagagacaaaaacaagaggactggcatctcagtgtacataatacagccgcctaagagaccacaagatacatgcaaataaaagacggctaaaaggggaagagagatcaacatgcagtaacaggatagtatgaagagagaaccggaagatttaaaaagtaacccaacaggccaggcgcatggctcatgcctggaatcccagcactttgggaggccaaggtgggtgggttgcttgagctcaggaattcgagaccagcctgggcaacatggtgaaaccctgtctctactaaaaatacaaaaatta

SEQ ID NO: 113047 - DNA, 1426 bp, Homo sapiens
  Payload ID: 2116
  Gene Symbol: CABP4
  Gene Name: calcium binding protein 4
  Uniprot ID: P57796
  ENST ID: ENST00000438189
  CDS Start-End: 345-857
aggcagctgtccccagcggccagtgtcccccatgccggatctctaggatctggaaggccgctgctgccaggaacaagaagtcagagagggccaggctgagcaggagcagcgccagacgcgtgccagctccatgccgggcctgggagccggccagccacgccatcaacccattggctggcagcccaaggagcagcagggccaccaggaagaccgtgtcccagccaccttggggtcccaccgacatcgtcctgactccctgcacgacgctgctcagaggacatacgggcccctgctcaatcgagtcttcgggaaggccaacatgagcaggggatgaaggaggaaggatgacagagccgtggctggccctggggacatcctggactctccccctgcaggaccgcgaactgggccccgaggagctagacgagcttcaggccgccttcgaggagtttgacactgaccgtgacggctacatcagccaccgggagctgggtgactgcatgcggaccctgggctacatgcccaccgagatggagctcctggaggtctcgcagcacatcaagatgcgcatgggcggccgtgtggactttgaggagtttgtagaactgataggcccaaagctgagggaggagacggcgcacatgctgggggtgcgagagctgcgcatcgccttccgagagtttgacagggacagggatggacgaattacggtggcggagctgcgggaggcggtaccggctctgctcggggagccgctggcgggtcctgagctggacgagatgctccgagaagtggacctcaatggggatggcaccgtagactttgacgagtttgtgatgatgctctcccgccactgaggctccaggagggaatatctgttgcccctgcggccccagacaccagccagacccaggctgcaggcctcccccaggagcctccaggatggagatggagacccagcagcccccagactacttctatccctgaaaacacctggcctcaatgttggcttgttatgttacctgcccaccctcatccttacctcctcctactcaagctgcctggagaagacctgctctcagctgcccaccgttcctcagtgtgagcaagatttgggtctctccagacctctgggaggtagggagttccctggcactggcagcattcagtggggaccccccagtggcatgatgaatggagaggatggctggaccccttccactacttatgtttataattttttttttttttaatgaacttgagccgggtgcagtggctcacacctgtaagcccagctgtcagggggcagaagcgggaggatagcttgagcccaggagtgcaagacctgcctgggcaatatactgagaccccattctccacaaaaaggaaaaataaaagacaaaaaaacaaacaaaaaaccaaaaaa

SEQ ID NO: 113048 - DNA, 682 bp, Homo sapiens
  Payload ID: 2116
  Gene Symbol: CABP4
  Gene Name: calcium binding protein 4
  ENST ID: ENST00000545777
  CDS Start-End: 22-408
gagccctgttatccctcccccatgaccacagagcaggcaagggggcagcagggcccaaatctggccattggccgtcagaagccccctgcgggggttgtgactcccaagagtgatgcagaggagcccccgttgaccaggaagaggagcaagaaggagagggggctccgagggtctcgaaagcgcactggcagctctggggagcagacaggccccgaggccccggggagcagcaataaccctcccagcactggagaggggccggcgggcgcaccccctgcatcccctgggccggcctcttctcgccagtcccaccgacatcgtcctgactccctgcacgacgctgctcagaggacatacgggcccctgctcaatcgagtcttcgggaaggggatgaaggaggaaggatgacagagccgtggctggccctggggacatcctggactctccccctgcaggaccgcgaactgggccccgaggagctagacgagcttcaggccgccttcgaggagtttgacactgaccgtgacggctacatcagccaccgggagctgggtgactgcatgcggaccctgggctacatgcccaccgagatggagctcctggagtgggcggccgtgtggactttgaggagtttgtagaactgataggcccaaagctgagggaggagacggcgcacatgctg

SEQ ID NO: 113049 - DNA, 1257 bp, Homo sapiens
  Payload ID: 2117
  Gene Symbol: CABP5
  Gene Name: calcium binding protein 5
  Uniprot ID: Q9NP86
  ENST ID: ENST00000293255
  CDS Start-End: 132-653
gagaagccaagagaggcaggaagaggtggcaaaggagtgctggagaagataaggaggctgagctccgacagggagcagggaggaggggccatcttgagactggtgccctgcgagctccaccccacccctccatgcagttccccatgggccccgcctgcatcttcttgaggaaaggcattgctgagaaacagcgggaaagaccactgggacaagatgagattgaagagctgcgggaagcatttcttgagttcgataaggaccgagatgggttcatctcttgtaaggatctggggaatctcatgaggacgatgggttacatgcccacggagatggaactgattgagctcggccagcaaatccgcatgaacctgggtggccgtgtagactttgatgactttgtggagctgatgacccccaaattgcttgcagaaacagctgggatgatcggtgtccaggagatgcgggatgccttcaaggagtttgacacgaatggagatggggagatcaccctggtggagctacagcaggccatgcagagactcctgggggagcggctcaccccccgggagatctctgaggttgtccgggaggctgatgttaatggagacggcacagttgactttgaagagtttgtgaagatgatgtctcgctgaggaggtcctggaagctccagaccctctccacctggtcaacatggagcaagcgcttgtggagaaccaaagcccaaaagccccagatccccttaaagcagagagggagggcaggcgggagggagggcattggcatgcggcgctgtgcatggggtgagacccagagcggtatctttgccaggatgggggcgtctgcagaactagattaagaaggaagagtctgtggatggaaataggaagcgtgggagggtccagttgccacccccaaaaattccaatgattcttgacatcttttcacttcacgtagtcctaagtccctgtgacctgccagagtctcttccccagcttccccttgggtgaaaatagtctcttctcctgttgggtatcaaaaggttcagaacgtagtctctactcttcccctgcctgcatcaactgttgcaaatcccgtttctctctcccggtaaggggacaaattatactttattcaggtgatggttacatgaacagcccagacttcaccactacgcaatatatccatgtaacaaaaccgcacttgtactccctaaatctatagaaatacaaaatgaaataaaaaggatgcaaatca

SEQ ID NO: 113050 - DNA, 3259 bp, Homo sapiens
  Payload ID: 2118
  Gene Symbol: CABP7
  Gene Name: calcium binding protein 7
  Uniprot ID: Q86V35
  ENST ID: ENST00000216144
  CDS Start-End: 342-989
agcgggcggcgagcagcgcggagcgcgcggggcaccgaggagcgggcgcggcgggcaccgcgcgaggcagccggagctctcggaaaggccagagcggcgccgcccccgctgcccctgcggggccccggctgggagcccgacgagggagcgggcggcatggcccggcggcccggggcgcgggggcgctaggcccccggaggggcgtccccagcctcgccgctgccgccgccgccctccgcagccgcgcgccccgcccgctccagccgcccccggggccgccaccggcccatgagccccggcctcaaagtttgcggcgggcgggcgggcgcggagcctccaagatgccgttccacccggtgacggcggcgttgatgtaccggggcatctacaccgtgcccaacctgctgtcggagcagcgcccggtggacatcccggaggacgagctggaggagatccgagaggccttcaaggtgtttgaccgtgacggcaatggcttcatctccaagcaggagctgggcacagccatgcgctcactgggttacatgcccaacgaggtggagctggaggtcatcatccagcggctggacatggatggtgatggtcaagtggactttgaggagtttgtgacccttctgggacccaaactctccacctcagggatcccagagaagttccatggcaccgactttgatactgtcttctggaagtgcgacatgcagaagctgacggtggatgagctgaagcggctgctctacgacaccttctgcgagcacctgtccatgaaggacatagagaacatcatcatgacggaggaggagagccacctgggcacagccgaggagtgtcccgtggatgtggagacctgctccaaccagcagatccgccagacttgcgtgcgcaagagtctcatctgcgccttcgccatcgccttcatcatcagtgtcatgctcattgcggccaaccaggtgctgcgcagtggcatgaagtagacgccacctggatgccccatccaccgcatgcggtgcccgtggcccgccccacaccaccgccgcctgcagacctctcccttggccggctccctgggccgccatctgcgtgtacttcagggcctgggtatccagcgagccctccccacccacccacggtcctcacctggagctgtggcctggctgtggagggccgggtggtggctctgaggatggtccccagccccaccctgtccccaccctggcctgtaaggagcactcactcttcctaccatccaggggctcctgggaaattaaggagggatttgcacaggaacccccaggacccagtcgctgctgtggtcccttgggcaggagcgggcaccctgtgccttgagacagcagcctatctggggccacacagccaacccagccctggtccctgaggtctgcccagggcacagggcacaggcagggacagaaagccttctcctgggggagggtgggaagccagggtgtcctgggccttgctgcctggcatagcctgaggaggcccctggtcttctccttgggccccttcctctgaccctcgttggaccccaacccagacccccttttctccatgtacctgctgggccagcccatttcacaggtgaggaacccgaggctcagggccccgagacttggcctcagttcttccttccacagggattttcaggaaaggcagaagctcgtggaggatgggcatctgaggtggccctgcagccccccaccttctggccctcccaccagaggcccagctaccaaggccacattgtccaccaccccagcctagagcctagaactgtagtccagctgaggaaggaggcagagctggggcctgaaggctctgagcagcctccagccagggggctcctccagggctgaactttgggagggcccctgtactacctcctgggccaagaaactggcacagccccacactgtcagtgccaagaggctgcgccaggccactctctcagcccagggcctgccctcctgtcctcccacttctctacgccctcaaggttggagaccccgctcccatgccccagctgtgccatcccaaatacttgggcagcagctcagcatgggcagacatgggggctgtggattcttccagggcggggatggcagatggagcccttgggctccttgggcctagagccacttcttaccaggcaacgggcacagccaccctggcacaccctctgcctggccgtgctgaacctctgctggtcccaagggagaagggagtgagcgtgggtcacctggggaaaatctcatctgattccctccttgcccgacctctgctaggggctggagaacagagctcagagcacccagtgtagggaaacacagccagaccactgtggtgacagactttctttataaacatttggaagttttctcccccatcttcttaagaagcaggggggcaggtggaggagagtgaggggagagctgcccggtgcagacccaggacgagggctgcacttggtgtggccgtgtcctgagcctcagtgaggctgggcagatggtctcggagcctccatggggcgtagcaggaaccgggcttggcttcctattgtgactgatgagaaaagtgaccacgtgggggtcagtcgggggcaaggggctcagccccactggactctgggctgcagaggccaccccccaggtgggggtgcccgcagggatggaggcagctcctgaactggtggccagcccacggggtactggaagacagtggttctgatgggttcagccctagagagagagagagaagcggggagaataagagtgcactacagcccaggcttatgccacccccagcccacctgcctcaccaccctggctgtggggagggtcagctgcctgcatgacttttctggaaggcagagcctcgaaaataggcagaccgtttgagccagcgacctcacctctaggaactgagcccaaggaaatagcggggttgcaggcagacattgagctgcgagacaatgggaataaccttcgtgtccacctgtgggggactgattcaatacatatgcacgtccacagcagagaatgccatgcggcctgtgtaagaattaaggcagatttatatgcactgatgaggaaagacatactgtgtgatagggagaaaaagcagcttataaaataatgtatatagcatgatactatttttgtttaaaaatatataaaatatataaatgcataaaaaaatcctggaagacacagcaaaatgttaa

SEQ ID NO: 113051 - DNA, 1109 bp, Homo sapiens
  Payload ID: 2119
  Gene Symbol: CABYR
  Gene Name: calcium binding tyrosine-(Y)-phosphorylation regulated
  Uniprot ID: O75952
  ENST ID: ENST00000327201
  CDS Start-End: 183-1028
taaaaacgctcgcaagcgccaagtctcctcaggagccgccggcaagggggcaacgaggaagctcttaagagcgcggccggaaagcagtagagaaatggtcagaaggaacgacaccacagaagaaattagaatgtttaaaagaaccaggaaaaacatctgtagaatctaaagtacctacccagatggaaaaatctacagacacagacgaggacaatgtaaccagaacagaatatagtgacaaaaccacccagtttccatcagtttatgctgtgccaggcactgagcaaacggaagcagttggtggtctttcttccaaaccagccacccctaagactactaccccaccctcatcaccacctccaacagctgtctcaccagagtttgcctacgtcccagctgacccagctcagcttgctgctcagatgttagcaatggcaacaagtgaacgaggacaaccaccaccatgttctaacatgtggaccctttattgtctaactgataagaatcaacaaggtcacccatcaccgccacctgcacctgggccttttccccaagcaaccctctatttacctaatcctaaggatccacagtttcagcagcatccaccaaaagtcacttttccaacttatgtgatgggcgacaccaagaagaccagtgccccaccttttatcttagtaggctcaaatgttcaggaagcacagggatggaaacctcttcctggacatgctgtcgtttcacagtcagatgtcttgagatatgttgcaatgcaagtgcccattgctgttcctgcagatgagaaataccagaaacataccctaagtccccagaatgctaatcctccaagtggacaagatgtccccaggccaaaaagccctgttttcctttctgttgctttcccagtagaagatgtagctaaaaaaagttcaggatctggtgacaaatgtgctccctttggaagttacggtattgctggggaggtaaccgtgactactgctcacaaacgtcgcaaagcagaaactgaaaactgatccagaaatgacgctgtctgggtcaacatttcagggaggagtctgccaccagtgtaatgtatcaataaacttcatgcaagc

SEQ ID NO: 113052 - DNA, 2252 bp, Homo sapiens
  Payload ID: 2119
  Gene Symbol: CABYR
  Gene Name: calcium binding tyrosine-(Y)-phosphorylation regulated
  Uniprot ID: O75952
  ENST ID: ENST00000399481
  CDS Start-End: 127-1554
atgcctgcggggctataaaaacgctcgcaagcgccaagtctcctcaggagccgccggcaagggggcaacgaggaagctcttaagagcgcggccggaaagcagttgagttacagacatcctgccaaaatgatttcttcaaagcccagacttgtcgtaccctatggcctcaagactctgctcgagggaattagcagagctgttctcaaaaccaacccatcaaacatcaaccagtttgcagcagcttattttcaagaacttactatgtatagagtagagaaatggtcagaaggaacgacaccacagaagaaattagaatgtttaaaagaaccaggaaaaacatctgtagaatctaaagtacctacccagatggaaaaatctacagacacagacgaggacaatgtaaccagaacagaatatagtgacaaaaccacccagtttccatcagtttatgctgtgccaggcactgagcaaacggaagcagttggtggtctttcttccaaaccagccacccctaagactactaccccaccctcatcaccacctccaacagctgtctcaccagagtttgcctacgtcccagctgacccagctcagcttgctgctcagatgttaggtaaagtttcatctattcattctgatcaatctgatgtgttaatggtggatgtggcaaccagtatgcctgttgttatcaaggaggtgccaagctcagaggctgctgaagatgtcatggtggctgctcctcttgtgtgttctggaaaggtgctagaagtgcaggttgtgaaccaaacatctgtccatgtagatttgggttctcaacctaaagaaaatgaggctgaaccatcaacggcttcctcagtccccttgcaggatgaacaagaacctcctgcttatgatcaagctcctgaggtcactttgcaggctgatattgaggttatgtcaactgttcatatatcatctgtctataacgatgtgcctgtgactgaaggagttgtttatatcgagcaactgccagaacaaatagttatcccttttactgatcaagttgcttgtcttaaagaaaatgagcagtcaaaagaaaatgagcagtcaccacgagttagtcccaaatctgtagtagaaaagaccacctctggcatgtctaaaaaatctgtagagtctgtaaaacttgcacagttggaggagaatgcaaaatattcctcagtatatatggaggcagaagcaacagctctgctctctgacacatctttgaaaggtcagcctgaggtacctgcacaactcctggatgcagaaggtgctatcaaaataggctctgaaaaatctctgcaccttgaagtggagatcacttcaatagtctctgacaatactgggcaggaggagtctggggaaaactctgtaccccaggagatggaaggcaaacctgtgctctctggggaagctgcagaagcagtgcactcaggtacatctgtaaagtcatctagtggccccttccctcctgctccagaaggccttactgcaccagaaattgaaccagaaggggaatcaacagctgaataaggtttgatgaagccagcaatggcaacaagtgaacgaggacaaccaccaccatgttctaacatgtggaccctttattgtctaactgataagaatcaacaaggtcacccatcaccgccacctgcacctgggccttttccccaagcaaccctctatttacctaatcctaaggatccacagtttcagcagcatccaccaaaagtcacttttccaacttatgtgatgggcgacaccaagaagaccagtgccccaccttttatcttagtaggctcaaatgttcaggaagcacagggatggaaacctcttcctggacatgctgtcgtttcacagtcagatgtcttgagatatgttgcaatgcaagtgcccattgctgttcctgcagatgagaaataccagaaacataccctaagtccccagaatgctaatcctccaagtggacaagatgtccccaggccaaaaagccctgttttcctttctgttgctttcccagtagaagatgtagctaaaaaaagttcaggatctggtgacaaatgtgctccctttggaagttacggtattgctggggaggtaaccgtgactactgctcacaaacgtcgcaaagcagaaactgaaaactgatccagaaatgacgctgtctgggtcaacatttcagggaggagtctgccaccagtgtaatgtatcaataaacttcatgcaagcat

SEQ ID NO: 113053 - DNA, 1414 bp, Homo sapiens
  Payload ID: 2119
  Gene Symbol: CABYR
  Gene Name: calcium binding tyrosine-(Y)-phosphorylation regulated
  Uniprot ID: O75952
  ENST ID: ENST00000399496
  CDS Start-End: 188-1327
ggccccgcctccttgagtggtgcggagctttgtgatgcggagcttcgtgatgcacgccccgatgcctgcggggctataaaaacgctcgcaagcgccaagtctcctcaggagccgccggcaagggggcaacgaggaagctcttaagagcgcggccggaaagcagttgagttacagacatcctgccaaaatgatttcttcaaagcccagacttgtcgtaccctatggcctcaagactctgctcgagggaattagcagagctgttctcaaaaccaacccatcaaacatcaaccagtttgcagcagcttattttcaagaacttactatgtatagagggaatactactatggatataaaagatctggttaaacaatttcatcagattaaagtagagaaatggtcagaaggaacgacaccacagaagaaattagaatgtttaaaagaaccaggaaaaacatctgtagaatctaaagtacctacccagatggaaaaatctacagacacagacgaggacaatgtaaccagaacagaatatagtgacaaaaccacccagtttccatcagtttatgctgtgccaggcactgagcaaacggaagcagttggtggtctttcttccaaaccagccacccctaagactactaccccaccctcatcaccacctccaacagctgtctcaccagagtttgcctacgtcccagctgacccagctcagcttgctgctcagatgttagcaatggcaacaagtgaacgaggacaaccaccaccatgttctaacatgtggaccctttattgtctaactgataagaatcaacaaggtcacccatcaccgccacctgcacctgggccttttccccaagcaaccctctatttacctaatcctaaggatccacagtttcagcagcatccaccaaaagtcacttttccaacttatgtgatgggcgacaccaagaagaccagtgccccaccttttatcttagtaggctcaaatgttcaggaagcacagggatggaaacctcttcctggacatgctgtcgtttcacagtcagatgtcttgagatatgttgcaatgcaagtgcccattgctgttcctgcagatgagaaataccagaaacataccctaagtccccagaatgctaatcctccaagtggacaagatgtccccaggccaaaaagccctgttttcctttctgttgctttcccagtagaagatgtagctaaaaaaagttcaggatctggtgacaaatgtgctccctttggaagttacggtattgctggggaggtaaccgtgactactgctcacaaacgtcgcaaagcagaaactgaaaactgatccagaaatgacgctgtctgggtcaacatttcagggaggagtctgccaccagtgtaatgtatcaataaacttcatgcaagcatacaa

SEQ ID NO: 113054 - DNA, 1272 bp, Homo sapiens
  Payload ID: 2119
  Gene Symbol: CABYR
  Gene Name: calcium binding tyrosine-(Y)-phosphorylation regulated
  Uniprot ID: O75952
  ENST ID: ENST00000399499
  CDS Start-End: 61-1200
cctatggctccgaagtccccgctggcatcctgaaagttgagttacagacatcctgccaaaatgatttcttcaaagcccagacttgtcgtaccctatggcctcaagactctgctcgagggaattagcagagctgttctcaaaaccaacccatcaaacatcaaccagtttgcagcagcttattttcaagaacttactatgtatagagggaatactactatggatataaaagatctggttaaacaatttcatcagattaaagtagagaaatggtcagaaggaacgacaccacagaagaaattagaatgtttaaaagaaccaggaaaaacatctgtagaatctaaagtacctacccagatggaaaaatctacagacacagacgaggacaatgtaaccagaacagaatatagtgacaaaaccacccagtttccatcagtttatgctgtgccaggcactgagcaaacggaagcagttggtggtctttcttccaaaccagccacccctaagactactaccccaccctcatcaccacctccaacagctgtctcaccagagtttgcctacgtcccagctgacccagctcagcttgctgctcagatgttagcaatggcaacaagtgaacgaggacaaccaccaccatgttctaacatgtggaccctttattgtctaactgataagaatcaacaaggtcacccatcaccgccacctgcacctgggccttttccccaagcaaccctctatttacctaatcctaaggatccacagtttcagcagcatccaccaaaagtcacttttccaacttatgtgatgggcgacaccaagaagaccagtgccccaccttttatcttagtaggctcaaatgttcaggaagcacagggatggaaacctcttcctggacatgctgtcgtttcacagtcagatgtcttgagatatgttgcaatgcaagtgcccattgctgttcctgcagatgagaaataccagaaacataccctaagtccccagaatgctaatcctccaagtggacaagatgtccccaggccaaaaagccctgttttcctttctgttgctttcccagtagaagatgtagctaaaaaaagttcaggatctggtgacaaatgtgctccctttggaagttacggtattgctggggaggtaaccgtgactactgctcacaaacgtcgcaaagcagaaactgaaaactgatccagaaatgacgctgtctgggtcaacatttcagggaggagtctgccaccagtgtaatgtatcaataaactt

SEQ ID NO: 113055 - DNA, 824 bp, Homo sapiens
  Payload ID: 2119
  Gene Symbol: CABYR
  Gene Name: calcium binding tyrosine-(Y)-phosphorylation regulated
  Uniprot ID: O75952
  ENST ID: ENST00000415309
  CDS Start-End: 76-741
cgccggcaagggggcaacgaggaagctcttaagagcgcggccggaaagcagttgagttacagacatcctgccaaaatgatttcttcaaagcccagacttgtcgtaccctatggcctcaagactctgctcgagggaattagcagagctgttctcaaaaccaacccatcaaacatcaaccagtttgcagcagcttattttcaagaacttactatgtatagagggaatactactatggatataaaagatctggttaaacaatttcatcagattaaagtagagaaatggtcagaaggaacgacaccacagaagaaattagaatgtttaaaagaaccaggaaaaacatctgtagaatctaaagtacctacccagatggaaaaatctacagacacagacgaggacaatgtaaccagaacagaatatagtgacaaaaccacccagtttccatcagtttatgctgtgccaggcactgagcaaacggaagcagttggtggtctttcttccaaaccagccacccctaagactactaccccaccctcatcaccacctccaacagctgtctcaccagagtttgcctacgtcccagctgacccagctcagcttgctgctcagatgttagaagatgtagctaaaaaaagttcaggatctggtgacaaatgtgctccctttggaagttacggtattgctggggaggtaaccgtgactactgctcacaaacgtcgcaaagcagaaactgaaaactgatccagaaatgacgctgtctgggtcaacatttcagggaggagtctgccaccagtgtaatgtatcaataaacttcatgcaagcat

SEQ ID NO: 113056 - DNA, 1664 bp, Homo sapiens
  Payload ID: 2119
  Gene Symbol: CABYR
  Gene Name: calcium binding tyrosine-(Y)-phosphorylation regulated
  Uniprot ID: O75952
  ENST ID: ENST00000486759
  CDS Start-End: 82-1563
aggagccgccggcaagggggcaacgaggaagctcttaagagcgcggccggaaagcagttgagttacagacatcctgccaaaatgatttcttcaaagcccagacttgtcgtaccctatggcctcaagactctgctcgagggaattagcagagctgttctcaaaaccaacccatcaaacatcaaccagtttgcagcagcttattttcaagaacttactatgtatagagggaatactactatggatataaaagatctggttaaacaatttcatcagattaaagtagagaaatggtcagaaggaacgacaccacagaagaaattagaatgtttaaaagaaccaggaaaaacatctgtagaatctaaagtacctacccagatggaaaaatctacagacacagacgaggacaatgtaaccagaacagaatatagtgacaaaaccacccagtttccatcagtttatgctgtgccaggcactgagcaaacggaagcagttggtggtctttcttccaaaccagccacccctaagactactaccccaccctcatcaccacctccaacagctgtctcaccagagtttgcctacgtcccagctgacccagctcagcttgctgctcagatgttaggtaaagtttcatctattcattctgatcaatctgatgtgttaatggtggatgtggcaaccagtatgcctgttgttatcaaggaggtgccaagctcagaggctgctgaagatgtcatggtggctgctcctcttgtgtgttctggaaaggtgctagaagtgcaggttgtgaaccaaacatctgtccatgtagatttgggttctcaacctaaagaaaatgaggctgaaccatcaacggcttcctcagtccccttgcaggatgaacaagaacctcctgcttatgatcaagctcctgaggtcactttgcaggctgatattgaggttatgtcaactgttcatatatcatctgtctataacgatgtgcctgtgactgaaggagttgtttatatcgagcaactgccagaacaaatagttatcccttttactgatcaagttgcttgtcttaaagaaaatgagcagtcaaaagaaaatgagcagtcaccacgagttagtcccaaatctgtagtagaaaagaccacctctggcatgtctaaaaaatctgtagagtctgtaaaacttgcacagttggaggagaatgcaaaatattcctcagtatatatggaggcagaagcaacagctctgctctctgacacatctttgaaaggtcagcctgaggtacctgcacaactcctggatgcagaaggtgctatcaaaataggctctgaaaaatctctgcaccttgaagtggagatcacttcaatagtctctgacaatactgggcaggaggagtctggggaaaactctgtaccccaggagatggaaggcaaacctgtgctctctggggaagctgcagaagcagtgcactcaggtacatctgtaaagtcatctagtggccccttccctcctgctccagaaggccttactgcaccagaaattgaaccagaaggggaatcaacagctgaataaggtttgatgaagccagatccagaaatgacgctgtctgggtcaacatttcagggaggagtctgccaccagtgtaatgtatcaataaacttcatgcaagcata

SEQ ID NO: 113057 - DNA, 1792 bp, Homo sapiens
  Payload ID: 2119
  Gene Symbol: CABYR
  Gene Name: calcium binding tyrosine-(Y)-phosphorylation regulated
  Uniprot ID: O75952
  ENST ID: ENST00000463087
  CDS Start-End: 86-1567
cctcaggagccgccggcaagggggcaacgaggaagctcttaagagcgcggccggaaagcagttgagttacagacatcctgccaaaatgatttcttcaaagcccagacttgtcgtaccctatggcctcaagactctgctcgagggaattagcagagctgttctcaaaaccaacccatcaaacatcaaccagtttgcagcagcttattttcaagaacttactatgtatagagggaatactactatggatataaaagatctggttaaacaatttcatcagattaaagtagagaaatggtcagaaggaacgacaccacagaagaaattagaatgtttaaaagaaccaggaaaaacatctgtagaatctaaagtacctacccagatggaaaaatctacagacacagacgaggacaatgtaaccagaacagaatatagtgacaaaaccacccagtttccatcagtttatgctgtgccaggcactgagcaaacggaagcagttggtggtctttcttccaaaccagccacccctaagactactaccccaccctcatcaccacctccaacagctgtctcaccagagtttgcctacgtcccagctgacccagctcagcttgctgctcagatgttaggtaaagtttcatctattcattctgatcaatctgatgtgttaatggtggatgtggcaaccagtatgcctgttgttatcaaggaggtgccaagctcagaggctgctgaagatgtcatggtggctgctcctcttgtgtgttctggaaaggtgctagaagtgcaggttgtgaaccaaacatctgtccatgtagatttgggttctcaacctaaagaaaatgaggctgaaccatcaacggcttcctcagtccccttgcaggatgaacaagaacctcctgcttatgatcaagctcctgaggtcactttgcaggctgatattgaggttatgtcaactgttcatatatcatctgtctataacgatgtgcctgtgactgaaggagttgtttatatcgagcaactgccagaacaaatagttatcccttttactgatcaagttgcttgtcttaaagaaaatgagcagtcaaaagaaaatgagcagtcaccacgagttagtcccaaatctgtagtagaaaagaccacctctggcatgtctaaaaaatctgtagagtctgtaaaacttgcacagttggaggagaatgcaaaatattcctcagtatatatggaggcagaagcaacagctctgctctctgacacatctttgaaaggtcagcctgaggtacctgcacaactcctggatgcagaaggtgctatcaaaataggctctgaaaaatctctgcaccttgaagtggagatcacttcaatagtctctgacaatactgggcaggaggagtctggggaaaactctgtaccccaggagatggaaggcaaacctgtgctctctggggaagctgcagaagcagtgcactcaggtacatctgtaaagtcatctagtggccccttccctcctgctccagaaggccttactgcaccagaaattgaaccagaaggggaatcaacagctgaataaggtttgatgaagccagaagatgtagctaaaaaaagttcaggatctggtgacaaatgtgctccctttggaagttacggtattgctggggaggtaaccgtgactactgctcacaaacgtcgcaaagcagaaactgaaaactgatccagaaatgacgctgtctgggtcaacatttcagggaggagtctgccaccagtgtaatgtatcaataaacttcatgcaagcata

SEQ ID NO: 113058 - DNA, 535 bp, Homo sapiens
  Payload ID: 2119
  Gene Symbol: CABYR
  Gene Name: calcium binding tyrosine-(Y)-phosphorylation regulated
  ENST ID: ENST00000584752
  CDS Start-End: 82-303
aggagccgccggcaagggggcaacgaggaagctcttaagagcgcggccggaaagcagttgagttacagacatcctgccaaaatgatttcttcaaagcccagacttgtcgtaccctatggcctcaagactctgctcgagggaattagcagagctgttctcaaaaccaacccatcaaacatcaaccagtttgcagcagcttattttcaagaacttactatgtatagagggaatactactatggatataaaagatctggttaaacaatttcatcagattaaagatggtgcaactaatgtttgttgaatgaagaaagaatggatggaagggcaaggaggaagaggggagaaactaaaccacctactttatatagagaaatggtcagaaggaacgacaccacagaagaaattagaatgtttaaaagaaccaggaaaaacatctgtagaatctaaagtacctacccagatggaaaaatctacagacacagacgaggacaatgtaaccagaacagaatatagtgacaaaaccacccagtttc

SEQ ID NO: 113059 - DNA, 871 bp, Homo sapiens
  Payload ID: 2119
  Gene Symbol: CABYR
  Gene Name: calcium binding tyrosine-(Y)-phosphorylation regulated
  ENST ID: ENST00000581872
  CDS Start-End: 82-303
aggagccgccggcaagggggcaacgaggaagctcttaagagcgcggccggaaagcagttgagttacagacatcctgccaaaatgatttcttcaaagcccagacttgtcgtaccctatggcctcaagactctgctcgagggaattagcagagctgttctcaaaaccaacccatcaaacatcaaccagtttgcagcagcttattttcaagaacttactatgtatagagggaatactactatggatataaaagatctggttaaacaatttcatcagattaaagatggtgcaactaatgtttgttgaatgaagaaagaatggatggaagggcaaggaggaagaggggagaaactaaaccacctactttatagtctctgtagagaaatggtcagaaggaacgacaccacagaagaaattagaatgtttaaaagaaccaggaaaaacatctgtagaatctaaagtacctacccagatggaaaaatctacagacacagacgaggacaatgtaaccagaacagaatatagtgacaaaaccacccagtttccatcagtttatgctgtgccaggcactgagcaaacggaagcagttggtggtctttcttccaaaccagccacccctaagactactaccccaccctcatcaccacctccaacagctgtctcaccagagtttgcctacgtcccagctgacccagctcagcttgctgctcagatgttaggtaaagtttcatctattcattctgatcaatctgatgtgttaatggtggatgtggcaaccagtatgcctgttgttatcaaggaggtgccaagctcagaggctgctgaagatgtcatggtggctgctcctcttgtgtgttctggaaaggtgctagaa

SEQ ID NO: 113060 - DNA, 451 bp, Homo sapiens
  Payload ID: 2119
  Gene Symbol: CABYR
  Gene Name: calcium binding tyrosine-(Y)-phosphorylation regulated
  ENST ID: ENST00000579102
  CDS Start-End: 199-451
ggtgataggagagatctgggaagaattattaagctgtcgcttttaaataaccctaatagtgtttgtgacaattttacccgttgacttttctcagcttgcttaggacagttctttgtggggaactgaactgtaggacgtttagcgtccctggccccacacgttcccaaagtcgggttgagttacagacatcctgccaaaatgatttcttcaaagcccagacttgtcgtaccctatggcctcaagactctgctcgagggaattagcagagctgttctcaaaaccaacccatcaaacatcaaccagtttgcagcagcttattttcaagaacttactatgtatagagggaatactactatggatataaaagatctggttaaacaatttcatcagattaaagtagagaaatggtcagaaggaacgacaccacagaagaaattagaatgtttaaaag

SEQ ID NO: 113061 - DNA, 634 bp, Homo sapiens
  Payload ID: 2119
  Gene Symbol: CABYR
  Gene Name: calcium binding tyrosine-(Y)-phosphorylation regulated
  ENST ID: ENST00000581397
  CDS Start-End: 47-634
taagagcgcggccggaaagcagttgagttacagacatcctgccaaaatgatttcttcaaagcccagacttgtcgtaccctatggcctcaagactctgctcgagggaattagcagagctgttctcaaaaccaacccatcaaacatcaaccagtttgcagcagcttattttcaagaacttactatgtatagagtagagaaatggtcagaaggaacgacaccacagaagaaattagaatgtttaaaagaaccaggaaaaacatctgtagaatctaaagtacctacccagatggaaaaatctacagacacagacgaggacaatgtaaccagaacagaatatagtgacaaaaccacccagtttccatcagtttatgctgtgccaggcactgagcaaacggaagcagttggtggtctttcttccaaaccagccacccctaagactactaccccaccctcatcaccacctccaacagctgtctcaccagagtttgcctacgtcccagctgacccagctcagcttgctgctcagatgttagcaatggcaacaagtgaacgaggacaaccaccaccatgttctaacatgtggaccctttattgtctaactgataagaatcaacaaggtcacccatcaccgcca

SEQ ID NO: 113062 - DNA, 1090 bp, Homo sapiens
  Payload ID: 2119
  Gene Symbol: CABYR
  Gene Name: calcium binding tyrosine-(Y)-phosphorylation regulated
  ENST ID: ENST00000582229
  CDS Start-End: 1-880
tatgcctgttgttatcaaggaggtgccaagctcagaggctgctgaagatgtcatggtggctgctcctcttgtgtgttctggaaaggtgctagaagtgcaggttgtgaaccaaacatctgtccatgtagatttgggttctcaacctaaagaaaatgaggctgaaccatcaacggcttcctcagtccccttgcaggatgaacaagaacctcctgcttatgatcaagctcctgaggtcactttgcaggctgatattgaggttatgtcaactgttcatatatcatctgtctataacgatgtgcctgtgactgaaggagttgtttatatcgagcaactgccagaacaaatagttatcccttttactgatcaagttgcttgtcttaaagaaaatgagcagtcaaaagaaaatgagcagtcaccacgagttagtcccaaatctgtagtagaaaagaccacctctggcatgtctaaaaaatctgtagagtctgtaaaacttgcacagttggaggagaatgcaaaatattcctcagtatatatggaggcagaagcaacagctctgctctctgacacatctttgaaaggtcagcctgaggtacctgcacaactcctggatgcagaaggtgctatcaaaataggctctgaaaaatctctgcaccttgaagtggagatcacttcaatagtctctgacaatactgggcaggaggagtctggggaaaactctgtaccccaggagatggaaggcaaacctgtgctctctggggaagctgcagaagcagtgcactcaggtacatctgtaaagtcatctagtggccccttccctcctgctccagaaggccttactgcaccagaaattgaaccagaaggggaatcaacagctgaataaggtttgatgaagccagtagaagatgtagctaaaaaaagttcaggatctggtgacaaatgtgctccctttggaagttacggtattgctggggaggtaaccgtgactactgctcacaaacgtcgcaaagcagaaactgaaaactgatccagaaatgacgctgtctgggtcaacatttcagggaggagtctgccaccagtgtaatgtatcaat

SEQ ID NO: 113063 - DNA, 605 bp, Homo sapiens
  Payload ID: 2119
  Gene Symbol: CABYR
  Gene Name: calcium binding tyrosine-(Y)-phosphorylation regulated
  ENST ID: ENST00000585037
  CDS Start-End: 467-605
aggagccgccggcaagggggcaacgaggaagctcttaagagcgcggccggaaagcagacggactctagctgtgtcacccaggctggagtgcagtggcgcgatctcggctgtcagctccgcctcccggattcacgccattctcctgcctcagcctcccgagtagctgggactacaggcacccgccaccacgcccggctgattttttgttttagtagagacggggtttcaccgtgttagccaggatggtctccatctcctgacctcgcctcgtgatccgcccgactcggcctcccaaagtgctgggattacaggcgtgagccaccgcgcccggcctctgggagccactttcaaaacggtctatctactcactttggagaaatggtcagaaggaacgacaccacagaagaaattagaatgtttaaaagaaccaggaaaaacatctgtagaatctaaagtacctacccagatggaaaaatctacagacacagacgaggacaatgtaaccagaacagaatatagtgacaaaaccacccagtttccatcagtttatgctgtgccaggcactgagcaaacggaagcagttggtggtctttcttccaaaccag

SEQ ID NO: 113064 - DNA, 596 bp, Homo sapiens
  Payload ID: 2119
  Gene Symbol: CABYR
  Gene Name: calcium binding tyrosine-(Y)-phosphorylation regulated
  ENST ID: ENST00000577705
  CDS Start-End: 487-596
ggagccgccggcaagggggcaacgaggaagctcttaagagcgcggccggaaagcagcccagacttgtcgtaccctatggcctcaagactctgctcgagggaattagcagagctgttctcaaaaccaacccatcaaacatcaaccagtttgcagcagcttattttcaagaacttactatgtatagagggaatactactatggatataaaagatctggttaaacaatttcatcagattaaagaatgaagccgcggaccctcacggtgagttacagctcctaaggtggcacgtctggagtttgctccttctgacgttcggatgtgttcggagtttcttccttctggtgggttcgtggtctcgctggctcaggagtgaagctgcagaccttcatgtagagaaatggtcagaaggaacgacaccacagaagaaattagaatgtttaaaagaaccaggaaaaacatctgtagaatctaaagtacctacccagatggaaaaatctacagacacagacgaggacaatgtaaccagaacagaatatagtgacaaaaccacccagtttccatcagtttatgctgtgccaggcactgagcaaacgga

SEQ ID NO: 113065 - DNA, 443 bp, Homo sapiens
  Payload ID: 2119
  Gene Symbol: CABYR
  Gene Name: calcium binding tyrosine-(Y)-phosphorylation regulated
  ENST ID: ENST00000579956
  CDS Start-End: 82-303
aggagccgccggcaagggggcaacgaggaagctcttaagagcgcggccggaaagcagttgagttacagacatcctgccaaaatgatttcttcaaagcccagacttgtcgtaccctatggcctcaagactctgctcgagggaattagcagagctgttctcaaaaccaacccatcaaacatcaaccagtttgcagcagcttattttcaagaacttactatgtatagagggaatactactatggatataaaagatctggttaaacaatttcatcagattaaagatggtgcaactaatgtttgttgaatgaagaaagaatggatggaagggcaaggaggaagaggggagaaactaaaccacctactttatagtctctggtaccatgaacctgtgagggagacacttttaattaaaagagcaagtggtcctttccagagttgcctaag

SEQ ID NO: 113066 - DNA, 2226 bp, Homo sapiens
  Payload ID: 2119
  Gene Symbol: CABYR
  Gene Name: calcium binding tyrosine-(Y)-phosphorylation regulated
  Uniprot ID: O75952
  ENST ID: ENST00000621648
  CDS Start-End: 49-1530
cttaagagcgcggccggaaagcagttgagttacagacatcctgccaaaatgatttcttcaaagcccagacttgtcgtaccctatggcctcaagactctgctcgagggaattagcagagctgttctcaaaaccaacccatcaaacatcaaccagtttgcagcagcttattttcaagaacttactatgtatagagggaatactactatggatataaaagatctggttaaacaatttcatcagattaaagtagagaaatggtcagaaggaacgacaccacagaagaaattagaatgtttaaaagaaccaggaaaaacatctgtagaatctaaagtacctacccagatggaaaaatctacagacacagacgaggacaatgtaaccagaacagaatatagtgacaaaaccacccagtttccatcagtttatgctgtgccaggcactgagcaaacggaagcagttggtggtctttcttccaaaccagccacccctaagactactaccccaccctcatcaccacctccaacagctgtctcaccagagtttgcctacgtcccagctgacccagctcagcttgctgctcagatgttaggtaaagtttcatctattcattctgatcaatctgatgtgttaatggtggatgtggcaaccagtatgcctgttgttatcaaggaggtgccaagctcagaggctgctgaagatgtcatggtggctgctcctcttgtgtgttctggaaaggtgctagaagtgcaggttgtgaaccaaacatctgtccatgtagatttgggttctcaacctaaagaaaatgaggctgaaccatcaacggcttcctcagtccccttgcaggatgaacaagaacctcctgcttatgatcaagctcctgaggtcactttgcaggctgatattgaggttatgtcaactgttcatatatcatctgtctataacgatgtgcctgtgactgaaggagttgtttatatcgagcaactgccagaacaaatagttatcccttttactgatcaagttgcttgtcttaaagaaaatgagcagtcaaaagaaaatgagcagtcaccacgagttagtcccaaatctgtagtagaaaagaccacctctggcatgtctaaaaaatctgtagagtctgtaaaacttgcacagttggaggagaatgcaaaatattcctcagtatatatggaggcagaagcaacagctctgctctctgacacatctttgaaaggtcagcctgaggtacctgcacaactcctggatgcagaaggtgctatcaaaataggctctgaaaaatctctgcaccttgaagtggagatcacttcaatagtctctgacaatactgggcaggaggagtctggggaaaactctgtaccccaggagatggaaggcaaacctgtgctctctggggaagctgcagaagcagtgcactcaggtacatctgtaaagtcatctagtggccccttccctcctgctccagaaggccttactgcaccagaaattgaaccagaaggggaatcaacagctgaataaggtttgatgaagccagcaatggcaacaagtgaacgaggacaaccaccaccatgttctaacatgtggaccctttattgtctaactgataagaatcaacaaggtcacccatcaccgccacctgcacctgggccttttccccaagcaaccctctatttacctaatcctaaggatccacagtttcagcagcatccaccaaaagtcacttttccaacttatgtgatgggcgacaccaagaagaccagtgccccaccttttatcttagtaggctcaaatgttcaggaagcacagggatggaaacctcttcctggacatgctgtcgtttcacagtcagatgtcttgagatatgttgcaatgcaagtgcccattgctgttcctgcagatgagaaataccagaaacataccctaagtccccagaatgctaatcctccaagtggacaagatgtccccaggccaaaaagccctgttttcctttctgttgctttcccagtagaagatgtagctaaaaaaagttcaggatctggtgacaaatgtgctccctttggaagttacggtattgctggggaggtaaccgtgactactgctcacaaacgtcgcaaagcagaaactgaaaactgatccagaaatgacgctgtctgggtcaacatttcagggaggagtctgccaccagtgtaatgtatcaataaacttcatgcaagc

SEQ ID NO: 113067 - DNA, 1622 bp, Homo sapiens
  Payload ID: 2119
  Gene Symbol: CABYR
  Gene Name: calcium binding tyrosine-(Y)-phosphorylation regulated
  ENST ID: ENST00000627314
  CDS Start-End: 228-1415
gtgatgcggagcttcgtgatgcacgccccgatgcctgcggggctataaaaacgctcgcaagcgccaagtctcctcaggagccgccggcaagggggcaacgaggaagctcttaagagcgcggccggaaagcagtagagaaatggtcagaaggaacgacaccacagaagaaattagaatgtttaaaagaaccaggaaaaacatctgtagaatctaaagtacctacccagatggaaaaatctacagacacagacgaggacaatgtaaccagaacagaatatagtgacaaaaccacccagtttccatcagtttatgctgtgccaggcactgagcaaacggaagcagttggtggtctttcttccaaaccagccacccctaagactactaccccaccctcatcaccacctccaacagctgtctcaccagagtttgcctacgtcccagctgacccagctcagcttgctgctcagatgttaggtaaagtttcatctattcattctgatcaatctgatgtgttaatggtggatgtggcaaccagtatgcctgttgttatcaaggaggtgccaagctcagaggctgctgaagatgtcatggtggctgctcctcttgtgtgttctggaaaggtgctagaagtgcaggttgtgaaccaaacatctgtccatgtagatttgggttctcaacctaaagaaaatgaggctgaaccatcaacggcttcctcagtccccttgcaggatgaacaagaacctcctgcttatgatcaagctcctgaggtcactttgcaggctgatattgaggttatgtcaactgttcatatatcatctgtctataacgatgtgcctgtgactgaaggagttgtttatatcgagcaactgccagaacaaatagttatcccttttactgatcaagttgcttgtcttaaagaaaatgagcagtcaaaagaaaatgagcagtcaccacgagttagtcccaaatctgtagtagaaaagaccacctctggcatgtctaaaaaatctgtagagtctgtaaaacttgcacagttggaggagaatgcaaaatattcctcagtatatatggaggcagaagcaacagctctgctctctgacacatctttgaaaggtcagcctgaggtacctgcacaactcctggatgcagaaggtgctatcaaaataggctctgaaaaatctctgcaccttgaagtggagatcacttcaatagtctctgacaatactgggcaggaggagtctggggaaaactctgtaccccaggagatggaaggcaaacctgtgctctctggggaagctgcagaagcagtgcactcaggtacatctgtaaagtcatctagtggccccttccctcctgctccagaaggccttactgcaccagaaattgaaccagaaggggaatcaacagctgaataaggtttgatgaagccagcaatggcaacaagtgaacgaggacaaccaccaccatgttctaacatgtggaccctttattgtctaactgataagaatcaacaaggtcacccatcaccgccacctgcacctgggccttttccccaagcaaccctctatttacctaatcctaaggatccacagtttcagcagcatccaccaaaagtcactttt

SEQ ID NO: 113068 - DNA, 2688 bp, Homo sapiens
  Payload ID: 2120
  Gene Symbol: CACFD1
  Gene Name: calcium channel flower domain containing 1
  Uniprot ID: Q9UGQ2
  ENST ID: ENST00000291722
  CDS Start-End: 101-493
gctaatatgctccctctcccacaaggcagcgcgccggctcggacgcggccggctaccgagccctttgtgagggctgtgagctgcgcctgacggtggcaccatgagcagctcaggtggggcgcccggggcgtccgccagctctgcgccgcccgcgcaggaagagggcatgacgtggtggtaccgctggctgtgtcgcctgtctggggtgctgggggcagtctcttgcgcgatctctggcctcttcaactgcatcaccatccaccctctgaacattgcggccggcgtgtggatgatgatggcggtcgttcccatcgtcatcagcctgaccctgaccacgctgctgggcaacgccatcgcctttgctacgggggtgctgtacggactctctgctctgggcaaaaagggcgatgcgatctcctatgccaggatccagcagcagaggcagcaggcggatgaggagaagctcgcggagaccctggagggggagctgtgaagggctgggcgcccctccctccctgtcccctcttctggctctgtgtgggtccaagtgaggcctggactgtccacgctgaggcacagcctggagaggggcctttgcacgtgtccctacacctggagtcctctgctcctttctccagactggcttaagccaggagccactggctgctggtgtgagggtctgggctgctggacttgaggcagagcctgcagcagctgtgtggacactacccagccctactcctctgctgggtgggtctgcagatctcacaccacagacagggctgcctgtgacctgctgtgacctgggagcagcttcccctggagatgctggtcctggcttgaggggaggggcaagtgggaccctgccacctgggcactgagcagagggacctcccccagctctcttagcaggtggagccccagggcctgggacagcctgccgctgccagcaacctcccactgctgcctagggtgcagcgcccactgtcaccctgccttctgaagaagcccacagggctcctaaggtgcaccccggtacctggaactgcagccttggcagtgactggacagctgggtgggggatgctccctgctggccctgggaaccttggacaggccacctcaaggcccctcggctgcccctcctccctgggcctgctggggcccctaggttctgcccatcaccccccgcccctgctggccttggtgctaaggaagtggggagagcaggctctccctggcaccgagggtgcccaccctctccctggtgtggccccgtcaacatcagccacagcccagccccattagtgggttagtgggtctgacctcagccccactcaggtgctcctgctggcctgcccaagccctgccctcagggagcttctgccttttaagaactgggcagaggccacagtcacctccccacacagagctgtccccactgccctgggtgccaggctgtccggagccaggcctacccagggaggatgcagagagctggtgcccaggatgtgcacccccatattccctctgccctgtggcctcagcccgctggcctctctgaccgtgaggctggctctcagccatcgggcaggtgcctggtcgggcctggcttagcccaggtggggtttggcagaagcgggcgggtgtggaagatattccatctggggccaaccccaggctgggcctgcgctgagcttctggagcgcaggtactgggtcttgctaagtgaactgtttcccaggaacacctctcgggcccatctgcgtctgaggctgggagtggcatctgaggccgggagtggcatctgaggccaggagtggcaggctggtgggctgggcgtggggttttctgggccctgcccagtactgccctggggacttggtgggctcctgggtcagcagcatcccacccctgggagtctggccagctgagccccagggtggcaggggcattatagcctggtggacatgtgccttcagggttcctccggggccaccttcctcaggccagtgctgggttcaaagggctgtgtgtgtgtgtgtgtgtgtgtgtgtgtgtgtgtgtatgtatatgtgtgtgggtgcacacatctgtcccatgtatgcagtgagacctgtctacctcccacaaggagcaagggctctgcccgccctctgctcattcctacccaggtagtgggaccccgggcccccttctgcctggcttgcctgcttctgccctttccagaggggtctcactgacagccagagacagcaggagaagggttggctgtggatcaaggaaggctgcccctgtaccctgtggggaaatggtgggtgcatggctggatgcagaggtggaaggccctgggccacaggcgagagtgggcgtgtcacctgtcccaggttcccagcaagtctgcagctgtgcagtcctggggtccctgaccctgtcgcccagggggcgtgctgtccagcaggggccctgccttgcaaggaacgtctcttccggcggctgggccgctcctgcctggtctgggctgtgtgtggcgccctttcctccttgtttgttcctctgtgttctgtgtgcgtcttaagcaataaagcgtggccgtggctcgcgtgcctgccctctgctcccttctgccttggtgcctgtgtgtgagtgtggaagccaggcaggagccgctggcccaggaaataactac

SEQ ID NO: 113069 - DNA, 2794 bp, Homo sapiens
  Payload ID: 2120
  Gene Symbol: CACFD1
  Gene Name: calcium channel flower domain containing 1
  Uniprot ID: Q9UGQ2
  ENST ID: ENST00000316948
  CDS Start-End: 81-599
acaaggcagcgcgccggctcggacgcggccggctaccgagccctttgtgagggctgtgagctgcgcctgacggtggcaccatgagcagctcaggtggggcgcccggggcgtccgccagctctgcgccgcccgcgcaggaagagggcatgacgtggtggtaccgctggctgtgtcgcctgtctggggtgctgggggcagtctcttgcgcgatctctggcctcttcaactgcatcaccatccaccctctgaacattgcggccggcgtgtggatgatcatgaatgccttcatcttgttgctgtgtgaggcgcccttctgctgccagttcatcgagtttgcaaacacagtggcggagaaggtggaccggctgcgctcctggcagaaggctgtcttctactgcgggatggcggtcgttcccatcgtcatcagcctgaccctgaccacgctgctgggcaacgccatcgcctttgctacgggggtgctgtacggactctctgctctgggcaaaaagggcgatgcgatctcctatgccaggatccagcagcagaggcagcaggcggatgaggagaagctcgcggagaccctggagggggagctgtgaagggctgggcgcccctccctccctgtcccctcttctggctctgtgtgggtccaagtgaggcctggactgtccacgctgaggcacagcctggagaggggcctttgcacgtgtccctacacctggagtcctctgctcctttctccagactggcttaagccaggagccactggctgctggtgtgagggtctgggctgctggacttgaggcagagcctgcagcagctgtgtggacactacccagccctactcctctgctgggtgggtctgcagatctcacaccacagacagggctgcctgtgacctgctgtgacctgggagcagcttcccctggagatgctggtcctggcttgaggggaggggcaagtgggaccctgccacctgggcactgagcagagggacctcccccagctctcttagcaggtggagccccagggcctgggacagcctgccgctgccagcaacctcccactgctgcctagggtgcagcgcccactgtcaccctgccttctgaagaagcccacagggctcctaaggtgcaccccggtacctggaactgcagccttggcagtgactggacagctgggtgggggatgctccctgctggccctgggaaccttggacaggccacctcaaggcccctcggctgcccctcctccctgggcctgctggggcccctaggttctgcccatcaccccccgcccctgctggccttggtgctaaggaagtggggagagcaggctctccctggcaccgagggtgcccaccctctccctggtgtggccccgtcaacatcagccacagcccagccccattagtgggttagtgggtctgacctcagccccactcaggtgctcctgctggcctgcccaagccctgccctcagggagcttctgccttttaagaactgggcagaggccacagtcacctccccacacagagctgtccccactgccctgggtgccaggctgtccggagccaggcctacccagggaggatgcagagagctggtgcccaggatgtgcacccccatattccctctgccctgtggcctcagcccgctggcctctctgaccgtgaggctggctctcagccatcgggcaggtgcctggtcgggcctggcttagcccaggtggggtttggcagaagcgggcgggtgtggaagatattccatctggggccaaccccaggctgggcctgcgctgagcttctggagcgcaggtactgggtcttgctaagtgaactgtttcccaggaacacctctcgggcccatctgcgtctgaggctgggagtggcatctgaggccgggagtggcatctgaggccaggagtggcaggctggtgggctgggcgtggggttttctgggccctgcccagtactgccctggggacttggtgggctcctgggtcagcagcatcccacccctgggagtctggccagctgagccccagggtggcaggggcattatagcctggtggacatgtgccttcagggttcctccggggccaccttcctcaggccagtgctgggttcaaagggctgtgtgtgtgtgtgtgtgtgtgtgtgtgtgtgtgtgtatgtatatgtgtgtgggtgcacacatctgtcccatgtatgcagtgagacctgtctacctcccacaaggagcaagggctctgcccgccctctgctcattcctacccaggtagtgggaccccgggcccccttctgcctggcttgcctgcttctgccctttccagaggggtctcactgacagccagagacagcaggagaagggttggctgtggatcaaggaaggctgcccctgtaccctgtggggaaatggtgggtgcatggctggatgcagaggtggaaggccctgggccacaggcgagagtgggcgtgtcacctgtcccaggttcccagcaagtctgcagctgtgcagtcctggggtccctgaccctgtcgcccagggggcgtgctgtccagcaggggccctgccttgcaaggaacgtctcttccggcggctgggccgctcctgcctggtctgggctgtgtgtggcgccctttcctccttgtttgttcctctgtgttctgtgtgcgtcttaagcaataaagcgtggccgtggctcgcgtgcctgccctctgctcccttctgccttggtgcctgtgtgtgagtgtggaagccaggcaggagccgctggcccaggaaataactac

SEQ ID NO: 113070 - DNA, 356 bp, Homo sapiens
  Payload ID: 2120
  Gene Symbol: CACFD1
  Gene Name: calcium channel flower domain containing 1
  ENST ID: ENST00000444798
  CDS Start-End: 13-356
gctggaggccaaatgctgactgcagcaggaagcacagccgagctgtcagcttgcgcgatctctggcctcttcaactgcatcaccatccaccctctgaacattgcggccggcgtgtggatgatcatgaatgccttcatcttgttgctgtgtgaggcgcccttctgctgccagttcatcgagtttgcaaacacagtggcggagaaggtggaccggctgcgctcctggcagaaggctgtcttctactgcgggatggcggtcgttcccatcgtcatcagcctgaccctgaccacgctgctgggcaacgccatcgcctttgctacgggggtgctgtacggactctctgctctgggcaaaaa

SEQ ID NO: 113071 - DNA, 2880 bp, Homo sapiens
  Payload ID: 2120
  Gene Symbol: CACFD1
  Gene Name: calcium channel flower domain containing 1
  Uniprot ID: Q9UGQ2
  ENST ID: ENST00000540581
  CDS Start-End: 103-804
atgctaatatgctccctctcccacaaggcagcgcgccggctcggacgcggccggctaccgagccctttgtgagggctgtgagctgcgcctgacggtggcaccatgagcagctcaggtggggcgcccggggcgtccgccagctctgcgccgcccgcgcaggaagagggcatgacgtggtggtaccgctggctgtgtcgcctgtctggggtgctgggggcagtctcttgcgcgatctctggcctcttcaactgcatcaccatccaccctctgaacattgcggccggcgtgtggatgatcatgaatgccttcatcttgttgctgtgtgaggcgcccttctgctgccagttcatcgagtttgcaaacacagtggcggagaaggtggaccggctgcgctcctggcagaaggctgtcttctactgcgggatggcggtcgttcccatcgtcatcagcctgaccctgaccacgctgctgggcaacgccatcgcctttgctacgggggtgctgtacggactctctgctctgggcaaaaaagcccagactgaggctggttccttcgcagcccagcatcccagggagcctgggccattctcagaggggacaagacaggcctttgccaccccagcagttgtctctggggaaatcagaatgcctgcaggggcgatgcgatctcctatgccaggatccagcagcagaggcagcaggcggatgaggagaagctcgcggagaccctggagggggagctgtgaagggctgggcgcccctccctccctgtcccctcttctggctctgtgtgggtccaagtgaggcctggactgtccacgctgaggcacagcctggagaggggcctttgcacgtgtccctacacctggagtcctctgctcctttctccagactggcttaagccaggagccactggctgctggtgtgagggtctgggctgctggacttgaggcagagcctgcagcagctgtgtggacactacccagccctactcctctgctgggtgggtctgcagatctcacaccacagacagggctgcctgtgacctgctgtgacctgggagcagcttcccctggagatgctggtcctggcttgaggggaggggcaagtgggaccctgccacctgggcactgagcagagggacctcccccagctctcttagcaggtggagccccagggcctgggacagcctgccgctgccagcaacctcccactgctgcctagggtgcagcgcccactgtcaccctgccttctgaagaagcccacagggctcctaaggtgcaccccggtacctggaactgcagccttggcagtgactggacagctgggtgggggatgctccctgctggccctgggaaccttggacaggccacctcaaggcccctcggctgcccctcctccctgggcctgctggggcccctaggttctgcccatcaccccccgcccctgctggccttggtgctaaggaagtggggagagcaggctctccctggcaccgagggtgcccaccctctccctggtgtggccccgtcaacatcagccacagcccagccccattagtgggttagtgggtctgacctcagccccactcaggtgctcctgctggcctgcccaagccctgccctcagggagcttctgccttttaagaactgggcagaggccacagtcacctccccacacagagctgtccccactgccctgggtgccaggctgtccggagccaggcctacccagggaggatgcagagagctggtgcccaggatgtgcacccccatattccctctgccctgtggcctcagcccgctggcctctctgaccgtgaggctggctctcagccatcgggcaggtgcctggtcgggcctggcttagcccaggtggggtttggcagaagcgggcgggtgtggaagatattccatctggggccaaccccaggctgggcctgcgctgagcttctggagcgcaggtactgggtcttgctaagtgaactgtttcccaggaacacctctcgggcccatctgcgtctgaggctgggagtggcatctgaggccgggagtggcatctgaggccaggagtggcaggctggtgggctgggcgtggggttttctgggccctgcccagtactgccctggggacttggtgggctcctgggtcagcagcatcccacccctgggagtctggccagctgagccccagggtggcaggggcattatagcctggtggacatgtgccttcagggttcctccggggccaccttcctcaggccagtgctgggttcaaagggctgtgtgtgtgtgtgtgtgtgtgtgtgtgtgtgtgtgtatgtatatgtgtgtgggtgcacacatctgtcccatgtatgcagtgagacctgtctacctcccacaaggagcaagggctctgcccgccctctgctcattcctacccaggtagtgggaccccgggcccccttctgcctggcttgcctgcttctgccctttccagaggggtctcactgacagccagagacagcaggagaagggttggctgtggatcaaggaaggctgcccctgtaccctgtggggaaatggtgggtgcatggctggatgcagaggtggaaggccctgggccacaggcgagagtgggcgtgtcacctgtcccaggttcccagcaagtctgcagctgtgcagtcctggggtccctgaccctgtcgcccagggggcgtgctgtccagcaggggccctgccttgcaaggaacgtctcttccggcggctgggccgctcctgcctggtctgggctgtgtgtggcgccctttcctccttgtttgttcctctgtgttctgtgtgcgtcttaagcaataaagcgtggccgtggctcgcgtgcctgccctctgctcccttctgc

SEQ ID NO: 113072 - DNA, 2754 bp, Homo sapiens
  Payload ID: 2120
  Gene Symbol: CACFD1
  Gene Name: calcium channel flower domain containing 1
  Uniprot ID: Q9UGQ2
  ENST ID: ENST00000542192
  CDS Start-End: 103-678
atgctaatatgctccctctcccacaaggcagcgcgccggctcggacgcggccggctaccgagccctttgtgagggctgtgagctgcgcctgacggtggcaccatgagcagctcaggtggggcgcccggggcgtccgccagctctgcgccgcccgcgcaggaagagggcatgacgtggtggtaccgctggctgtgtcgcctgtctggggtgctgggggcagtctcttgcgcgatctctggcctcttcaactgcatcaccatccaccctctgaacattgcggccggcgtgtggatgatgatggcggtcgttcccatcgtcatcagcctgaccctgaccacgctgctgggcaacgccatcgcctttgctacgggggtgctgtacggactctctgctctgggcaaaaaagcccagactgaggctggttccttcgcagcccagcatcccagggagcctgggccattctcagaggggacaagacaggcctttgccaccccagcagttgtctctggggaaatcagaatgcctgcaggggcgatgcgatctcctatgccaggatccagcagcagaggcagcaggcggatgaggagaagctcgcggagaccctggagggggagctgtgaagggctgggcgcccctccctccctgtcccctcttctggctctgtgtgggtccaagtgaggcctggactgtccacgctgaggcacagcctggagaggggcctttgcacgtgtccctacacctggagtcctctgctcctttctccagactggcttaagccaggagccactggctgctggtgtgagggtctgggctgctggacttgaggcagagcctgcagcagctgtgtggacactacccagccctactcctctgctgggtgggtctgcagatctcacaccacagacagggctgcctgtgacctgctgtgacctgggagcagcttcccctggagatgctggtcctggcttgaggggaggggcaagtgggaccctgccacctgggcactgagcagagggacctcccccagctctcttagcaggtggagccccagggcctgggacagcctgccgctgccagcaacctcccactgctgcctagggtgcagcgcccactgtcaccctgccttctgaagaagcccacagggctcctaaggtgcaccccggtacctggaactgcagccttggcagtgactggacagctgggtgggggatgctccctgctggccctgggaaccttggacaggccacctcaaggcccctcggctgcccctcctccctgggcctgctggggcccctaggttctgcccatcaccccccgcccctgctggccttggtgctaaggaagtggggagagcaggctctccctggcaccgagggtgcccaccctctccctggtgtggccccgtcaacatcagccacagcccagccccattagtgggttagtgggtctgacctcagccccactcaggtgctcctgctggcctgcccaagccctgccctcagggagcttctgccttttaagaactgggcagaggccacagtcacctccccacacagagctgtccccactgccctgggtgccaggctgtccggagccaggcctacccagggaggatgcagagagctggtgcccaggatgtgcacccccatattccctctgccctgtggcctcagcccgctggcctctctgaccgtgaggctggctctcagccatcgggcaggtgcctggtcgggcctggcttagcccaggtggggtttggcagaagcgggcgggtgtggaagatattccatctggggccaaccccaggctgggcctgcgctgagcttctggagcgcaggtactgggtcttgctaagtgaactgtttcccaggaacacctctcgggcccatctgcgtctgaggctgggagtggcatctgaggccgggagtggcatctgaggccaggagtggcaggctggtgggctgggcgtggggttttctgggccctgcccagtactgccctggggacttggtgggctcctgggtcagcagcatcccacccctgggagtctggccagctgagccccagggtggcaggggcattatagcctggtggacatgtgccttcagggttcctccggggccaccttcctcaggccagtgctgggttcaaagggctgtgtgtgtgtgtgtgtgtgtgtgtgtgtgtgtgtgtatgtatatgtgtgtgggtgcacacatctgtcccatgtatgcagtgagacctgtctacctcccacaaggagcaagggctctgcccgccctctgctcattcctacccaggtagtgggaccccgggcccccttctgcctggcttgcctgcttctgccctttccagaggggtctcactgacagccagagacagcaggagaagggttggctgtggatcaaggaaggctgcccctgtaccctgtggggaaatggtgggtgcatggctggatgcagaggtggaaggccctgggccacaggcgagagtgggcgtgtcacctgtcccaggttcccagcaagtctgcagctgtgcagtcctggggtccctgaccctgtcgcccagggggcgtgctgtccagcaggggccctgccttgcaaggaacgtctcttccggcggctgggccgctcctgcctggtctgggctgtgtgtggcgccctttcctccttgtttgttcctctgtgttctgtgtgcgtcttaagcaataaagcgtggccgtggctcgcgtgcctgccctctgctcccttctgc

SEQ ID NO: 113073 - DNA, 2880 bp, Homo sapiens; identical to SEQ ID NO: 113071
  Payload ID: 2120
  Gene Symbol: CACFD1
  Gene Name: Calcium channel flower domain containing 1
  ENST ID: ENST00000630997
  CDS Start-End: 103-804

SEQ ID NO: 113074 - DNA, 2688 bp, Homo sapiens; identical to SEQ ID NO: 113068
  Payload ID: 2120
  Gene Symbol: CACFD1
  Gene Name: Calcium channel flower domain containing 1
  ENST ID: ENST00000625979
  CDS Start-End: 101-493

SEQ ID NO: 113075 - DNA, 2794 bp, Homo sapiens; identical to SEQ ID NO: 113069
  Payload ID: 2120
  Gene Symbol: CACFD1
  Gene Name: Calcium channel flower domain containing 1
  ENST ID: ENST00000629431
  CDS Start-End: 81-599

SEQ ID NO: 113076 - DNA, 2754 bp, Homo sapiens; identical to SEQ ID NO: 113072
  Payload ID: 2120
  Gene Symbol: CACFD1
  Gene Name: Calcium channel flower domain containing 1
  ENST ID: ENST00000627083
  CDS Start-End: 103-678

SEQ ID NO: 113077 - DNA, 356 bp, Homo sapiens; identical to SEQ ID NO: 113070
  Payload ID: 2120
  Gene Symbol: CACFD1
  Gene Name: Calcium channel flower domain containing 1
  ENST ID: ENST00000630697
  CDS Start-End: 13-356

SEQ ID NO: 113078 - DNA, 3858 bp, Homo sapiens
  Payload ID: 2121
  Gene Symbol: CACNA2D1
  Gene Name: calcium channel, voltage-dependent, alpha 2/delta subunit 1
  Uniprot ID: P54289
  ENST ID: ENST00000356253
  CDS Start-End: 257-3568
cggcggaggcaaggcggccgcggcgcggagcagccgacgcacgctagtgggtccgcccgccaccgccccttcctcggcgtccgctcccgcccttgccgtcccccgcgcggctccgcgcctcgggccccgggcgcagccagccctccagacgcccgcggtcccggcggcgtgtgctgctcttcctccgcccgcggtttccagcgccgctccttcccccgcttgggcagggagggggcattgatcttcgatcgcgaagatggctgctggctgcctgctggccttgactctgacacttttccaatctttgctcatcggcccctcgtcggaggagccgttcccttcggccgtcactatcaaatcatgggtggataagatgcaagaagaccttgtcacactggcaaaaacagcaagtggagtcaatcagcttgttgatatttatgagaaatatcaagatttgtatactgtggaaccaaataatgcacgccagctggtagaaattgcagccagggatattgagaaacttctgagcaacagatctaaagccctggtgcgcctggcattggaagcggagaaagttcaagcagctcaccagtggagagaagattttgcaagcaatgaagttgtctactacaatgcaaaggatgatctcgatcctgagaaaaatgacagtgagccaggcagccagaggataaaacctgttttcattgaagatgctaattttggacgacaaatatcttatcagcacgcagcagtccatattcctactgacatctatgagggctcaacaattgtgttaaatgaactcaactggacaagtgccttagatgaagttttcaaaaagaatcgcgaggaagacccttcattattgtggcaggtttttggcagtgccactggcctagctcgatattatccagcttcaccatgggttgataatagtagaactccaaataagattgacctttatgatgtacgcagaagaccatggtacatccaaggagctgcatctcctaaagacatgcttattctggtggatgtgagtggaagtgttagtggattgacacttaaactgatccgaacatctgtctccgaaatgttagaaaccctctcagatgatgatttcgtgaatgtagcttcatttaacagcaatgctcaggatgtaagctgttttcagcaccttgtccaagcaaatgtaagaaataaaaaagtgttgaaagacgcggtgaataatatcacagccaaaggaattacagattataagaagggctttagttttgcttttgaacagctgcttaattataatgtttccagagcaaactgcaataagattattatgctattcacggatggaggagaagagagagcccaggagatatttaacaaatacaataaagataaaaaagtacgtgtattcacgttttcagttggtcaacacaattatgacagaggacctattcagtggatggcctgtgaaaacaaaggttattattatgaaattccttccattggtgcaataagaatcaatactcaggaatatttggatgttttgggaagaccaatggttttagcaggagacaaagctaagcaagtccaatggacaaatgtgtacctggatgcattggaactgggacttgtcattactggaactcttccggtcttcaacataaccggccaatttgaaaataagacaaacttaaagaaccagctgattcttggtgtgatgggagtagatgtgtctttggaagatattaaaagactgacaccacgttttacactgtgccccaatgggtattactttgcaatcgatcctaatggttatgttttattacatccaaatcttcagccaaagcctattggtgtaggtataccaacaattaatttaagaaaaaggagacccaatatccagaaccccaaatctcaggagccagtaacattggatttccttgatgcagagttagagaatgatattaaagtggagattcgaaataagatgattgatggggaaagtggagaaaaaacattcagaactctggttaaatctcaagatgagagatatattgacaaaggaaacaggacatacacatggacacctgtcaatggcacagattacagtttggccttggtattaccaacctacagtttttactatataaaagccaaactagaagagacaataactcaggccagatattcggaaaccctgaagccagataattttgaagaatctggctatacattcatagcaccaagagattactgcaatgacctgaaaatatcggataataacactgaatttcttttaaatttcaacgagtttattgatagaaaaactccaaacaacccatcatgtaacgcggatttgattaatagagtcttgcttgatgcaggctttacaaatgaacttgtccaaaattactggagtaagcagaaaaatatcaagggagtgaaagcacgatttgttgtgactgatggtgggattaccagagtttatcccaaagaggctggagaaaattggcaagaaaacccagagacatatgaggacagcttctataaaaggagcctagataatgataactatgttttcactgctccctactttaacaaaagtggacctggtgcctatgaatcgggcattatggtaagcaaagctgtagaaatatatattcaagggaaacttcttaaacctgcagttgttggaattaaaattgatgtaaattcctggatagagaatttcaccaaaacctcaatcagagatccgtgtgctggtccagtttgtgactgcaaaagaaacagtgacgtaatggattgtgtgattctggatgatggtgggtttcttctgatggcaaatcatgatgattatactaatcagattggaagattttttggagagattgatcccagcttgatgagacacctggttaatatatcagtttatgcttttaacaaatcttatgattatcagtcagtatgtgagcccggtgctgcaccaaaacaaggagcaggacatcgctcagcatatgtgccatcagtagcagacatattacaaattggctggtgggccactgctgctgcctggtctattctacagcagtttctcttgagtttgacctttccacgactccttgaggcagttgagatggaggatgatgacttcacggcctccctgtccaagcagagctgcattactgaacaaacccagtatttcttcgataacgacagtaaatcattcagtggtgtattagactgtggaaactgttccagaatctttcatggagaaaagcttatgaacaccaacttaatattcataatggttgagagcaaagggacatgtccatgtgacacacgactgctcatacaagcggagcagacttctgacggtccaaatccttgtgacatggttaagcaacccagataccgaaaagggcctgatgtctgctttgataacaatgtcttggaggattatactgactgtggtggtgtttctggattaaatccctccctgtggtatatcattggaatccagtttctactactttggctggtatctggcagcacacaccgcctgttatgaccttctaaaaaccaaatctgcatagttaaactccagaccctgccaaaacatgagccctgccctcaattacagtaacgtagggtcagctataaaatcagacaaacattagctgggcctgttccatggcataacactaaggcgcagactcctaaggcacccactggctgcatgtcagggtgtcagatccttaaacgtgtgtgaatgctgcatcatctatgtgtaacatcaaagcaaaatcctatacgtgtcctctattggaaaatttgggagtttgttgttgcattgttggt

SEQ ID NO: 113079 - DNA, 7563 bp, Homo sapiens
  Payload ID: 2121
  Gene Symbol: CACNA2D1
  Gene Name: calcium channel, voltage-dependent, alpha 2/delta subunit 1
  Uniprot ID: P54289
  ENST ID: ENST00000356860
  CDS Start-End: 340-3615
agggaggaaaccgagagggagagcgagagcgcgcgagcgccggcgggctcgccgaggtctgtttccaaagtcgcccttgatggcggcggaggcaaggcggccgcggcgcggagcagccgacgcacgctagtgggtccgcccgccaccgccccttcctcggcgtccgctcccgcccttgccgtcccccgcgcggctccgcgcctcgggccccgggcgcagccagccctccagacgcccgcggtcccggcggcgtgtgctgctcttcctccgcccgcggtttccagcgccgctccttcccccgcttgggcagggagggggcattgatcttcgatcgcgaagatggctgctggctgcctgctggccttgactctgacacttttccaatctttgctcatcggcccctcgtcggaggagccgttcccttcggccgtcactatcaaatcatgggtggataagatgcaagaagaccttgtcacactggcaaaaacagcaagtggagtcaatcagcttgttgatatttatgagaaatatcaagatttgtatactgtggaaccaaataatgcacgccagctggtagaaattgcagccagggatattgagaaacttctgagcaacagatctaaagccctggtgcgcctggcattggaagcggagaaagttcaagcagctcaccagtggagagaagattttgcaagcaatgaagttgtctactacaatgcaaaggatgatctcgatcctgagaaaaatgacagtgagccaggcagccagaggataaaacctgttttcattgaagatgctaattttggacgacaaatatcttatcagcacgcagcagtccatattcctactgacatctatgagggctcaacaattgtgttaaatgaactcaactggacaagtgccttagatgaagttttcaaaaagaatcgcgaggaagacccttcattattgtggcaggtttttggcagtgccactggcctagctcgatattatccagcttcaccatgggttgataatagtagaactccaaataagattgacctttatgatgtacgcagaagaccatggtacatccaaggagctgcatctcctaaagacatgcttattctggtggatgtgagtggaagtgttagtggattgacacttaaactgatccgaacatctgtctccgaaatgttagaaaccctctcagatgatgatttcgtgaatgtagcttcatttaacagcaatgctcaggatgtaagctgttttcagcaccttgtccaagcaaatgtaagaaataaaaaagtgttgaaagacgcggtgaataatatcacagccaaaggaattacagattataagaagggctttagttttgcttttgaacagctgcttaattataatgtttccagagcaaactgcaataagattattatgctattcacggatggaggagaagagagagcccaggagatatttaacaaatacaataaagataaaaaagtacgtgtattcacgttttcagttggtcaacacaattatgacagaggacctattcagtggatggcctgtgaaaacaaaggttattattatgaaattccttccattggtgcaataagaatcaatactcaggaatatttggatgttttgggaagaccaatggttttagcaggagacaaagctaagcaagtccaatggacaaatgtgtacctggatgcattggaactgggacttgtcattactggaactcttccggtcttcaacataaccggccaatttgaaaataagacaaacttaaagaaccagctgattcttggtgtgatgggagtagatgtgtctttggaagatattaaaagactgacaccacgttttacactgtgccccaatgggtattactttgcaatcgatcctaatggttatgttttattacatccaaatcttcagccaaagaaccccaaatctcaggagccagtaacattggatttccttgatgcagagttagagaatgatattaaagtggagattcgaaataagatgattgatggggaaagtggagaaaaaacattcagaactctggttaaatctcaagatgagagatatattgacaaaggaaacaggacatacacatggacacctgtcaatggcacagattacagtttggccttggtattaccaacctacagtttttactatataaaagccaaactagaagagacaataactcaggccagatcaaaaaagggcaaaatgaaggattcggaaaccctgaagccagataattttgaagaatctggctatacattcatagcaccaagagattactgcaatgacctgaaaatatcggataataacactgaatttcttttaaatttcaacgagtttattgatagaaaaactccaaacaacccatcatgtaacgcggatttgattaatagagtcttgcttgatgcaggctttacaaatgaacttgtccaaaattactggagtaagcagaaaaatatcaagggagtgaaagcacgatttgttgtgactgatggtgggattaccagagtttatcccaaagaggctggagaaaattggcaagaaaacccagagacatatgaggacagcttctataaaaggagcctagataatgataactatgttttcactgctccctactttaacaaaagtggacctggtgcctatgaatcgggcattatggtaagcaaagctgtagaaatatatattcaagggaaacttcttaaacctgcagttgttggaattaaaattgatgtaaattcctggatagagaatttcaccaaaacctcaatcagagatccgtgtgctggtccagtttgtgactgcaaaagaaacagtgacgtaatggattgtgtgattctggatgatggtgggtttcttctgatggcaaatcatgatgattatactaatcagattggaagattttttggagagattgatcccagcttgatgagacacctggttaatatatcagtttatgcttttaacaaatcttatgattatcagtcagtatgtgagcccggtgctgcaccaaaacaaggagcaggacatcgctcagcatatgtgccatcagtagcagacatattacaaattggctggtgggccactgctgctgcctggtctattctacagcagtttctcttgagtttgacctttccacgactccttgaggcagttgagatggaggatgatgacttcacggcctccctgtccaagcagagctgcattactgaacaaacccagtatttcttcgataacgacagtaaatcattcagtggtgtattagactgtggaaactgttccagaatctttcatggagaaaagcttatgaacaccaacttaatattcataatggttgagagcaaagggacatgtccatgtgacacacgactgctcatacaagcggagcagacttctgacggtccaaatccttgtgacatggttaagcaacccagataccgaaaagggcctgatgtctgctttgataacaatgtcttggaggattatactgactgtggtggtgtttctggattaaatccctccctgtggtatatcattggaatccagtttctactactttggctggtatctggcagcacacaccgcctgttatgaccttctaaaaaccaaatctgcatagttaaactccagaccctgccaaaacatgagccctgccctcaattacagtaacgtagggtcagctataaaatcagacaaacattagctgggcctgttccatggcataacactaaggcgcagactcctaaggcacccactggctgcatgtcagggtgtcagatccttaaacgtgtgtgaatgctgcatcatctatgtgtaacatcaaagcaaaatcctatacgtgtcctctattggaaaatttgggagtttgttgttgcattgttggtgattacatgtgaaagggttccccatacaattgttaatgaaccataagaaatgtcttgatattgacctggaattttgacttgctgcaattttactaagaaaatctctaaggggaaagaaattatttttgccttcactttttcttctgtgaaaagttaattcctgctttaagtagcaattattgaaatatatagagaaagagagaattaacattggtctaaattgttgaaatataaataatggctaattttctatgaaaaatttgccatgaataaaatgccttatgaagaacggcttctttgccaaaaataaaacacaattgatgaccaattcaattttgatggggtaatgaattgatggtttgaaaatagtaactaagaaattattaaactaaaggtgcttgagggagaaattagaatatgtgacatatttcctcataaatgtaagcaagcccttaataaatgctttgatgtaatgttccttttgttcacagtacagttatgtagtgctagccagatatttaaaaatgctctaagaaaagcttgtcaggggggagggggaaatgtttttcttgtgataaatgaactttggtttaccaagggtattttgcatgatgctgctgctattttaacttttcagttgttttttctcttactgtagagtgtagtcattgaaaagttaactgagtgatattgttatgtaagaatctgaaccttgcagtgtaaatgcacttaagtcatctttaaaatgttgttaaactactctgaatatactgtgcaatgtaaatgctgaatgattggggttagataaatggtgaaatgagaattaatgaattttatacagattcatgctttcgcctgataacctatgtacagatattttaagtacataaatcagatttgacacatttattttttgaaaagtacatatatgttctcaatgaagattcatcctaggtttcctctttgttcgtttcaatagtagcacatacaatccaaaagttcctgctactgctgcttttgcccttccattttaaatggtatgatcgtttggccaaaatttccatgcaagttgataagggttttacaataatctgaacaaataggaaaccttgaatctctatgtatgcacatgaatacttgattgtgaataataaaagttgttttttatacagcctcattggtgaaaatggttagtgtagtaaatcagatatttcattatagactaatatggtagcagattatttatgcttttaaaaattattttctggagcaaacagtatttgaagaaaaggtaaaaactatgaatgtgtaattctaagaatagttaataattttactgaaggctgaacgtatgtagatattttttatgataaaatgcagtttttctttttttggaacatgccaattactggtatgtgtatatgctggaaattttcttacatatcctttttaagtcaaagttattaacattatccagcatgctttaatatgctccacatatcaaagatataaccaataatttaacgtagcttaaaagataacatttgttttgtttttagctttgcatacatttgtaattccctcccaccaccaatataccttaggtaccatttgtgtacatttcaagattttttttttcaataaaaaggtggggggaaatggaatcactttgccaactattgttctaagagttgacatcagttaccatttctaatgcattgttgtgattttgtagtgtcattcataactggtattgacattttagaaaacaccaaagtgatttaaaatatatgtggggaaaaaaacttctcactctagtaacaatgttttaatcatgttgtttgttaaatatttaaaagttattgttcaatttttgctagactatcttaaatcatgatagtgttgggaagggggtatcaaaatataaaattgttagtttgtgtatataaacaatgcacattaaaacaattgaattgcttccagcatacaacaaactaccttaaaattatgttcaaaatctattaaatatattttcatggctaatgtcgagtatatgttttcatcaattacattgttattgtattaatcgcggttaaacttggcatctcttggcaggatcctatttaatttctgttgccatcaaaatatatttatatgcatgagttttgctataaacctttattttctgctataaagttatatattatgacaaccataaatgcaattacaaattgggtaagaacaagctgaataaaagttgttcccatgactaatattagtcttcatgcttttagcatattttttaagacagtaacactcatcccatcaaattattacattacatttagtatttttctgagttacattgacaagaacttaaattatagcctgttattaatattgatttccaacgactgaacagtacaacagatcaataaaaaagtttatacactgctttaactaatttttgttatactcatgtggcttagtgtagttagtcactaaaacagagttcaagtgagcttggcaatggtgttgagtaacaagaaagaattttgcattaatgatttctttttattttcctcatttaaacaaccagcattactgccaaacaccaaccgtggtccatatttgtaacaggtttttaacatgacatagttagcaagtttgattgaagagatttttaggtcctgggcctataagattttagtatgatcttttttcatgtttctaatgcttgaggtgttactgcttaacttgggaaaaaaaaaaacaaaaaacagtgttcctgccatttgtaagttttcctataatattccttttattaactttaaaactggacttatcgggttcaaataggcagtatcccttttaagtgacctttgcaacccaagtgttacttgcttatttgatgctctcttgtattttaaatctcatttaaatctttgtctgtgaccaacaaagcttaagattttgtcttcatttaaaactctgaatctattccattgatcatgttagacgttcaaatgtttaatggtatagtctgacctagtgaaacaaaatggatgttgttactttttttaaagaatagaatgaaataactatttcacttgcccaaaattttaaatattttttcatctaaacttgtattgtttcccatagcagaatgtcaatattcacagtacatttctgtaaagagcaaaccaatataatgttttgagtgttgaaaaaaattccagatttttgaagaattagacaactcttcatctaccttatttctagttcacacagttatctcaaattccactgaaactaatgggatactgtcttgtgtagatgccagttgagtttataatgtgacctagtaaagctgtcttttttgttgtgttgtatgagtgtcggatcatgcttttaggaatacttttattaaaatggtgtgcattcatgcaaaaggccaactggcttttgtgaacaatagatcttttctcccctttattttgttctcttgacacttttgtgaaaattacctagcctgataaaaacattttgtaaaaatttgtataatactgttataaaatatttataatcccagaaaatgttgtgttaaatcttgtgcaaaaacagtatattcagaataaaagtttatcatttaaagtca

SEQ ID NO: 113080 - DNA, 1429 bp, Homo sapiens
  Payload ID: 2121
  Gene Symbol: CACNA2D1
  Gene Name: calcium channel, voltage-dependent, alpha 2/delta subunit 1
  ENST ID: ENST00000423588
  CDS Start-End: 258-1187
gcggcggaggcaaggcggccgcggcgcggagcagccgacgcacgctagtgggtccgcccgccaccgccccttcctcggcgtccgctcccgcccttgccgtcccccgcgcggctccgcgcctcgggccccgggcgcagccagccctccagacgcccgcggtcccggcggcgtgtgctgctcttcctccgcccgcggtttccagcgccgctccttcccccgcttgggcagggagggggcattgatcttcgatcgcgaagatggctgctggctgcctgctggccttgactctgacacttttccaatctttgctcatcggcccctcgtcggaggagccgttcccttcggccgtcactatcaaatcatgggtggataagatgcaagaagaccttgtcacactggcaaaaacagcaagtggagtcaatcagcttgttgatatttatgagaaatatcaagatttgtatactgtggaaccaaataatgcacgccagctggtagaaattgcagccagggatattgagaaacttctgagcaacagatctaaagccctggtgcgcctggcattggaagcggagaaagttcaagcagctcaccagtggagagaagattttgcaagcaatgaagttgtctactacaatgcaaaggatgatctcgatcctgagaaaaatgacagtgagccaggcagccagaggataaaacctgttttcattgaagatgctaattttggacgacaaatatcttatcagcacgcagcagtccatattcctactgacatctatgagggctcaacaattgtgttaaatgaactcaactggacaagtgccttagatgaagttttcaaaaagaatcgcgaggaagacccttcattattgtggcaggtttttggcagtgccactggcctagctcgatattatccagcttcaccatgggttgataatagtagaactccaaataagattgacctttatgatgtacgcagaagaccatggtacatccaaggagctgcatctcctaaagacatgcttattctggtggatgtgagtggaagtgttagtggattgacacttaaactgatccgaacatctgtctccgaaatgttagaaaccctctcagatgatgatttcgtgaatgtagcttcagatagtaaagagatttctccttctcccgaagagattttcaatgcagagtaattaaactattgtgtctctctggaggggaggatgagtgtgggccatcagaagcccctgtataagatcagggacttcctcatcttgggactcctggctggaaacccatctcactacctatgcaggtgacccctggctgtcctcctgtcatcctgtgggaattgaggtttgggcagcttgtgcaaacaaagatgttactctgctcctctgttgctatgagtaataaactctttgtctctgactca

SEQ ID NO: 113081 - DNA, 840 bp, Homo sapiens
  Payload ID: 2121
  Gene Symbol: CACNA2D1
  Gene Name: calcium channel, voltage-dependent, alpha 2/delta subunit 1
  ENST ID: ENST00000443883
  CDS Start-End: 1-840
ttaaaagactgacaccacgttttacactgtgccccaatgggtattactttgcaatcgatcctaatggttatgttttattacatccaaatcttcagccaaagcctattggtgtaggtataccaacaattaatttaagaaaaaggagacccaatatccaggagccagtaacattggatttccttgatgcagagttagagaatgatattaaagtggagattcgaaataagatgattgatggggaaagtggagaaaaaacattcagaactctggttaaatctcaagatgagagatatattgacaaaggaaacaggacatacacatggacacctgtcaatggcacagattacagtttggccttggtattaccaacctacagtttttactatataaaagccaaactagaagagacaataactcaggccagatattcggaaaccctgaagccagataattttgaagaatctggctatacattcatagcaccaagagattactgcaatgacctgaaaatatcggataataacactgaatttcttttaaatttcaacgagtttattgatagaaaaactccaaacaacccatcatgtaacgcggatttgattaatagagtcttgcttgatgcaggctttacaaatgaacttgtccaaaattactggagtaagcagaaaaatatcaagggagtgaaagcacgatttgttgtgactgatggtgggattaccagagtttatcccaaagaggctggagaaaattggcaagaaaacccagagacatatgaggacagcttctataaaaggagcctagataatgataactatgttttcactgctccctactttaaca

SEQ ID NO: 113082 - DNA, 5476 bp, Homo sapiens
  Payload ID: 2122
  Gene Symbol: CACNA2D2
  Gene Name: calcium channel, voltage-dependent, alpha 2/delta subunit 2
  Uniprot ID: Q9NY47
  ENST ID: ENST00000266039
  CDS Start-End: 175-3612
gcgcagcccgcagaggcgctgcggcccgtgcagccccggaggcccctcgcggagaaggcggcggcggaggagaggccgagttaccgcccgccgcccgcgcccccccaaccccgccgccgccgccgccgccgccactgccccccctccccgcggcgccgcatcttgaatggaaacatggcggtgccggctcggacctgcggcgcctctcggcccggcccagcgcggactgcgcgcccctggcccggctgcggcccccaccctggccccggcacccggcgcccgacgtccgggcccccgcgcccgctgtggctgctgctgccgcttctaccgctgctcgccgcccccggcgcctctgcctacagcttcccccagcagcacacgatgcagcactgggcccggcgtctggagcaggaggtcgacggcgtgatgcggatttttggaggcgtccagcagctccgtgagatttacaaggacaaccggaacctgttcgaggtacaggagaatgagcctcagaagttggtggagaaggtggcaggggacattgagagccttctggacaggaaggtgcaggccctgaagagactggctgatgctgcagagaacttccagaaagcacaccgctggcaggacaacatcaaggaggaagacatcgtgtactatgacgccaaggctgacgctgagctggacgaccctgagagtgaggatgtggaaagggggtctaaggccagcaccctaaggctggacttcatcgaggacccaaacttcaagaacaaggtcaactattcatacgcggctgtacagatccctacggacatctacaaaggctccactgtcatcctcaatgagctcaactggacagaggccctggagaatgtgttcatggaaaaccgcagacaagaccccacactgctgtggcaggtcttcggcagcgccacaggagtcactcgctactacccggccaccccgtggcgagcccccaagaagatcgacctgtacgatgtccgaaggagaccctggtatatccagggggcctcgtcacccaaagacatggtcatcatcgtggatgtgagtggcagtgtgagcggcctgaccctgaagctgatgaagacatctgtctgcgagatgctggacacgctgtctgatgatgactatgtgaatgtggcctcgttcaacgagaaggcacagcctgtgtcatgcttcacacacctggtgcaggccaatgtgcgcaacaagaaggtgttcaaggaagctgtgcagggcatggtggccaagggcaccacaggctacaaggccggctttgagtatgcctttgaccagctgcagaactccaacatcactcgggccaactgcaacaagatgatcatgatgttcacggatggtggtgaggaccgcgtgcaggacgtctttgagaagtacaattggccaaaccggacggtgcgcgtgtttactttctccgtggggcagcataactatgacgtcacaccgctgcagtggatggcctgtgccaacaaaggctactattttgagatcccttccatcggagccatccgcatcaacacacaggaatatctagatgtgttgggcaggcccatggtgctggcaggcaaggaggccaagcaggtgcagtggaccaacgtgtatgaggatgcactgggactggggttggtggtaacagggaccctccctgttttcaacctgacacaggatggccctggggaaaagaagaaccagctgatcctgggcgtgatgggcattgacgtggctctgaatgacatcaagaggctgacccccaactacacgcttggagccaacggctatgtgtttgccattgacctgaacggctacgtgttgctgcaccccaatctcaagccccagaccaccaacttccgggagcctgtgactctggacttcctggatgcggagctagaggatgagaacaaggaagagatccgtcggagcatgattgatggcaacaagggccacaagcagatcagaacgttggtcaagtccctggatgagaggtacatagatgaggtgacacggaactacacctgggtgcctataaggagcactaactacagcctggggctggtgctcccaccctacagcaccttctacctccaagccaatctcagtgaccagatcctgcaggtcaagtattttgagttcctgctccccagcagctttgagtctgaaggacacgttttcattgctcccagagagtactgcaaggacctgaatgcctcagacaacaacaccgagttcctgaaaaactttattgagctcatggagaaagtgactccagactccaagcagtgcaacaacttccttctgcacaacctgatcttggacacgggcatcacgcagcagctggtagagcgtgtgtggagggaccaggatctcaacacgtacagcctactggccgtgttcgctgccacagacggtggcatcacccgagtcttccccaacaaggcagctgaggactggacagagaaccctgagcccttcaatgccagcttctaccgccgcagcctggataaccacggttatgtcttcaagcccccacaccaggatgccctgttaaggccgctggagctggagaatgacactgtgggcatcctcgtcagcacagctgtggagctcagcctaggcaggcgcacactgaggccagcagtggtgggcgtcaagctggacctagaggcttgggctgagaagttcaaggtgctagccagcaaccgtacccaccaagaccagcctcagaagtgcggccccaacagccactgtgagatggactgcgaggttaacaatgaggacttactctgtgtcctcattgatgatggaggattcctggtgctgtcaaaccagaaccatcagtgggaccaggtgggcaggttcttcagtgaggtggatgccaacctgatgctggcactctacaataactccttctacacccgcaaggagtcctatgactatcaggcagcctgtgcccctcagccccctggcaacctgggtgctgcaccccggggtgtctttgtgcccaccgttgcagatttccttaacctggcctggtggacctctgctgccgcctggtccctgttccagcagcttctctacggcctcatctaccacagctggttccaagcagaccccgcggaggccgaggggagccccgagacgcgcgagagcagctgcgtcatgaaacagacccagtactacttcggctcggtaaacgcctcctacaacgccatcatcgactgcggaaactgctccaggctgttccacgcgcagagactgaccaacaccaatcttctctttgtggtggccgagaagccgctgtgcagccagtgcgaggctggccggctgctgcagaaggagacgcactgcccagcggacggcccggagcagtgtgagctagtgcagagaccgcgataccggagaggcccgcacatctgcttcgactacaacgcgacagaagatacctcagactgtggccgcggggcctccttcccgccgtcgctgggcgtcctggtctccctgcaactgctgctcctcctgggcctgccgccccggccgcagcctcaagtcctcgtccacgcctctcgccgcctctgagcaccctgccccaccccacctccactcccacctcacccggcctcttcgcctttcccaccctcctgccccacactccccgccttagagcctcgtccctccctcactgaaggacctgagctggccaggccctgagagtctggtctgcgccttgggatggggagtcccaaagcgggacgccgcaggtgtttggcacccaaatcacatctcacctccgaactgttcaagtgtccccagacccttcttgcctgctgggctccccccagtgggatgggacagggaggccacacgcactggtgccaaaaccaggcctctgctgccgcccttcctggaggctgcctatgttgggggggaccctgcctcagctgacccggcctctctgccccacccaagcccaaacttggtttctgtgagaatagtggaggaaggtgagatggccagtttgaagcctgtgcctcccagcttaaatcctagcaggagagaggctctggggcagcccccatgggctcctgcccctttcaggcctacagccacatccccaagcccaccaggtgtcaggatagtcacagtgataccagttcagacactaccccatatacacctggaacattgaggatggaaactggactcacattcgacataccccactgggcacacgcacaaacacacacactatggggtggggtgggtgtaggggcttacaaagccttacacagggcgaggggttggtgggagggttggcacctgcacactccatctcctgctcaccacctgcctctaatctgagctgcagcctggctggtcctcccatttctaaagctgaatgtcaaacagtgccaaatgctggggcagggggtgaagaaccctctgtcccacccctagccaccagtgtcctccaagtgccccctcacctctccaggtgctcattgtaaccatttctcactagtgtcaggcccccagtgggaccacatgccactgcctgcacctttcggcagaggaacccccaccagacatcaccctttgccttagcaggggtgactttgtctctcctggctgggccatccttccgccaatctggcccttacacactcaggcctgtgcccactccctatctccttcccacccctacacacacactccctgcttgcaggaggccaaactgtccctcccttgctgaacacacacacacacacacacacacaggtggggactgggcacagctcttcacaccattcattctggtcatttcccccaaaggcatcccagcctgggggccagtggggaactgagggcaaggggatatagtgatggggctcagatggactgggaggagggggagggtgatgcattaattaatggcttcgttaattaatgtcatgttgcttgtcgctttctcagtgtgtgtgtgtggtccatgcccactgctggtgccagggtgggtgtccatgtgcacccggcctggatgccagctgtgtccttcgggggcgtgcgtgtaactgtagtgtagtcaggtgctcaatggagaatataaacatatacagaaaaatatatattttaagtttaaaaaacagaaaaacagacaaaacaatccccatcaggtagctgtctaacccccagctgggtctaatccttctcattacccacccgacctggctgcccctcaccttgggctgggggactggggggccatttccttttctctgccctttttttgttgttctattttgtacagacaagttggaaaaacaacagcgacaaaaaagtcaagaaactttgtaaaatatcgtgtgtgtgattccttgtaaaatattttcaaatggtttattacagaagatcagttattaaataatgttcatattttcacttc

SEQ ID NO: 113083 - DNA, 5272 bp, Homo sapiens
  Payload ID: 2122
  Gene Symbol: CACNA2D2
  Gene Name: calcium channel, voltage-dependent, alpha 2/delta subunit 2
  Uniprot ID: Q9NY47
  ENST ID: ENST00000360963
  CDS Start-End: 178-3408
gcgaagcgagtggctgcagagggctgcatcctgccgtccccagccccccacaaccgtacagccgtgcccaggtttccgcttagggaaccaggaggtccaggccctttctgccagcagccgggcgtgcaagcccccgacagagagaaatcttaaagatagctagagccacgggggctgatgcagcactgggcccggcgtctggagcaggaggtcgacggcgtgatgcggatttttggaggcgtccagcagctccgtgagatttacaaggacaaccggaacctgttcgaggtacaggagaatgagcctcagaagttggtggagaaggtggcaggggacattgagagccttctggacaggaaggtgcaggccctgaagagactggctgatgctgcagagaacttccagaaagcacaccgctggcaggacaacatcaaggaggaagacatcgtgtactatgacgccaaggctgacgctgagctggacgaccctgagagtgaggatgtggaaagggggtctaaggccagcaccctaaggctggacttcatcgaggacccaaacttcaagaacaaggtcaactattcatacgcggctgtacagatccctacggacatctacaaaggctccactgtcatcctcaatgagctcaactggacagaggccctggagaatgtgttcatggaaaaccgcagacaagaccccacactgctgtggcaggtcttcggcagcgccacaggagtcactcgctactacccggccaccccgtggcgagcccccaagaagatcgacctgtacgatgtccgaaggagaccctggtatatccagggggcctcgtcacccaaagacatggtcatcatcgtggatgtgagtggcagtgtgagcggcctgaccctgaagctgatgaagacatctgtctgcgagatgctggacacgctgtctgatgatgactatgtgaatgtggcctcgttcaacgagaaggcacagcctgtgtcatgcttcacacacctggtgcaggccaatgtgcgcaacaagaaggtgttcaaggaagctgtgcagggcatggtggccaagggcaccacaggctacaaggccggctttgagtatgcctttgaccagctgcagaactccaacatcactcgggccaactgcaacaagatgatcatgatgttcacggatggtggtgaggaccgcgtgcaggacgtctttgagaagtacaattggccaaaccggacggtgcgcgtgtttactttctccgtggggcagcataactatgacgtcacaccgctgcagtggatggcctgtgccaacaaaggctactattttgagatcccttccatcggagccatccgcatcaacacacaggaatatctagatgtgttgggcaggcccatggtgctggcaggcaaggaggccaagcaggtgcagtggaccaacgtgtatgaggatgcactgggactggggttggtggtaacagggaccctccctgttttcaacctgacacaggatggccctggggaaaagaagaaccagctgatcctgggcgtgatgggcattgacgtggctctgaatgacatcaagaggctgacccccaactacacgcttggagccaacggctatgtgtttgccattgacctgaacggctacgtgttgctgcaccccaatctcaagccccagaccaccaacttccgggagcctgtgactctggacttcctggatgcggagctagaggatgagaacaaggaagagatccgtcggagcatgattgatggcaacaagggccacaagcagatcagaacgttggtcaagtccctggatgagaggtacatagatgaggtgacacggaactacacctgggtgcctataaggagcactaactacagcctggggctggtgctcccaccctacagcaccttctacctccaagccaatctcagtgaccagatcctgcaggtcaagtattttgagttcctgctccccagcagctttgagtctgaaggacacgttttcattgctcccagagagtactgcaaggacctgaatgcctcagacaacaacaccgagttcctgaaaaactttattgagctcatggagaaagtgactccagactccaagcagtgcaacaacttccttctgcacaacctgatcttggacacgggcatcacgcagcagctggtagagcgtgtgtggagggaccaggatctcaacacgtacagcctactggccgtgttcgctgccacagacggtggcatcacccgagtcttccccaacaaggcagctgaggactggacagagaaccctgagcccttcaatgccagcttctaccgccgcagcctggataaccacggttatgtcttcaagcccccacaccaggatgccctgttaaggccgctggagctggagaatgacactgtgggcatcctcgtcagcacagctgtggagctcagcctaggcaggcgcacactgaggccagcagtggtgggcgtcaagctggacctagaggcttgggctgagaagttcaaggtgctagccagcaaccgtacccaccaagaccagcctcagaagtgcggccccaacagccactgtgagatggactgcgaggttaacaatgaggacttactctgtgtcctcattgatgatggaggattcctggtgctgtcaaaccagaaccatcagtgggaccaggtgggcaggttcttcagtgaggtggatgccaacctgatgctggcactctacaataactccttctacacccgcaaggagtcctatgactatcaggcagcctgtgcccctcagccccctggcaacctgggtgctgcaccccggggtgtctttgtgcccaccgttgcagatttccttaacctggcctggtggacctctgctgccgcctggtccctgttccagcagcttctctacggcctcatctaccacagctggttccaagcagaccccgcggaggccgaggggagccccgagacgcgcgagagcagctgcgtcatgaaacagacccagtactacttcggctcggtaaacgcctcctacaacgccatcatcgactgcggaaactgctccaggctgttccacgcgcagagactgaccaacaccaatcttctctttgtggtggccgagaagccgctgtgcagccagtgcgaggctggccggctgctgcagaaggagacgcactgcccagcggacggcccggagcagtgtgagctagtgcagagaccgcgataccggagaggcccgcacatctgcttcgactacaacgcgacagaagatacctcagactgtggccgcggggcctccttcccgccgtcgctgggcgtcctggtctccctgcaactgctgctcctcctgggcctgccgccccggccgcagcctcaagtcctcgtccacgcctctcgccgcctctgagcaccctgccccaccccacctccactcccacctcacccggcctcttcgcctttcccaccctcctgccccacactccccgccttagagcctcgtccctccctcactgaaggacctgagctggccaggccctgagagtctggtctgcgccttgggatggggagtcccaaagcgggacgccgcaggtgtttggcacccaaatcacatctcacctccgaactgttcaagtgtccccagacccttcttgcctgctgggctccccccagtgggatgggacagggaggccacacgcactggtgccaaaaccaggcctctgctgccgcccttcctggaggctgcctatgttgggggggaccctgcctcagctgacccggcctctctgccccacccaagcccaaacttggtttctgtgagaatagtggaggaaggtgagatggccagtttgaagcctgtgcctcccagcttaaatcctagcaggagagaggctctggggcagcccccatgggctcctgcccctttcaggcctacagccacatccccaagcccaccaggtgtcaggatagtcacagtgataccagttcagacactaccccatatacacctggaacattgaggatggaaactggactcacattcgacataccccactgggcacacgcacaaacacacacactatggggtggggtgggtgtaggggcttacaaagccttacacagggcgaggggttggtgggagggttggcacctgcacactccatctcctgctcaccacctgcctctaatctgagctgcagcctggctggtcctcccatttctaaagctgaatgtcaaacagtgccaaatgctggggcagggggtgaagaaccctctgtcccacccctagccaccagtgtcctccaagtgccccctcacctctccaggtgctcattgtaaccatttctcactagtgtcaggcccccagtgggaccacatgccactgcctgcacctttcggcagaggaacccccaccagacatcaccctttgccttagcaggggtgactttgtctctcctggctgggccatccttccgccaatctggcccttacacactcaggcctgtgcccactccctatctccttcccacccctacacacacactccctgcttgcaggaggccaaactgtccctcccttgctgaacacacacacacacacacacacacaggtggggactgggcacagctcttcacaccattcattctggtcatttcccccaaaggcatcccagcctgggggccagtggggaactgagggcaaggggatatagtgatggggctcagatggactgggaggagggggagggtgatgcattaattaatggcttcgttaattaatgtcatgttgcttgtcgctttctcagtgtgtgtgtgtggtccatgcccactgctggtgccagggtgggtgtccatgtgcacccggcctggatgccagctgtgtccttcgggggcgtgcgtgtaactgtagtgtagtcaggtgctcaatggagaatataaacatatacagaaaaatatatattttaagtttaaaaaacagaaaaacagacaaaacaatccccatcaggtagctgtctaacccccagctgggtctaatccttctcattacccacccgacctggctgcccctcaccttgggctgggggactggggggccatttccttttctctgccctttttttgttgttctattttgtacagacaagttggaaaaacaacagcgacaaaaaagtcaagaaactttgtaaaatatcgtgtgtgtgattccttgtaaaatattttcaaatggtttattacagaagatcagttattaaataatgttcatattttcacttc

SEQ ID NO: 113084 - DNA, 5206 bp, Homo sapiens
  Payload ID: 2122
  Gene Symbol: CACNA2D2
  Gene Name: calcium channel, voltage-dependent, alpha 2/delta subunit 2
  Uniprot ID: Q9NY47
  ENST ID: ENST00000424201
  CDS Start-End: 1-3432
atggcggtgccggctcggacctgcggcgcctctcggcccggcccagcgcggactgcgcgcccctggcccggctgcggcccccaccctggccccggcacccggcgcccgacgtccgggcccccgcgcccgctgtggctgctgctgccgcttctaccgctgctcgccgcccccggcgcctctgcctacagcttcccccagcagcacacgatgcagcactgggcccggcgtctggagcaggaggtcgacggcgtgatgcggatttttggaggcgtccagcagctccgtgagatttacaaggacaaccggaacctgttcgaggtacaggagaatgagcctcagaagttggtggagaaggtggcaggggacattgagagccttctggacaggaaggtgcaggccctgaagagactggctgatgctgcagagaacttccagaaagcacaccgctggcaggacaacatcaaggaggaagacatcgtgtactatgacgccaaggctgacgctgagctggacgaccctgagagtgaggatgtggaaagggggtctaaggccagcaccctaaggctggacttcatcgaggacccaaacttcaagaacaaggtcaactattcatacgcggctgtacagatccctacggacatctacaaaggctccactgtcatcctcaatgagctcaactggacagaggccctggagaatgtgttcatggaaaaccgcagacaagaccccacactgctgtggcaggtcttcggcagcgccacaggagtcactcgctactacccggccaccccgtggcgagcccccaagaagatcgacctgtacgatgtccgaaggagaccctggtatatccagggggcctcgtcacccaaagacatggtcatcatcgtggatgtgagtggcagtgtgagcggcctgaccctgaagctgatgaagacatctgtctgcgagatgctggacacgctgtctgatgatgactatgtgaatgtggcctcgttcaacgagaaggcacagcctgtgtcatgcttcacacacctggtgcaggccaatgtgcgcaacaagaaggtgttcaaggaagctgtgcagggcatggtggccaagggcaccacaggctacaaggccggctttgagtatgcctttgaccagctgcagaactccaacatcactcgggccaactgcaacaagatgatcatgatgttcacggatggtggtgaggaccgcgtgcaggacgtctttgagaagtacaattggccaaaccggacggtgcgcgtgtttactttctccgtggggcagcataactatgacgtcacaccgctgcagtggatggcctgtgccaacaaaggctactattttgagatcccttccatcggagccatccgcatcaacacacaggaatatctagatgtgttgggcaggcccatggtgctggcaggcaaggaggccaagcaggtgcagtggaccaacgtgtatgaggatgcactgggactggggttggtggtaacagggaccctccctgttttcaacctgacacaggatggccctggggaaaagaagaaccagctgatcctgggcgtgatgggcattgacgtggctctgaatgacatcaagaggctgacccccaactacacgcttggagccaacggctatgtgtttgccattgacctgaacggctacgtgttgctgcaccccaatctcaagccccagaccaccaacttccgggagcctgtgactctggacttcctggatgcggagctagaggatgagaacaaggaagagatccgtcggagcatgattgatggcaacaagggccacaagcagatcagaacgttggtcaagtccctggatgagaggtacatagatgaggtgacacggaactacacctgggtgcctataaggagcactaactacagcctggggctggtgctcccaccctacagcaccttctacctccaagccaatctcagtgaccagatcctgcaggtcaagtattttgagttcctgctccccagcagctttgagtctgaaggacacgttttcattgctcccagagagtactgcaaggacctgaatgcctcagacaacaacaccgagttcctgaaaaactttattgagctcatggagaaagtgactccagactccaagcagtgcaacaacttccttctgcacaacctgatcttggacacgggcatcacgcagcagctggtagagcgtgtgtggagggaccaggatctcaacacgtacagcctactggccgtgttcgctgccacagacggtggcatcacccgagtcttccccaacaaggcagctgaggactggacagagaaccctgagcccttcaatgccagcttctaccgccgcagcctggataaccacggttatgtcttcaagcccccacaccaggatgccctgttaaggccgctggagctggagaatgacactgtgggcatcctcgtcagcacagctgtggagctcagcctaggcaggcgcacactgaggccagcagtggtgggcgtcaagctggacctagaggcttgggctgagaagttcaaggtgctagccagcaaccgtacccaccaagaccagcctcagaagtgcggccccaacagccactgtgagatggactgcgaggttaacaatgaggacttactctgtgtcctcattgatgatggaggattcctggtgctgtcaaaccagaaccatcagtgggaccaggtgggcaggttcttcagtgaggtggatgccaacctgatgctggcactctacaataactccttctacacccgcaaggagtcctatgactatcaggcagcctgtgcccctcagccccctggcaacctgggtgctgcaccccggggtgtctttgtgcccaccgttgcagatttccttaacctggcctggtggacctctgctgccgcctggtccctgttccagcagcttctctacggcctcatctaccacagctggttccaagcagaccccgcggaggccgaggggagccccgagacgcgcgagagcagctgcgtcatgaaacagacccagtactacttcggctcggtaaacgcctcctacaacgccatcatcgactgcggaaactgctccaggctgttccacgcgcagagactgaccaacaccaatcttctctttgtggtggccgagaagccgctgtgcagccagtgcgaggctggccggctgctgcagaaggagacgcactcggacggcccggagcagtgtgagctagtgcagagaccgcgataccggagaggcccgcacatctgcttcgactacaacgcgacagaagatacctcagactgtggccgcggggcctccttcccgccgtcgctgggcgtcctggtctccctgcaactgctgctcctcctgggcctgccgccccggccgcagcctcaagtcctcgtccacgcctctcgccgcctctgagcaccctgccccaccccacctccactcccacctcacccggcctcttcgcctttcccaccctcctgccccacactccccgccttagagcctcgtccctccctcactgaaggacctgagctggccaggccctgagagtctggtctgcgccttgggatggggagtcccaaagcgggacgccgcaggtgtttggcacccaaatcacatctcacctccgaactgttcaagtgtccccagacccttcttgcctgctgggctccccccagtgggatgggacagggaggccacacgcactggtgccaaaaccaggcctctgctgccgcccttcctggaggctgcctatgttgggggggaccctgcctcagctgacccggcctctctgccccacccaagcccaaacttggtttctgtgagaatagtggaggaaggtgagatggccagtttgaagcctgtgcctcccagcttaaatcctagcaggagagaggctctggggcagcccccatgggctcctgcccctttcaggcctacagccacatccccaagcccaccaggtgtcaggatagtcacagtgataccagttcagacactaccccatatacacctggaacattgaggatggaaactggactcacattcgacataccccactgggcacacgcacaaacacacacactatggggtggggtgggtgtaggggcttacaaagccttacacagggcgaggggttggtgggagggttggcacctgcacactccatctcctgctcaccacctgcctctaatctgagctgcagcctggctggtcctcccatttctaaagctgaatgtcaaacagtgccaaatgctggggcagggggtgaagaaccctctgtcccacccctagccaccagtgtcctccaagtgccccctcacctctccaggtgctcattgtaaccatttctcactagtgtcaggcccccagtgggaccacatgccactgcctgcacctttcggcagaggaacccccaccagacatcaccctttgccttagcaggggtgactttgtctctcctggctgggccatccttccgccaatctggcccttacacactcaggcctgtgcccactccctatctccttcccacccctacacacacactccctgcttgcaggaggccaaactgtccctcccttgctgaacacacacacacacacacacacacaggtggggactgggcacagctcttcacaccattcattctggtcatttcccccaaaggcatcccagcctgggggccagtggggaactgagggcaaggggatatagtgatggggctcagatggactgggaggagggggagggtgatgcattaattaatggcttcgttaattaatgtcatgttgcttgtcgctttctcagtgtgtgtgtgtggtccatgcccactgctggtgccagggtgggtgtccatgtgcacccggcctggatgccagctgtgtccttcgggggcgtgcgtgtaactgtagtgtagtcaggtgctcaatggagaatataaacatatacagaaaaatatatattttaagtttaaaaaacagaaaaacagacaaaacaatccccatcaggtagctgtctaacccccagctgggtctaatccttctcattacccacccgacctggctgcccctcaccttgggctgggggactggggggccatttccttttctctgccctttttttgttgttctattttgtacagacaagttggaaaaacaacagcgacaaaaaagtcaagaaactttgt

SEQ ID NO: 113085 - DNA, 5304 bp, Homo sapiens
  Payload ID: 2122
  Gene Symbol: CACNA2D2
  Gene Name: calcium channel, voltage-dependent, alpha 2/delta subunit 2
  ENST ID: ENST00000429770
  CDS Start-End: 6-3440
gaaacatggcggtgccggctcggacctgcggcgcctctcggcccggcccagcgcggactgcgcgcccctggcccggctgcggcccccaccctggccccggcacccggcgcccgacgtccgggcccccgcgcccgctgtggctgctgctgccgcttctaccgctgctcgccgcccccggcgcctctgcctacagcttcccccagcagcacacgatgcagcactgggcccggcgtctggagcaggaggtcgacggcgtgatgcggatttttggaggcgtccagcagctccgtgagatttacaaggacaaccggaacctgttcgaggtacaggagaatgagcctcagaagttggtggagaaggtggcaggggacattgagagccttctggacaggaaggtgcaggccctgaagagactggctgatgctgcagagaacttccagaaagcacaccgctggcaggacaacatcaaggaggaagacatcgtgtactatgacgccaaggctgacgctgagctggacgaccctgagagtgaggatgtggaaagggggtctaaggccagcaccctaaggctggacttcatcgaggacccaaacttcaagaacaaggtcaactattcatacgcggctgtacagatccctacggacatctacaaaggctccactgtcatcctcaatgagctcaactggacagaggccctggagaatgtgttcatggaaaaccgcagacaagaccccacactgctgtggcaggtcttcggcagcgccacaggagtcactcgctactacccggccaccccgtggcgagcccccaagaagatcgacctgtacgatgtccgaaggagaccctggtatatccagggggcctcgtcacccaaagacatggtcatcatcgtggatgtgagtggcagtgtgagcggcctgaccctgaagctgatgaagacatctgtctgcgagatgctggacacgctgtctgatgatgactatgtgaatgtggcctcgttcaacgagaaggcacagcctgtgtcatgcttcacacacctggtgcaggccaatgtgcgcaacaagaaggtgttcaaggaagctgtgcagggcatggtggccaagggcaccacaggctacaaggccggctttgagtatgcctttgaccagctgcagaactccaacatcactcgggccaactgcaacaagatgatcatgatgttcacggatggtggtgaggaccgcgtgcaggacgtctttgagaagtacaattggccaaaccggacggtgcgcgtgtttactttctccgtggggcagcataactatgacgtcacaccgctgcagtggatggcctgtgccaacaaaggctactattttgagatcccttccatcggagccatccgcatcaacacacaggaatatctagatgtgttgggcaggcccatggtgctggcaggcaaggaggccaagcaggtgcagtggaccaacgtgtatgaggatgcactgggactggggttggtggtaacagggaccctccctgttttcaacctgacacaggatggccctggggaaaagaagaaccagctgatcctgggcgtgatgggcattgacgtggctctgaatgacatcaagaggctgacccccaactacacgcttggagccaacggctatgtgtttgccattgacctgaacggctacgtgttgctgcaccccaatctcaagccccagaccaccaacttccgggagcctgtgactctggacttcctggatgcggagctagaggatgagaacaaggaagagatccgtcggagcatgattgatggcaacaagggccacaagcagatcagaacgttggtcaagtccctggatgagaggtacatagatgaggtgacacggaactacacctgggtgcctataaggagcactaactacagcctggggctggtgctcccaccctacagcaccttctacctccaagccaatctcagtgaccagatcctgcaggtcaagtattttgagttcctgctccccagcagctttgagtctgaaggacacgttttcattgctcccagagagtactgcaaggacctgaatgcctcagacaacaacaccgagttcctgaaaaactttattgagctcatggagaaagtgactccagactccaagcagtgcaacaacttccttctgcacaacctgatcttggacacgggcatcacgcagcagctggtagagcgtgtgtggagggaccaggatctcaacacgtacagcctactggccgtgttcgctgccacagacggtggcatcacccgagtcttccccaacaaggcagctgaggactggacagagaaccctgagcccttcaatgccagcttctaccgccgcagcctggataaccacggttatgtcttcaagcccccacaccaggatgccctgttaaggccgctggagctggagaatgacactgtgggcatcctcgtcagcacagctgtggagctcagcctaggcaggcgcacactgaggccagcagtggtgggcgtcaagctggacctagaggcttgggctgagaagttcaaggtgctagccagcaaccgtacccaccaagaccagcctcagaagcagtgcggccccaacagccactgtgagatggactgcgaggttaacaatgaggacttactctgtgtcctcattgatgatggaggattcctggtgctgtcaaaccagaaccatcagtgggaccaggtgggcaggttcttcagtgaggtggatgccaacctgatgctggcactctacaataactccttctacacccgcaaggagtcctatgactatcaggcagcctgtgcccctcagccccctggcaacctgggtgctgcaccccggggtgtctttgtgcccaccgttgcagatttccttaacctggcctggtggacctctgctgccgcctggtccctgttccagcagcttctctacggcctcatctaccacagctggttccaagcagaccccgcggaggccgaggggagccccgagacgcgcgagagcagctgcgtcatgaaacagacccagtactacttcggctcggtaaacgcctcctacaacgccatcatcgactgcggaaactgctccaggctgttccacgcgcagagactgaccaacaccaatcttctctttgtggtggccgagaagccgctgtgcagccagtgcgaggctggccggctgctgcagaaggagacgcactcggacggcccggagcagtgtgagctagtgcagagaccgcgataccggagaggcccgcacatctgcttcgactacaacgcgacagaagatacctcagactgtggccgcggggcctccttcccgccgtcgctgggcgtcctggtctccctgcaactgctgctcctcctgggcctgccgccccggccgcagcctcaagtcctcgtccacgcctctcgccgcctctgagcaccctgccccaccccacctccactcccacctcacccggcctcttcgcctttcccaccctcctgccccacactccccgccttagagcctcgtccctccctcactgaaggacctgagctggccaggccctgagagtctggtctgcgccttgggatggggagtcccaaagcgggacgccgcaggtgtttggcacccaaatcacatctcacctccgaactgttcaagtgtccccagacccttcttgcctgctgggctccccccagtgggatgggacagggaggccacacgcactggtgccaaaaccaggcctctgctgccgcccttcctggaggctgcctatgttgggggggaccctgcctcagctgacccggcctctctgccccacccaagcccaaacttggtttctgtgagaatagtggaggaaggtgagatggccagtttgaagcctgtgcctcccagcttaaatcctagcaggagagaggctctggggcagcccccatgggctcctgcccctttcaggcctacagccacatccccaagcccaccaggtgtcaggatagtcacagtgataccagttcagacactaccccatatacacctggaacattgaggatggaaactggactcacattcgacataccccactgggcacacgcacaaacacacacactatggggtggggtgggtgtaggggcttacaaagccttacacagggcgaggggttggtgggagggttggcacctgcacactccatctcctgctcaccacctgcctctaatctgagctgcagcctggctggtcctcccatttctaaagctgaatgtcaaacagtgccaaatgctggggcagggggtgaagaaccctctgtcccacccctagccaccagtgtcctccaagtgccccctcacctctccaggtgctcattgtaaccatttctcactagtgtcaggcccccagtgggaccacatgccactgcctgcacctttcggcagaggaacccccaccagacatcaccctttgccttagcaggggtgactttgtctctcctggctgggccatccttccgccaatctggcccttacacactcaggcctgtgcccactccctatctccttcccacccctacacacacactccctgcttgcaggaggccaaactgtccctcccttgctgaacacacacacacacacacacacacaggtggggactgggcacagctcttcacaccattcattctggtcatttcccccaaaggcatcccagcctgggggccagtggggaactgagggcaaggggatatagtgatggggctcagatggactgggaggagggggagggtgatgcattaattaatggcttcgttaattaatgtcatgttgcttgtcgctttctcagtgtgtgtgtgtggtccatgcccactgctggtgccagggtgggtgtccatgtgcacccggcctggatgccagctgtgtccttcgggggcgtgcgtgtaactgtagtgtagtcaggtgctcaatggagaatataaacatatacagaaaaatatatattttaagtttaaaaaacagaaaaacagacaaaacaatccccatcaggtagctgtctaacccccagctgggtctaatccttctcattacccacccgacctggctgcccctcaccttgggctgggggactggggggccatttccttttctctgccctttttttgttgttctattttgtacagacaagttggaaaaacaacagcgacaaaaaagtcaagaaactttgtaaaatatcgtgtgtgtgattccttgtaaaatattttcaaatggtttattacagaagatcagttattaaataatgttcatattttcacttc

SEQ ID NO: 113086 - DNA, 5329 bp, Homo sapiens
  Payload ID: 2122
  Gene Symbol: CACNA2D2
  Gene Name: calcium channel, voltage-dependent, alpha 2/delta subunit 2
  ENST ID: ENST00000423994
  CDS Start-End: 1-3462
atggcggtgccggctcggacctgcggcgcctctcggcccggcccagcgcggactgcgcgcccctggcccggctgcggcccccaccctggccccggcacccggcgcccgacgtccgggcccccgcgcccgctgtggctgctgctgccgcttctaccgctgctcgccgcccccggcgcctctgcctacagcttcccccagcagcacacgatgcagcactgggcccggcgtctggagcaggaggtcgacggcgtgatgcggatttttggaggcgtccagcagctccgtgagatttacaaggacaaccggaacctgttcgaggtacaggagaatgagcctcagaagttggtggagaaggtggcaggggacattgagagccttctggacaggaaggtgcaggccctgaagagactggctgatgctgcagagaacttccagaaagcacaccgctggcaggacaacatcaaggaggaagacatcgtgtactatgacgccaaggctgacgctgagctggacgaccctgagagtgaggatgtggaaagggggtctaaggccagcaccctaaggctggacttcatcgaggacccaaacttcaagaacaaggtcaactattcatacgcggctgtacagatccctacggacatctacaaaggctccactgtcatcctcaatgagctcaactggacagaggccctggagaatgtgttcatggaaaaccgcagacaagaccccacactgctgtggcaggtcttcggcagcgccacaggagtcactcgctactacccggccaccccgtggcgagcccccaagaagatcgacctgtacgatgtccgaaggagaccctggtatatccagggggcctcgtcacccaaagacatggtcatcatcgtggatgtgagtggcagtgtgagcggcctgaccctgaagctgatgaagacatctgtctgcgagatgctggacacgctgtctgatgatgactatgtgaatgtggcctcgttcaacgagaaggcacagcctgtgtcatgcttcacacacctggtgcaggccaatgtgcgcaacaagaaggtgttcaaggaagctgtgcagggcatggtggccaagggcaccacaggctacaaggccggctttgagtatgcctttgaccagctgcagaactccaacatcactcgggccaactgcaacaagatgatcatgatgttcacggatggtggtgaggaccgcgtgcaggacgtctttgagaagtacaattggccaaaccggacggtgcgcgtgtttactttctccgtggggcagcataactatgacgtcacaccgctgcagtggatggcctgtgccaacaaaggctactattttgagatcccttccatcggagccatccgcatcaacacacaggaatatctagatgtgttgggcaggcccatggtgctggcaggcaaggaggccaagcaggtgcagtggaccaacgtgtatgaggatgcactgggactggggttggtggtaacagggaccctccctgttttcaacctgacacaggatggccctggggaaaagaagaaccagctgatcctgggcgtgatgggcattgacgtggctctgaatgacatcaagaggctgacccccaactacacgcttggagccaacggctatgtgtttgccattgacctgaacggctacgtgttgctgcaccccaatctcaagccccagaccaccaacttccgggagcctgtgactctggacttcctggatgcggagctagaggatgagaacaaggaagagatccgtcggagcatgattgatggcaacaagggccacaagcagatcagaacgttggtcaagtccctggatgagaggtacatagatgaggtgacacggaactacacctgggtgcctataaggagcactaactacagcctggggctggtgctcccaccctacagcaccttctacctccaagccaatctcagtgaccagatcctgcaggtcaagttgccaatcagcaaactgaaggattttgagttcctgctccccagcagctttgagtctgaaggacacgttttcattgctcccagagagtactgcaaggacctgaatgcctcagacaacaacaccgagttcctgaaaaactttattgagctcatggagaaagtgactccagactccaagcagtgcaacaacttccttctgcacaacctgatcttggacacgggcatcacgcagcagctggtagagcgtgtgtggagggaccaggatctcaacacgtacagcctactggccgtgttcgctgccacagacggtggcatcacccgagtcttccccaacaaggcagctgaggactggacagagaaccctgagcccttcaatgccagcttctaccgccgcagcctggataaccacggttatgtcttcaagcccccacaccaggatgccctgttaaggccgctggagctggagaatgacactgtgggcatcctcgtcagcacagctgtggagctcagcctaggcaggcgcacactgaggccagcagtggtgggcgtcaagctggacctagaggcttgggctgagaagttcaaggtgctagccagcaaccgtacccaccaagaccagcctcagaagcagtgcggccccaacagccactgtgagatggactgcgaggttaacaatgaggacttactctgtgtcctcattgatgatggaggattcctggtgctgtcaaaccagaaccatcagtgggaccaggtgggcaggttcttcagtgaggtggatgccaacctgatgctggcactctacaataactccttctacacccgcaaggagtcctatgactatcaggcagcctgtgcccctcagccccctggcaacctgggtgctgcaccccggggtgtctttgtgcccaccgttgcagatttccttaacctggcctggtggacctctgctgccgcctggtccctgttccagcagcttctctacggcctcatctaccacagctggttccaagcagaccccgcggaggccgaggggagccccgagacgcgcgagagcagctgcgtcatgaaacagacccagtactacttcggctcggtaaacgcctcctacaacgccatcatcgactgcggaaactgctccaggctgttccacgcgcagagactgaccaacaccaatcttctctttgtggtggccgagaagccgctgtgcagccagtgcgaggctggccggctgctgcagaaggagacgcactgcccagcggacggcccggagcagtgtgagctagtgcagagaccgcgataccggagaggcccgcacatctgcttcgactacaacgcgacagaagatacctcagactgtggccgcggggcctccttcccgccgtcgctgggcgtcctggtctccctgcaactgctgctcctcctgggcctgccgccccggccgcagcctcaagtcctcgtccacgcctctcgccgcctctgagcaccctgccccaccccacctccactcccacctcacccggcctcttcgcctttcccaccctcctgccccacactccccgccttagagcctcgtccctccctcactgaaggacctgagctggccaggccctgagagtctggtctgcgccttgggatggggagtcccaaagcgggacgccgcaggtgtttggcacccaaatcacatctcacctccgaactgttcaagtgtccccagacccttcttgcctgctgggctccccccagtgggatgggacagggaggccacacgcactggtgccaaaaccaggcctctgctgccgcccttcctggaggctgcctatgttgggggggaccctgcctcagctgacccggcctctctgccccacccaagcccaaacttggtttctgtgagaatagtggaggaaggtgagatggccagtttgaagcctgtgcctcccagcttaaatcctagcaggagagaggctctggggcagcccccatgggctcctgcccctttcaggcctacagccacatccccaagcccaccaggtgtcaggatagtcacagtgataccagttcagacactaccccatatacacctggaacattgaggatggaaactggactcacattcgacataccccactgggcacacgcacaaacacacacactatggggtggggtgggtgtaggggcttacaaagccttacacagggcgaggggttggtgggagggttggcacctgcacactccatctcctgctcaccacctgcctctaatctgagctgcagcctggctggtcctcccatttctaaagctgaatgtcaaacagtgccaaatgctggggcagggggtgaagaaccctctgtcccacccctagccaccagtgtcctccaagtgccccctcacctctccaggtgctcattgtaaccatttctcactagtgtcaggcccccagtgggaccacatgccactgcctgcacctttcggcagaggaacccccaccagacatcaccctttgccttagcaggggtgactttgtctctcctggctgggccatccttccgccaatctggcccttacacactcaggcctgtgcccactccctatctccttcccacccctacacacacactccctgcttgcaggaggccaaactgtccctcccttgctgaacacacacacacacacacacacacaggtggggactgggcacagctcttcacaccattcattctggtcatttcccccaaaggcatcccagcctgggggccagtggggaactgagggcaaggggatatagtgatggggctcagatggactgggaggagggggagggtgatgcattaattaatggcttcgttaattaatgtcatgttgcttgtcgctttctcagtgtgtgtgtgtggtccatgcccactgctggtgccagggtgggtgtccatgtgcacccggcctggatgccagctgtgtccttcgggggcgtgcgtgtaactgtagtgtagtcaggtgctcaatggagaatataaacatatacagaaaaatatatattttaagtttaaaaaacagaaaaacagacaaaacaatccccatcaggtagctgtctaacccccagctgggtctaatccttctcattacccacccgacctggctgcccctcaccttgggctgggggactggggggccatttccttttctctgccctttttttgttgttctattttgtacagacaagttggaaaaacaacagcgacaaaaaagtcaagaaactttgtaaaatatcgtgtgtgtgattccttgtaaaatattttcaaatggtttattacagaagatcagttattaaataatgttcatattttcacttcaaa

SEQ ID NO: 113087 - DNA, 3453 bp, Homo sapiens
  Payload ID: 2122
  Gene Symbol: CACNA2D2
  Gene Name: calcium channel, voltage-dependent, alpha 2/delta subunit 2
  Uniprot ID: Q9NY47
  ENST ID: ENST00000479441
  CDS Start-End: 1-3453
atggcggtgccggctcggacctgcggcgcctctcggcccggcccagcgcggactgcgcgcccctggcccggctgcggcccccaccctggccccggcacccggcgcccgacgtccgggcccccgcgcccgctgtggctgctgctgccgcttctaccgctgctcgccgcccccggcgcctctgcctacagcttcccccagcagcacacgatgcagcactgggcccggcgtctggagcaggaggtcgacggcgtgatgcggatttttggaggcgtccagcagctccgtgagatttacaaggacaaccggaacctgttcgaggtacaggagaatgagcctcagaagttggtggagaaggtggcaggggacattgagagccttctggacaggaaggtgcaggccctgaagagactggctgatgctgcagagaacttccagaaagcacaccgctggcaggacaacatcaaggaggaagacatcgtgtactatgacgccaaggctgacgctgagctggacgaccctgagagtgaggatgtggaaagggggtctaaggccagcaccctaaggctggacttcatcgaggacccaaacttcaagaacaaggtcaactattcatacgcggctgtacagatccctacggacatctacaaaggctccactgtcatcctcaatgagctcaactggacagaggccctggagaatgtgttcatggaaaaccgcagacaagaccccacactgctgtggcaggtcttcggcagcgccacaggagtcactcgctactacccggccaccccgtggcgagcccccaagaagatcgacctgtacgatgtccgaaggagaccctggtatatccagggggcctcgtcacccaaagacatggtcatcatcgtggatgtgagtggcagtgtgagcggcctgaccctgaagctgatgaagacatctgtctgcgagatgctggacacgctgtctgatgatgactatgtgaatgtggcctcgttcaacgagaaggcacagcctgtgtcatgcttcacacacctggtgcaggccaatgtgcgcaacaagaaggtgttcaaggaagctgtgcagggcatggtggccaagggcaccacaggctacaaggccggctttgagtatgcctttgaccagctgcagaactccaacatcactcgggccaactgcaacaagatgatcatgatgttcacggatggtggtgaggaccgcgtgcaggacgtctttgagaagtacaattggccaaaccggacggtgcgcgtgtttactttctccgtggggcagcataactatgacgtcacaccgctgcagtggatggcctgtgccaacaaaggctactattttgagatcccttccatcggagccatccgcatcaacacacaggaatatctagatgtgttgggcaggcccatggtgctggcaggcaaggaggccaagcaggtgcagtggaccaacgtgtatgaggatgcactgggactggggttggtggtaacagggaccctccctgttttcaacctgacacaggatggccctggggaaaagaagaaccagctgatcctgggcgtgatgggcattgacgtggctctgaatgacatcaagaggctgacccccaactacacgcttggagccaacggctatgtgtttgccattgacctgaacggctacgtgttgctgcaccccaatctcaagccccagaccaccaacttccgggagcctgtgactctggacttcctggatgcggagctagaggatgagaacaaggaagagatccgtcggagcatgattgatggcaacaagggccacaagcagatcagaacgttggtcaagtccctggatgagaggtacatagatgaggtgacacggaactacacctgggtgcctataaggagcactaactacagcctggggctggtgctcccaccctacagcaccttctacctccaagccaatctcagtgaccagatcctgcaggtcaagttgccaatcagcaaactgaaggattttgagttcctgctccccagcagctttgagtctgaaggacacgttttcattgctcccagagagtactgcaaggacctgaatgcctcagacaacaacaccgagttcctgaaaaactttattgagctcatggagaaagtgactccagactccaagcagtgcaacaacttccttctgcacaacctgatcttggacacgggcatcacgcagcagctggtagagcgtgtgtggagggaccaggatctcaacacgtacagcctactggccgtgttcgctgccacagacggtggcatcacccgagtcttccccaacaaggcagctgaggactggacagagaaccctgagcccttcaatgccagcttctaccgccgcagcctggataaccacggttatgtcttcaagcccccacaccaggatgccctgttaaggccgctggagctggagaatgacactgtgggcatcctcgtcagcacagctgtggagctcagcctaggcaggcgcacactgaggccagcagtggtgggcgtcaagctggacctagaggcttgggctgagaagttcaaggtgctagccagcaaccgtacccaccaagaccagcctcagaagtgcggccccaacagccactgtgagatggactgcgaggttaacaatgaggacttactctgtgtcctcattgatgatggaggattcctggtgctgtcaaaccagaaccatcagtgggaccaggtgggcaggttcttcagtgaggtggatgccaacctgatgctggcactctacaataactccttctacacccgcaaggagtcctatgactatcaggcagcctgtgcccctcagccccctggcaacctgggtgctgcaccccggggtgtctttgtgcccaccgttgcagatttccttaacctggcctggtggacctctgctgccgcctggtccctgttccagcagcttctctacggcctcatctaccacagctggttccaagcagaccccgcggaggccgaggggagccccgagacgcgcgagagcagctgcgtcatgaaacagacccagtactacttcggctcggtaaacgcctcctacaacgccatcatcgactgcggaaactgctccaggctgttccacgcgcagagactgaccaacaccaatcttctctttgtggtggccgagaagccgctgtgcagccagtgcgaggctggccggctgctgcagaaggagacgcactcggacggcccggagcagtgtgagctagtgcagagaccgcgataccggagaggcccgcacatctgcttcgactacaacgcgacagaagatacctcagactgtggccgcggggcctccttcccgccgtcgctgggcgtcctggtctccctgcaactgctgctcctcctgggcctgccgccccggccgcagcctcaagtcctcgtccacgcctctcgccgcctctga

SEQ ID NO: 113088 - DNA, 3671 bp, Homo sapiens
  Payload ID: 2123
  Gene Symbol: CACNA2D3
  Gene Name: calcium channel, voltage-dependent, alpha 2/delta subunit 3
  Uniprot ID: Q8IZS8
  ENST ID: ENST00000288197
  CDS Start-End: 49-3324
cggccgctctcgtcgccgccgcagcgggcgcgtcggagggagcccagcatggccgggccgggctcgccgcgccgcgcgtcccggggggcctcggcgcttctcgctgccgcgcttctctacgccgcgctgggggacgtggtgcgctcggagcagcagataccgctctccgtggtgaagctctgggcctcggcttttggtggggagataaaatccattgctgctaagtactccggttcccagcttctgcaaaagaaatacaaagagtatgagaaagacgttgccatagaagaaattgatggcctccaactggtaaagaagctggcaaagaacatggaagagatgtttcacaagaagtctgaggccgtcaggcgtctggtggaggctgcagaagaagcacacctgaaacatgaatttgatgcagacttacagtatgaatacttcaatgctgtgctgataaatgaaagggacaaagacgggaattttttggagctgggaaaggaattcatcttagccccaaatgaccattttaataatttgcctgtgaacatcagtctaagtgacgtccaagtaccaacgaacatgtacaacaaagaccctgcaattgtcaatggggtttattggtctgaatctctaaacaaagtttttgtagataactttgaccgtgacccatctctcatatggcagtactttggaagtgcaaagggcttttttaggcagtatccggggattaaatgggaaccagatgagaatggagtcattgccttcgactgcaggaaccgaaaatggtacatccaggcagcaacttctccgaaagacgtggtcattttagttgacgtcagtggcagcatgaaaggactccgtctgactatcgcgaagcaaacagtctcatccattttggatacacttggggatgatgacttcttcaacataattgcttataatgaggagcttcactatgtggaaccttgcctgaatggaactttggtgcaagccgacaggacaaacaaagagcacttcagggagcatctggacaaacttttcgccaaaggaattggaatgttggatatagctctgaatgaggccttcaacattctgagtgatttcaaccacacgggacaaggaagtatctgcagtcaggccatcatgctcataactgatggggcggtggacacctatgatacaatctttgcaaaatacaattggccagatcgaaaggttcgcatcttcacatacctcattggacgagaggctgcgtttgcagacaatctaaagtggatggcctgtgccaacaaaggattttttacccagatctccaccttggctgatgtgcaggagaatgtcatggaataccttcacgtgcttagccggcccaaagtcatcgaccaggagcatgatgtggtgtggaccgaagcttacattgacagcactctccctcaggcacaaaagctgactgatgatcagggccccgtcctgatgaccactgtagccatgcctgtgtttagtaagcagaacgaaaccagatcgaagggcattcttctgggagtggttggcacagatgtcccagtgaaagaacttctgaagaccatccccaaatacaagttagggattcacggttatgcctttgcaatcacaaataatggatatatcctgacgcatccggaactcaggctgctgtacgaagaaggaaaaaagcgaaggaaacctaactatagtagcgttgacctctctgaggtggagtgggaagaccgagatgacgtgttgagaaatgctatggtgaatcgaaagacggggaagttttccatggaggtgaagaagacagtggacaaagggaaacgggttttggtgatgacaaatgactactattatacagacatcaagggtactcctttcagtttaggtgtggcgctttccagaggtcatgggaaatatttcttccgagggaatgtaaccatcgaagaaggcctgcatgacttagaacatcccgatgtgtccttggcagatgaatggtcctactgcaacactgacctacaccctgagcaccgccatctgtctcagttagaagcgattaagctctacctaaaaggcaaagaacctctgctccagtgtgataaagaattgatccaagaagtcctttttgacgcggtggtgagtgcccccattgaagcgtattggaccagcctggccctcaacaaatctgaaaattctgacaagggcgtggaggttgccttcctcggcactcgcacgggcctctccagaatcaacctgtttgtcggggctgagcagctcaccaatcaggacttcctgaaagctggcgacaaggagaacatttttaacgcagaccatttccctctctggtaccgaagagccgctgagcagattccagggagcttcgtctactcgatcccattcagcactggaccagtcaataaaagcaatgtggtgacagcaagtacatccatccagctcctggatgaacggaaatctcctgtggtggcagctgtaggcattcagatgaaacttgaatttttccaaaggaagttctggactgccagcagacagtgtgcttccctggatggcaaatgctccatcagctgtgatgatgagactgtgaattgttacctcatagacaataatggatttattttggtgtctgaagactacacacagactggagacttttttggtgagatcgagggagctgtgatgaacaaattgctaacaatgggctcctttaaaagaattaccctttatgactaccaagccatgtgtagagccaacaaggaaagcagcgatggcgcccatggcctcctggatccttataatgccttcctctctgcagtaaaatggatcatgacagaacttgtcttgttcctggtggaatttaacctctgcagttggtggcactccgatatgacagctaaagcccagaaattgaaacagaccctggagccttgtgatactgaatatccagcattcgtctctgagcgcaccatcaaggagactacagggaatattgcttgtgaagactgctccaagtcctttgtcatccagcaaatcccaagcagcaacctgttcatggtggtggtggacagcagctgcctctgtgaatctgtggcccccatcaccatggcacccattgaaatcaggtataatgaatcccttaagtgtgaacgtctaaaggcccagaagatcagaaggcgcccagaatcttgtcatggcttccatcctgaggagaatgcaagggagtgtgggggtgcgccgagtctccaagcccagacagtcctccttctgctccctctgcttttgatgctcttctcaaggtgacactgactgagatgttctcttactgactgagatgttctcttggcatgctaaatcatggataaactgtgaaccaaaatatggtgcaacatacgagacatgaatatagtccaaccatcagcatctcatcatgattttaaactgtgcgtgatataaactcttaaagatatgttgacaaaaagttatctatcatctttttactttgccagtcatgcaaatgtgagtttgccacatgataatcacccttcatcagaaatgggaccgcaagtggtaggcagtgtcccttctgcttgaaacctattgaaaccaatttaaaactgtgtactttttaaataaagtatattaaaatc

SEQ ID NO: 113089 - DNA, 3661 bp, Homo sapiens
  Payload ID: 2123
  Gene Symbol: CACNA2D3
  Gene Name: calcium channel, voltage-dependent, alpha 2/delta subunit 3
  Uniprot ID: Q8IZS8
  ENST ID: ENST00000415676
  CDS Start-End: 119-3394
cacccgctcctttttctgctccccaagtgagccgcgcgctcgcccaccgcccgctccgcgcagctccccgcggccgctctcgtcgccgccgcagcgggcgcgtcggagggagcccagcatggccgggccgggctcgccgcgccgcgcgtcccggggggcctcggcgcttctcgctgccgcgcttctctacgccgcgctgggggacgtggtgcgctcggagcagcagataccgctctccgtggtgaagctctgggcctcggcttttggtggggagataaaatccattgctgctaagtactccggttcccagcttctgcaaaagaaatacaaagagtatgagaaagacgttgccatagaagaaattgatggcctccaactggtaaagaagctggcaaagaacatggaagagatgtttcacaagaagtctgaggccgtcaggcgtctggtggaggctgcagaagaagcacacctgaaacatgaatttgatgcagacttacagtatgaatacttcaatgctgtgctgataaatgaaagggacaaagacgggaattttttggagctgggaaaggaattcatcttagccccaaatgaccattttaataatttgcctgtgaacatcagtctaagtgacgtccaagtaccaacgaacatgtacaacaaagaccctgcaattgtcaatggggtttattggtctgaatctctaaacaaagtttttgtagataactttgaccgtgacccatctctcatatggcagtactttggaagtgcaaagggcttttttaggcagtatccggggattaaatgggaaccagatgagaatggagtcattgccttcgactgcaggaaccgaaaatggtacatccaggcagcaacttctccgaaagacgtggtcattttagttgacgtcagtggcagcatgaaaggactccgtctgactatcgcgaagcaaacagtctcatccattttggatacacttggggatgatgacttcttcaacataattgcttataatgaggagcttcactatgtggaaccttgcctgaatggaactttggtgcaagccgacaggacaaacaaagagcacttcagggagcatctggacaaacttttcgccaaaggaattggaatgttggatatagctctgaatgaggccttcaacattctgagtgatttcaaccacacgggacaaggaagtatctgcagtcaggccatcatgctcataactgatggggcggtggacacctatgatacaatctttgcaaaatacaattggccagatcgaaaggttcgcatcttcacatacctcattggacgagaggctgcgtttgcagacaatctaaagtggatggcctgtgccaacaaaggattttttacccagatctccaccttggctgatgtgcaggagaatgtcatggaataccttcacgtgcttagccggcccaaagtcatcgaccaggagcatgatgtggtgtggaccgaagcttacattgacagcactctccctcaggcacaaaagctgactgatgatcagggccccgtcctgatgaccactgtagccatgcctgtgtttagtaagcagaacgaaaccagatcgaagggcattcttctgggagtggttggcacagatgtcccagtgaaagaacttctgaagaccatccccaaatacaagttagggattcacggttatgcctttgcaatcacaaataatggatatatcctgacgcatccggaactcaggctgctgtacgaagaaggaaaaaagcgaaggaaacctaactatagtagcgttgacctctctgaggtggagtgggaagaccgagatgacgtgttgagaaatgctatggtgaatcgaaagacggggaagttttccatggaggtgaagaagacagtggacaaagggaaacgggttttggtgatgacaaatgactactattatacagacatcaagggtactcctttcagtttaggtgtggcgctttccagaggtcatgggaaatatttcttccgagggaatgtaaccatcgaagaaggcctgcatgacttagaacatcccgatgtgtccttggcagatgaatggtcctactgcaacactgacctacaccctgagcaccgccatctgtctcagttagaagcgattaagctctacctaaaaggcaaagaacctctgctccagtgtgataaagaattgatccaagaagtcctttttgacgcggtggtgagtgcccccattgaagcgtattggaccagcctggccctcaacaaatctgaaaattctgacaagggcgtggaggttgccttcctcggcactcgcacgggcctctccagaatcaacctgtttgtcggggctgagcagctcaccaatcaggacttcctgaaagctggcgacaaggagaacatttttaacgcagaccatttccctctctggtaccgaagagccgctgagcagattccagggagcttcgtctactcgatcccattcagcactggaccagtcaataaaagcaatgtggtgacagcaagtacatccatccagctcctggatgaacggaaatctcctgtggtggcagctgtaggcattcagatgaaacttgaatttttccaaaggaagttctggactgccagcagacagtgtgcttccctggatggcaaatgctccatcagctgtgatgatgagactgtgaattgttacctcatagacaataatggatttattttggtgtctgaagactacacacagactggagacttttttggtgagatcgagggagctgtgatgaacaaattgctaacaatgggctcctttaaaagaattaccctttatgactaccaagccatgtgtagagccaacaaggaaagcagcgatggcgcccatggcctcctggatccttataatgccttcctctctgcagtaaaatggatcatgacagaacttgtcttgttcctggtggaatttaacctctgcagttggtggcactccgatatgacagctaaagcccagaaattgaaacagaccctggagccttgtgatactgaatatccagcattcgtctctgagcgcaccatcaaggagactacagggaatattgcttgtgaagactgctccaagtcctttgtcatccagcaaatcccaagcagcaacctgttcatggtggtggtggacagcagctgcctctgtgaatctgtggcccccatcaccatggcacccattgaaatcaggtataatgaatcccttaagtgtgaacgtctaaaggcccagaagatcagaaggcgcccagaatcttgtcatggcttccatcctgaggagaatgcaagggagtgtgggggtgcgccgagtctccaagcccagacagtcctccttctgctccctctgcttttgatgctcttctcaaggtgacactgactgagatgttctcttactgactgagatgttctcttggcatgctaaatcatggataaactgtgaaccaaaatatggtgcaacatacgagacatgaatatagtccaaccatcagcatctcatcatgattttaaactgtgcgtgatataaactcttaaagatatgttgacaaaaagttatctatcatctttttactttgccagtcatgcaaatgtgagtttgccacatgataatcacccttcatcagaaatgggaccgcaagtg

SEQ ID NO: 113090 - DNA, 3557 bp, Homo sapiens
  Payload ID: 2123
  Gene Symbol: CACNA2D3
  Gene Name: calcium channel, voltage-dependent, alpha 2/delta subunit 3
  Uniprot ID: Q8IZS8
  ENST ID: ENST00000490478
  CDS Start-End: 213-3206
gttgactgtgacacgggtgttacatatcttcctgtgccccttctccctgtagggtgaagctctgggcctcggcttttggtggggagataaaatccattgctgctaagtactccggttcccagcttctgcaaaagaaatacaaagagtatgagaaagacgttgccatagaagaaattgatggcctccaactggtaaagaagctggcaaagaacatggaagagatgtttcacaagaagtctgaggccgtcaggcgtctggtggaggctgcagaagaagcacacctgaaacatgaatttgatgcagacttacagtatgaatacttcaatgctgtgctgataaatgaaagggacaaagacgggaattttttggagctgggaaaggaattcatcttagccccaaatgaccattttaataatttgcctgtgaacatcagtctaagtgacgtccaagtaccaacgaacatgtacaacaaagaccctgcaattgtcaatggggtttattggtctgaatctctaaacaaagtttttgtagataactttgaccgtgacccatctctcatatggcagtactttggaagtgcaaagggcttttttaggcagtatccggggattaaatgggaaccagatgagaatggagtcattgccttcgactgcaggaaccgaaaatggtacatccaggcagcaacttctccgaaagacgtggtcattttagttgacgtcagtggcagcatgaaaggactccgtctgactatcgcgaagcaaacagtctcatccattttggatacacttggggatgatgacttcttcaacataattgcttataatgaggagcttcactatgtggaaccttgcctgaatggaactttggtgcaagccgacaggacaaacaaagagcacttcagggagcatctggacaaacttttcgccaaaggaattggaatgttggatatagctctgaatgaggccttcaacattctgagtgatttcaaccacacgggacaaggaagtatctgcagtcaggccatcatgctcataactgatggggcggtggacacctatgatacaatctttgcaaaatacaattggccagatcgaaaggttcgcatcttcacatacctcattggacgagaggctgcgtttgcagacaatctaaagtggatggcctgtgccaacaaaggattttttacccagatctccaccttggctgatgtgcaggagaatgtcatggaataccttcacgtgcttagccggcccaaagtcatcgaccaggagcatgatgtggtgtggaccgaagcttacattgacagcactctccctcaggcacaaaagctgactgatgatcagggccccgtcctgatgaccactgtagccatgcctgtgtttagtaagcagaacgaaaccagatcgaagggcattcttctgggagtggttggcacagatgtcccagtgaaagaacttctgaagaccatccccaaatacaagttagggattcacggttatgcctttgcaatcacaaataatggatatatcctgacgcatccggaactcaggctgctgtacgaagaaggaaaaaagcgaaggaaacctaactatagtagcgttgacctctctgaggtggagtgggaagaccgagatgacgtgttgagaaatgctatggtgaatcgaaagacggggaagttttccatggaggtgaagaagacagtggacaaagggaaacgggttttggtgatgacaaatgactactattatacagacatcaagggtactcctttcagtttaggtgtggcgctttccagaggtcatgggaaatatttcttccgagggaatgtaaccatcgaagaaggcctgcatgacttagaacatcccgatgtgtccttggcagatgaatggtcctactgcaacactgacctacaccctgagcaccgccatctgtctcagttagaagcgattaagctctacctaaaaggcaaagaacctctgctccagtgtgataaagaattgatccaagaagtcctttttgacgcggtggtgagtgcccccattgaagcgtattggaccagcctggccctcaacaaatctgaaaattctgacaagggcgtggaggttgccttcctcggcactcgcacgggcctctccagaatcaacctgtttgtcggggctgagcagctcaccaatcaggacttcctgaaagctggcgacaaggagaacatttttaacgcagaccatttccctctctggtaccgaagagccgctgagcagattccagggagcttcgtctactcgatcccattcagcactggaccagtcaataaaagcaatgtggtgacagcaagtacatccatccagctcctggatgaacggaaatctcctgtggtggcagctgtaggcattcagatgaaacttgaatttttccaaaggaagttctggactgccagcagacagtgtgcttccctggatggcaaatgctccatcagctgtgatgatgagactgtgaattgttacctcatagacaataatggatttattttggtgtctgaagactacacacagactggagacttttttggtgagatcgagggagctgtgatgaacaaattgctaacaatgggctcctttaaaagaattaccctttatgactaccaagccatgtgtagagccaacaaggaaagcagcgatggcgcccatggcctcctggatccttataatgccttcctctctgcagtaaaatggatcatgacagaacttgtcttgttcctggtggaatttaacctctgcagttggtggcactccgatatgacagctaaagcccagaaattgaaacagaccctggagccttgtgatactgaatatccagcattcgtctctgagcgcaccatcaaggagactacagggaatattgcttgtgaagactgctccaagtcctttgtcatccagcaaatcccaagcagcaacctgttcatggtggtggtggacagcagctgcctctgtgaatctgtggcccccatcaccatggcacccattgaaatcaggtataatgaatcccttaagtgtgaacgtctaaaggcccagaagatcagaaggcgcccagaatcttgtcatggcttccatcctgaggagaatgcaagggagtgtgggggtgcgccgagtctccaagcccagacagtcctccttctgctccctctgcttttgatgctcttctcaaggtgacactgactgagatgttctcttactgactgagatgttctcttggcatgctaaatcatggataaactgtgaaccaaaatatggtgcaacatacgagacatgaatatagtccaaccatcagcatctcatcatgattttaaactgtgcgtgatataaactcttaaagatatgttgacaaaaagttatctatcatctttttactttgccagtcatgcaaatgtgagtttgccacatgataatcacccttcatcagaaatgggaccgcaagtggtaggcagtgtcccttctgcttgaaacctattgaaaccaatttaaaactgtgtactttttaaataaagtatattaaaatcataa

SEQ ID NO: 113091 - DNA, 1972 bp, Homo sapiens
  Payload ID: 2123
  Gene Symbol: CACNA2D3
  Gene Name: calcium channel, voltage-dependent, alpha 2/delta subunit 3
  ENST ID: ENST00000477024
  CDS Start-End: 195-1772
gttacatatcttcctgtgccccttctccctgtagggtgaagctctgggcctcggcttttggtggggagataaaatccattgctgctaagtactccggttcccagcttctgcaaaagaaatacaaagagtatgagaaagacgttgccatagaagaaattgatggcctccaactggtaaagaagctggcaaagaacatggaagagatgtttcacaagaagtctgaggccgtcaggcgtctggtggaggctgcagaagaagcacacctgaaacatgaatttgatgcagacttacagtatgaatacttcaatgctgtgctgataaatgaaagggacaaagacgggaattttttggagctgggaaaggaattcatcttagccccaaatgaccattttaataatttgcctgtgaacatcagtctaagtgacgtccaagtaccaacgaacatgtacaacaaagaccctgcaattgtcaatggggtttattggtctgaatctctaaacaaagtttttgtagataactttgaccgtgacccatctctcatatggcagtactttggaagtgcaaagggcttttttaggcagtatccggggattaaatgggaaccagatgagaatggagtcattgccttcgactgcaggaaccgaaaatggtacatccaggcagcaacttctccgaaagacgtggtcattttagttgacgtcagtggcagcatgaaaggactccgtctgactatcgcgaagcaaacagtctcatccattttggatacacttggggatgatgacttcttcaacataattgcttataatgaggagcttcactatgtggaaccttgcctgaatggaactttggtgcaagccgacaggacaaacaaagagcacttcagggagcatctggacaaacttttcgccaaaggaattggaatgttggatatagctctgaatgaggccttcaacattctgagtgatttcaaccacacgggacaaggaagtatctgcagtcaggccatcatgctcataactgatggggcggtggacacctatgatacaatctttgcaaaatacaattggccagatcgaaaggttcgcatcttcacatacctcattggacgagaggctgcgtttgcagacaatctaaagtggatggcctgtgccaacaaaggattttttacccagatctccaccttggctgatgtgcaggagaatgtcatggaataccttcacgtgcttagccggcccaaagtcatcgaccaggagcatgatgtggtgtggaccgaagcttacattgacagcactctccctcaggcacaaaagctgactgatgatcagggccccgtcctgatgaccactgtagccatgcctgtgtttagtaagcagaacgaaaccagatcgaagggcattcttctgggagtggttggcacagatgtcccagtgaaagaacttctgaagaccatccccaaatacaagttagggattcacggttatgcctttgcaatcacaaataatggatatatcctgacgcatccggaactcaggctgctgtacgaagaaggaaaaaagcgaaggaaacctaactatagtagcgttgacctctctgaggtggagtgggaagaccgagatgacgtgttgagaaatgctatggtgaatcgaaagacggggaagttttccatggaggtgaagaagacagtggacaaagggtttaggtgtggcgctttccagaggtcatgggaaatatttcttccgagggaatgtaaccatcgaagaaggcctgcatgacttagaacatcccgatgtgtccttggcagatgaatggtcctactgcaacactgacctacaccctgagcaccgccatctgtctcagttagaagcgattaagctctacctaaaaggcaaagaacctctgctccagtgtgataaagaattgatccaagaagtcctttttgacgcggtggtgagtgcccccattgaagcgtatt

SEQ ID NO: 113092 - DNA, 1826 bp, Homo sapiens
  Payload ID: 2123
  Gene Symbol: CACNA2D3
  Gene Name: calcium channel, voltage-dependent, alpha 2/delta subunit 3
  ENST ID: ENST00000468658
  CDS Start-End: 216-356
tatttaagcatctgtaggaacatgctgacagcctacttcaagtcctcctctcctttcagttttcaggaaactgtgtactgcctgacttcagtgtgggtccacctctggcatctttatagtagcagaacttattcgaaaaatacaaagagtatgagaaagacgttgccatagaagaaattgatggcctccaactggtaaagaagctggcaaagaacatggaagagatgtttcacaagaagtctgaggccgtcaggcgtctggtggaggctgcagaagaagcacacctgaaacatgaatttgatgcagacttacagaccctgcaattgtcaatggggtttattggtctgaatctctaaacaaagtttttgtagataactttgaccgtgacccatctctcatatggcagtactttggaagtgcaaagggcttttttaggcagtatccggggattaaatgggaaccagatgagaatggagtcattgccttcgactgcaggaaccgaaaatggtacatccaggcagcaacttctccgaaagacgtggtcattttagttgacgtcagtggcagcatgaaaggactccgtctgactatcgcgaagcaaacagtctcatccattttggatacacttggggatgatgacttcttcaacataattgcttataatgaggagcttcactatgtggaaccttgcctgaatggaactttggtgcaagccgacaggacaaacaaagagcacttcagggagcatctggacaaacttttcgccaaaggaattggaatgttggatatagctctgaatgaggccttcaacattctgagtgatttcaaccacacgggacaaggaagtatctgcagtcaggccatcatgctcataactgatggggcggtggacacctatgatacaatctttgcaaaatacaattggccagatcgaaaggttcgcatcttcacatacctcattggacgagaggctgcgtttgcagacaatctaaagtggatggcctgtgccaacaaaggattttttacccagatctccaccttggctgatgtgcaggagaatgtcatggaataccttcacgtgcttagccggcccaaagtcatcgaccaggagcatgatgtggtgtggaccgaagcttacattgacagcactctccctcaggcacaaaagctgactgatgatcagggccccgtcctgatgaccactgtagccatgcctgtgtttagtaagcagaacgaaaccagatcgaagggcattcttctgggagtggttggcacagatgtcccagtgaaagaacttctgaagaccatccccaaatacaagttagggattcacggttatgcctttgcaatcacaaataatggatatatcctgacgcatccggaactcaggctgctgtacgaagaaggaaaaaagcgaaggaaacctaactatagtagcgttgacctctctgaggtggagtgggaagaccgagatgacgtgttgagaaatgctatggtgaatcgaaagacggggaagttttccatggaggtgaagaagacagtggacaaagggaaacgggttttggtgatgacaaatgactactattatacagacatcaagggtactcctttcagtttaggtgtggcgctttccagaggtcatgggaaatatttcttccgagggaatgtaaccatcgaagaaggcctgcatgacttagaacatcccgatgtgtccttggcagatgaatggtcctactgcaacactgacctacaccctgagcaccgccatctgtctcagttagaagcgattaagctctacctaaaaggcaaagaacctctgctccagt

SEQ ID NO: 113093 - DNA, 559 bp, Homo sapiens
  Payload ID: 2123
  Gene Symbol: CACNA2D3
  Gene Name: calcium channel, voltage-dependent, alpha 2/delta subunit 3
  ENST ID: ENST00000492460
  CDS Start-End: 182-559
cccctatatttatctttaacctcaagtgaatgttgctgcctttgtagttcatgagcaatgtatactcttgaattccagctctgtgaaatcggtagaaaatgagaaatacaaagagtatgagaaagacgttgccatagaagaaattgatggcctccaactggtaaagaagctggcaaagaacatggaagagatgtttcacaagaagtctgaggccgtcaggcgtctggtggaggctgcagaagaagcacacctgaaacatgaatttgatgcagacttacagtatgaatacttcaatgctgtgctgataaatgaaagggacaaagacgggaattttttggagctgggaaaggaattcatcttagccccaaatgaccattttaataatttgcctgtgaacatcagtctaagtgacgtccaagtaccaacgaacatgtacaacaaagaccctgcaattgtcaatggggtttattggtctgaatctctaaacaaagtttttgtagataactttgaccgtgacccatctctcatatggcagtactttggaagtgcaaagggcttt

SEQ ID NO: 113094 - DNA, 3477 bp, Homo sapiens
  Payload ID: 2123
  Gene Symbol: CACNA2D3
  Gene Name: calcium channel, voltage-dependent, alpha 2/delta subunit 3
  Uniprot ID: Q8IZS8
  ENST ID: ENST00000471363
  CDS Start-End: 213-1772
gttgactgtgacacgggtgttacatatcttcctgtgccccttctccctgtagggtgaagctctgggcctcggcttttggtggggagataaaatccattgctgctaagtactccggttcccagcttctgcaaaagaaatacaaagagtatgagaaagacgttgccatagaagaaattgatggcctccaactggtaaagaagctggcaaagaacatggaagagatgtttcacaagaagtctgaggccgtcaggcgtctggtggaggctgcagaagaagcacacctgaaacatgaatttgatgcagacttacagtatgaatacttcaatgctgtgctgataaatgaaagggacaaagacgggaattttttggagctgggaaaggaattcatcttagccccaaatgaccattttaataatttgcctgtgaacatcagtctaagtgacgtccaagtaccaacgaacatgtacaacaaagaccctgcaattgtcaatggggtttattggtctgaatctctaaacaaagtttttgtagataactttgaccgtgacccatctctcatatggcagtactttggaagtgcaaagggcttttttaggcagtatccggggattaaatgggaaccagatgagaatggagtcattgccttcgactgcaggaaccgaaaatggtacatccaggcagcaacttctccgaaagacgtggtcattttagttgacgtcagtggcagcatgaaaggactccgtctgactatcgcgaagcaaacagtctcatccattttggatacacttggggatgatgacttcttcaacataattgcttataatgaggagcttcactatgtggaaccttgcctgaatggaactttggtgcaagccgacaggacaaacaaagagcacttcagggagcatctggacaaacttttcgccaaaggaattggaatgttggatatagctctgaatgaggccttcaacattctgagtgatttcaaccacacgggacaaggaagtatctgcagtcaggccatcatgctcataactgatggggcggtggacacctatgatacaatctttgcaaaatacaattggccagatcgaaaggttcgcatcttcacatacctcattggacgagaggctgcgtttgcagacaatctaaagtggatggcctgtgccaacaaaggattttttacccagatctccaccttggctgatgtgcaggagaatgtcatggaataccttcacgtgcttagccggcccaaagtcatcgaccaggagcatgatgtggtgtggaccgaagcttacattgacagcactctgactgatgatcagggccccgtcctgatgaccactgtagccatgcctgtgtttagtaagcagaacgaaaccagatcgaagggcattcttctgggagtggttggcacagatgtcccagtgaaagaacttctgaagaccatccccaaatacaagttagggattcacggttatgcctttgcaatcacaaataatggatatatcctgacgcatccggaactcaggctgctgtacgaagaaggaaaaaagcgaaggaaacctaactatagtagcgttgacctctctgaggtggagtgggaagaccgagatgacgtgttgagaaatgctatggtgaatcgaaagacggggaagttttccatggaggtgaagaagacagtggacaaagggtttaggtgtggcgctttccagaggtcatgggaaatatttcttccgagggaatgtaaccatcgaagaaggcctgcatgacttagaacatcccgatgtgtccttggcagatgaatggtcctactgcaacactgacctacaccctgagcaccgccatctgtctcagttagaagcgattaagctctacctaaaaggcaaagaacctctgctccagtgtgataaagaattgatccaagaagtcctttttgacgcggtggtgagtgcccccattgaagcgtattggaccagcctggccctcaacaaatctgaaaattctgacaagggcgtggaggttgccttcctcggcactcgcacgggcctctccagaatcaacctgtttgtcggggctgagcagctcaccaatcaggacttcctgaaagctggcgacaaggagaacatttttaacgcagaccatttccctctctggtaccgaagagccgctgagcagattccagggagcttcgtctactcgatcccattcagcactggaccagtcaataaaagcaatgtggtgacagcaagtacatccatccagctcctggatgaacggaaatctcctgtggtggcagctgtaggcattcagatgaaacttgaatttttccaaaggaagttctggactgccagcagacagtgtgcttccctggatggcaaatgctccatcagctgtgatgatgagactgtgaattgttacctcatagacaataatggatttattttggtgtctgaagactacacacagactggagacttttttggtgagatcgagggagctgtgatgaacaaattgctaacaatgggctcctttaaaagaattaccctttatgactaccaagccatgtgtagagccaacaaggaaagcagcgatggcgcccatggcctcctggatccttataatgccttcctctctgcagtaaaatggatcatgacagaacttgtcttgttcctggtggaatttaacctctgcagttggtggcactccgatatgacagctaaagcccagaaattgaaacagaccctggagccttgtgatactgaatatccagcattcgtctctgagcgcaccatcaaggagactacagggaatattgcttgtgaagactgctccaagtcctttgtcatccagcaaatcccaagcagcaacctgttcatggtggtggtggacagcagctgcctctgtgaatctgtggcccccatcaccatggcacccattgaaatcaggtataatgaatcccttaagtgtgaacgtctaaaggcccagaagatcagaaggcgcccagaatcttgtcatggcttccatcctgaggagaatgcaagggagtgtgggggtgcgccgagtctccaagcccagacagtcctccttctgctccctctgcttttgatgctcttctcaaggtgacactgactgagatgttctcttactgactgagatgttctcttggcatgctaaatcatggataaactgtgaaccaaaatatggtgcaacatacgagacatgaatatagtccaaccatcagcatctcatcatgattttaaactgtgcgtgatataaactcttaaagatatgttgacaaaaagttatctatcatctttttactttgccagtcatgcaaatgtgagtttgccacatgataatcacccttcatcagaaatgggaccgcaagtggtaggcagtgtcccttctgcttgaaacctattgaaaccaatttaaaactgtgtactttttaaataaagtatattaaaatcataa

SEQ ID NO: 113095 - DNA, 3675 bp, Homo sapiens
  Payload ID: 2123
  Gene Symbol: CACNA2D3
  Gene Name: calcium channel, voltage-dependent, alpha 2/delta subunit 3
  Uniprot ID: Q8IZS8
  ENST ID: ENST00000474759
  CDS Start-End: 49-3324
cggccgctctcgtcgccgccgcagcgggcgcgtcggagggagcccagcatggccgggccgggctcgccgcgccgcgcgtcccggggggcctcggcgcttctcgctgccgcgcttctctacgccgcgctgggggacgtggtgcgctcggagcagcagataccgctctccgtggtgaagctctgggcctcggcttttggtggggagataaaatccattgctgctaagtactccggttcccagcttctgcaaaagaaatacaaagagtatgagaaagacgttgccatagaagaaattgatggcctccaactggtaaagaagctggcaaagaacatggaagagatgtttcacaagaagtctgaggccgtcaggcgtctggtggaggctgcagaagaagcacacctgaaacatgaatttgatgcagacttacagtatgaatacttcaatgctgtgctgataaatgaaagggacaaagacgggaattttttggagctgggaaaggaattcatcttagccccaaatgaccattttaataatttgcctgtgaacatcagtctaagtgacgtccaagtaccaacgaacatgtacaacaaagaccctgcaattgtcaatggggtttattggtctgaatctctaaacaaagtttttgtagataactttgaccgtgacccatctctcatatggcagtactttggaagtgcaaagggcttttttaggcagtatccggggattaaatgggaaccagatgagaatggagtcattgccttcgactgcaggaaccgaaaatggtacatccaggcagcaacttctccgaaagacgtggtcattttagttgacgtcagtggcagcatgaaaggactccgtctgactatcgcgaagcaaacagtctcatccattttggatacacttggggatgatgacttcttcaacataattgcttataatgaggagcttcactatgtggaaccttgcctgaatggaactttggtgcaagccgacaggacaaacaaagagcacttcagggagcatctggacaaacttttcgccaaaggaattggaatgttggatatagctctgaatgaggccttcaacattctgagtgatttcaaccacacgggacaaggaagtatctgcagtcaggccatcatgctcataactgatggggcggtggacacctatgatacaatctttgcaaaatacaattggccagatcgaaaggttcgcatcttcacatacctcattggacgagaggctgcgtttgcagacaatctaaagtggatggcctgtgccaacaaaggattttttacccagatctccaccttggctgatgtgcaggagaatgtcatggaataccttcacgtgcttagccggcccaaagtcatcgaccaggagcatgatgtggtgtggaccgaagcttacattgacagcactctccctcaggcacaaaagctgactgatgatcagggccccgtcctgatgaccactgtagccatgcctgtgtttagtaagcagaacgaaaccagatcgaagggcattcttctgggagtggttggcacagatgtcccagtgaaagaacttctgaagaccatccccaaatacaagttagggattcacggttatgcctttgcaatcacaaataatggatatatcctgacgcatccggaactcaggctgctgtacgaagaaggaaaaaagcgaaggaaacctaactatagtagcgttgacctctctgaggtggagtgggaagaccgagatgacgtgttgagaaatgctatggtgaatcgaaagacggggaagttttccatggaggtgaagaagacagtggacaaagggaaacgggttttggtgatgacaaatgactactattatacagacatcaagggtactcctttcagtttaggtgtggcgctttccagaggtcatgggaaatatttcttccgagggaatgtaaccatcgaagaaggcctgcatgacttagaacatcccgatgtgtccttggcagatgaatggtcctactgcaacactgacctacaccctgagcaccgccatctgtctcagttagaagcgattaagctctacctaaaaggcaaagaacctctgctccagtgtgataaagaattgatccaagaagtcctttttgacgcggtggtgagtgcccccattgaagcgtattggaccagcctggccctcaacaaatctgaaaattctgacaagggcgtggaggttgccttcctcggcactcgcacgggcctctccagaatcaacctgtttgtcggggctgagcagctcaccaatcaggacttcctgaaagctggcgacaaggagaacatttttaacgcagaccatttccctctctggtaccgaagagccgctgagcagattccagggagcttcgtctactcgatcccattcagcactggaccagtcaataaaagcaatgtggtgacagcaagtacatccatccagctcctggatgaacggaaatctcctgtggtggcagctgtaggcattcagatgaaacttgaatttttccaaaggaagttctggactgccagcagacagtgtgcttccctggatggcaaatgctccatcagctgtgatgatgagactgtgaattgttacctcatagacaataatggatttattttggtgtctgaagactacacacagactggagacttttttggtgagatcgagggagctgtgatgaacaaattgctaacaatgggctcctttaaaagaattaccctttatgactaccaagccatgtgtagagccaacaaggaaagcagcgatggcgcccatggcctcctggatccttataatgccttcctctctgcagtaaaatggatcatgacagaacttgtcttgttcctggtggaatttaacctctgcagttggtggcactccgatatgacagctaaagcccagaaattgaaacagaccctggagccttgtgatactgaatatccagcattcgtctctgagcgcaccatcaaggagactacagggaatattgcttgtgaagactgctccaagtcctttgtcatccagcaaatcccaagcagcaacctgttcatggtggtggtggacagcagctgcctctgtgaatctgtggcccccatcaccatggcacccattgaaatcaggtataatgaatcccttaagtgtgaacgtctaaaggcccagaagatcagaaggcgcccagaatcttgtcatggcttccatcctgaggagaatgcaagggagtgtgggggtgcgccgagtctccaagcccagacagtcctccttctgctccctctgcttttgatgctcttctcaaggtgacactgactgagatgttctcttactgactgagatgttctcttggcatgctaaatcatggataaactgtgaaccaaaatatggtgcaacatacgagacatgaatatagtccaaccatcagcatctcatcatgattttaaactgtgcgtgatataaactcttaaagatatgttgacaaaaagttatctatcatctttttactttgccagtcatgcaaatgtgagtttgccacatgataatcacccttcatcagaaatgggaccgcaagtggtaggcagtgtcccttctgcttgaaacctattgaaaccaatttaaaactgtgtactttttaaataaagtatattaaaatcataa

SEQ ID NO: 113096 - DNA, 3296 bp, Homo sapiens
  Payload ID: 2123
  Gene Symbol: CACNA2D3
  Gene Name: calcium channel, voltage-dependent, alpha 2/delta subunit 3
  Uniprot ID: Q8IZS8
  ENST ID: ENST00000620722
  CDS Start-End: 213-1772
gttgactgtgacacgggtgttacatatcttcctgtgccccttctccctgtagggtgaagctctgggcctcggcttttggtggggagataaaatccattgctgctaagtactccggttcccagcttctgcaaaagaaatacaaagagtatgagaaagacgttgccatagaagaaattgatggcctccaactggtaaagaagctggcaaagaacatggaagagatgtttcacaagaagtctgaggccgtcaggcgtctggtggaggctgcagaagaagcacacctgaaacatgaatttgatgcagacttacagtatgaatacttcaatgctgtgctgataaatgaaagggacaaagacgggaattttttggagctgggaaaggaattcatcttagccccaaatgaccattttaataatttgcctgtgaacatcagtctaagtgacgtccaagtaccaacgaacatgtacaacaaagaccctgcaattgtcaatggggtttattggtctgaatctctaaacaaagtttttgtagataactttgaccgtgacccatctctcatatggcagtactttggaagtgcaaagggcttttttaggcagtatccggggattaaatgggaaccagatgagaatggagtcattgccttcgactgcaggaaccgaaaatggtacatccaggcagcaacttctccgaaagacgtggtcattttagttgacgtcagtggcagcatgaaaggactccgtctgactatcgcgaagcaaacagtctcatccattttggatacacttggggatgatgacttcttcaacataattgcttataatgaggagcttcactatgtggaaccttgcctgaatggaactttggtgcaagccgacaggacaaacaaagagcacttcagggagcatctggacaaacttttcgccaaaggaattggaatgttggatatagctctgaatgaggccttcaacattctgagtgatttcaaccacacgggacaaggaagtatctgcagtcaggccatcatgctcataactgatggggcggtggacacctatgatacaatctttgcaaaatacaattggccagatcgaaaggttcgcatcttcacatacctcattggacgagaggctgcgtttgcagacaatctaaagtggatggcctgtgccaacaaaggattttttacccagatctccaccttggctgatgtgcaggagaatgtcatggaataccttcacgtgcttagccggcccaaagtcatcgaccaggagcatgatgtggtgtggaccgaagcttacattgacagcactctgactgatgatcagggccccgtcctgatgaccactgtagccatgcctgtgtttagtaagcagaacgaaaccagatcgaagggcattcttctgggagtggttggcacagatgtcccagtgaaagaacttctgaagaccatccccaaatacaagttagggattcacggttatgcctttgcaatcacaaataatggatatatcctgacgcatccggaactcaggctgctgtacgaagaaggaaaaaagcgaaggaaacctaactatagtagcgttgacctctctgaggtggagtgggaagaccgagatgacgtgttgagaaatgctatggtgaatcgaaagacggggaagttttccatggaggtgaagaagacagtggacaaagggtttaggtgtggcgctttccagaggtcatgggaaatatttcttccgagggaatgtaaccatcgaagaaggcctgcatgacttagaacatcccgatgtgtccttggcagatgaatggtcctactgcaacactgacctacaccctgagcaccgccatctgtctcagttagaagcgattaagctctacctaaaaggcaaagaacctctgctccagtgtgataaagaattgatccaagaagtcctttttgacgcggtggtgagtgcccccattgaagcgtattggaccagcctggccctcaacaaatctgaaaattctgacaagggcgtggaggttgccttcctcggcactcgcacgggcctctccagaatcaacctgtttgtcggggctgagcagctcaccaatcaggacttcctgaaagctggcgacaaggagaacatttttaacgcagaccatttccctctctggtaccgaagagccgctgagcagattccagggagcttcgtctactcgatcccattcagcactggaccagtcaataaaagcaatgtggtgacagcaagtacatccatccagctcctggatgaacggaaatctcctgtggtggcagctgtaggcattcagatgaaacttgaatttttccaaaggaagttctggactgccagcagacagtgtgcttccctggatggcaaatgctccatcagctgtgatgatgagactgtgaattgttacctcatagacaataatggatttattttggtgtctgaagactacacacagactggagacttttttggtgagatcgagggagctgtgatgaacaaattgctaacaatgggctcctttaaaagaattaccctttatgactaccaagccatgtgtagagccaacaaggaaagcagcgatggcgcccatggcctcctggatccttataatgccttcctctctgcagtaaaatggatcatgacagaacttgtcttgttcctggtggaatttaacctctgcagttggtggcactccgatatgacagctaaagcccagaaattgaaacagaccctggagccttgtgatactgaatatccagcattcgtctctgagcgcaccatcaaggagactacagggaatattgcttgtgaagactgctccaagtcctttgtcatccagcaaatcccaagcagcaacctgttcatggtggtggtggacagcagctgcctctgtgaatctgtggcccccatcaccatggcacccattgaaatcaggtataatgaatcccttaagtgtgaacgtctaaaggcccagaagatcagaaggcgcccagaatcttgtcatggcttccatcctgaggagaatgcaagggagtgtgggggtgcgccgagtctccaagcccagacagtcctccttctgctccctctgcttttgatgctcttctcaaggtgacactgactgagatgttctcttactgactgagatgttctcttggcatgctaaatcatggataaactgtgaaccaaaatatggtgcaacatacgagacatgaatatagtccaaccatcagcatctcatcatgattttaaactgtgcgtgatataaactcttaaagatatgtt

SEQ ID NO: 113097 - DNA, 5475 bp, Homo sapiens
  Payload ID: 2124
  Gene Symbol: CACNA2D4
  Gene Name: calcium channel, voltage-dependent, alpha 2/delta subunit 4
  Uniprot ID: Q7Z3S7
  ENST ID: ENST00000382722
  CDS Start-End: 364-3777
cacaggaacggggctgcctctttaaagcagaggggtgcactatagccctgagggaaccagctgcagttgtggtaatcttgggaggcagctccccaccccctgccaccccctccctgctgtcaggagaggattagaggagaggccagcggattaaagggtttcatgttgccacagcctctcccccagtccctgtctccgaggcctgcttgctaggtggggcgactcttctgtgagctgcagctgtggggcagagagaagccctccccacccaggactgagaggctggagaccccaggctcgccaaggcacggaagacaaaggcctggggcgtcctggggtctgggaggaaggcagacagagctcatggtctgtggctgctctgccctccttcccctccccaaccccaggcccaccatgcctgcaactcccaacttcctcgcaaaccccagctccagcagccgctggattcccctccagccaatgcccgtggcctgggcctttgtgcagaagacctcggccctcctgtggctgctgcttctaggcacctccctgtcccctgcgtggggacaggccaagattcctctggaaacagtgaagctatgggctgacaccttcggcggggacctgtataacactgtgaccaaatactcaggctctctcttgctgcagaagaagtacaaggatgtggagtccagtctgaagatcgaggaggtggatggcttggagctggtgaggaagttctcagaggacatggagaacatgctgcggaggaaagtcgaggcggtccagaatctggtggaagctgccgaggaggccgacctgaaccacgaattcaatgaatccctggtgttcgactattacaactcggtcctgatcaacgagagggacgagaagggcaacttcgtggagctgggcgccgagttcctcctggagtccaatgctcacttcagcaacctgccggtgaacacctccatcagcagcgtgcagctgcccaccaacgtgtacaacaaagacccagatattttaaatggagtctacatgtctgaagccttgaatgctgtcttcgtggagaacttccagagagacccaacgttgacctggcaatattttggcagtgcaactggattcttcaggatctatccaggtataaaatggacacctgatgagaatggagtcattacttttgactgccgaaaccgcggctggtacattcaagctgctacttctcccaaggacatagtgattttggtggacgtgagcggcagtatgaaggggctgaggatgactattgccaagcacaccatcaccaccatcttggacaccctgggggagaatgacttcattaatatcatagcgtacaatgactacgtccattacatcgagccttgttttaaagggatcctcgtccaggcggaccgagacaatcgagagcatttcaaactgctggtggaggagttgatggtcaaaggtgtgggggtcgtggaccaagccctgagagaagccttccagatcctgaagcagttccaagaggccaagcaaggaagcctctgcaaccaggccatcatgctcatcagcgacggcgccgtggaggactacgagccggtgtttgagaagtataactggccagactgtaaggtccgagttttcacttacctcattgggagagaagtgtcttttgctgaccgcatgaagtggattgcatgcaacaacaaaggctactacacgcagatctcaacgctggcggacacccaggagaacgtgatggaatacctgcacgtgctcagccgccccatggtcatcaaccacgaccacgacatcatctggacagaggcctacatggacagcaagctcctcagctcgcaggctcagagcctgacactgctcaccactgtggccatgccagtcttcagcaagaagaacgaaacgcgatcccatggcattctcctgggtgtggtgggctcagatgtggccctgagagagctgatgaagctggcgccccggtacaagcttggagtgcacggatacgcctttctgaacaccaacaatggctacatcctctcccatcccgacctccggcccctgtacagagaggggaagaaactaaaacccaaacctaactacaacagtgtggatctctccgaagtggagtgggaagaccaggctgaatctctgagaacagccatgatcaatagggaaacaggtactctctcgatggatgtgaaggttccgatggataaagggaagcgagttcttttcctgaccaatgactacttcttcacggacatcagcgacacccctttcagtttgggggtggtgctgtcccggggccacggagaatacatccttctggggaacacgtctgtggaagaaggcctgcatgacttgcttcacccagacctggccctggccggtgactggatctactgcatcacagatattgacccagaccaccggaagctcagccagctagaggccatgatccgcttcctcaccaggaaggacccagacctggagtgtgacgaggagctggtccgggaggtgctgtttgacgcggtggtgacagcccccatggaagcctactggacagcgctggccctcaacatgtccgaggagtctgaacacgtggtggacatggccttcctgggcacccgggctggcctcctgagaagcagcttgttcgtgggctccgagaaggtctccgacaggaagttcctgacacctgaggacgaggccagcgtgttcaccctggaccgcttcccgctgtggtaccgccaggcctcagagcatcctgctggcagcttcgtcttcaacctccgctgggcagaaggaccagaaagtgcgggtgaacccatggtggtgacggcaagcacagctgtggcggtgaccgtggacaagaggacagccattgctgcagccgcgggcgtccaaatgaagctggaattcctccagcgcaaattctgggcggcaacgcggcagtgcagcactgtggatgggccgtgcacacagagctgcgaggacagtgatctggactgcttcgtcatcgacaacaacgggttcattctgatctccaagaggtcccgagagacgggaagatttctgggggaggtggatggtgctgtcctgacccagctgctcagcatgggggtgttcagccaagtgactatgtatgactatcaggccatgtgcaaaccctcgagtcaccaccacagtgcagcccagcccctggtcagcccaatttctgccttcttgacggcgaccaggtggctgctgcaggagctggtgctgttcctgctggagtggagtgtctggggctcctggtacgacagaggggccgaggccaaaagtgtcttccatcactcccacaaacacaagaagcaggacccgctgcagccctgcgacacggagtaccccgtgttcgtgtaccagccggccatccgggaggccaacgggatcgtggagtgcgggccctgccagaaggtatttgtggtgcagcagattcccaacagtaacctcctcctcctggtgacagaccccacctgtgactgcagcatcttcccaccagtgctgcaggaggcgacagaagtcaaatataatgcctctgtcaaatgtgaccggatgcgctcccagaagctccgccggcgaccagactcctgccacgccttccatccagaggagaatgcccaggactgcggcggcgcctcggacacctcagcctcgccgcccctactcctgctgcctgtgtgtgcctgggggctactgccccaactcctgcggtgacaccacccagcctgacctgtgttttggcaaggtgatccttccagagccatcccaaaaagtcagcactgacatgggatgcagctaactgcagttgggtcgcccccaggccaacgctcctctcaatcctgggctggtggcccctggctccggagaatgctggatggaacaggaaaccaatcacctggcaccactttcaagatgcttcatggtgcccggtaccatctgccctaggtctcaacatgagcatacttctgacctaaccttcctgtctcctcttcgggaagccagcgtgagctcagcttggaccaagacaaaataatttagttcttcctgtactccagagtccagacccagccaagaaagggtcagttgtttctgaccctttctgtcggagtggtctctggtagaacccaaggacttctgggtactgagaagcagcagcagaatgaggccaaatgcagagatgaggctaaggcaagaatatgccccaactaaagcatagattccccaaagtgaggctcatggtgggaggccactcaccttcctagctgctgctcgaaaaggttttgactgtgttggggtgggggttgggtaagggaatggtcaagactgagaaaggaatgaaatccattcaggaaatatcgacagggctacacgtgatgtccccaaactgctgctattgaagaacttcccaaaacttctttacaaagccctaaaggaaagtttgcatctatgaaaagccaataggctgagacatccaattgctgcatggaaattgatgtacattcaggggacggcaaaaatagctgtaaaatagtgaaaaagagcagtggttgtgctcttttctggccaatgatttacaaaagaatctacttgactctgtccctggagtgaaatccttagggttggaacttgtgggaacattccaacttgctaagcagggtccactgggagggaagctctatctgggaactcacccccagcgcacacacatctcccccagggtcccaaggccccgcagcttcctcccccgaccaaaccccaagacctggatcccaggagacaacagtctccacagtgagagcaacattaagggcaaagccatggagaaatgtgggagaggccggcctcaaatctttccatttaacaaaccccagtgatgggtatggacagcatgcagggcttttggggcgcttccccccgctcctccatcaccctcagcctccacacttcaaagttcaagttcaaagctgttcaagtttcctaccagcaaatagccctaacttgcctctagagtaggccaaatgccaactctgtaaaacacacttacattatcggttacagaatgtcactcttaccgtcatgtcttgcaacaaccctgtgagggcagtattaatgcccccttacagcagaagacactgcagctcgaagacagcttaagtggcagaataatgctagaacagctaaggtttacatgtaccaaataacatgtttcagctcattccatcctcacaacagccccctgaaagtgggtactatcattagtcccatgttatagaaactgcagcagagttgaaaattgcctccaaattaccggaagagtgtatgaagattgaatgtgatgtattcacgtaacatgcttgaaactgcctggcatatactaaacgctaaataaatacatgctaactgcgatcatta

SEQ ID NO: 113098 - DNA, 4450 bp, Homo sapiens
  Payload ID: 2124
  Gene Symbol: CACNA2D4
  Gene Name: calcium channel, voltage-dependent, alpha 2/delta subunit 4
  ENST ID: ENST00000444595
  CDS Start-End: 165-1970
ggcctgcttgctaggtggggcgactcttctgtgagctgcagctgtggggcagagagaagccctccccacccaggactgagaggctggagaccccaggctcgccaaggcacggaagacaaaggcctggggcgtcctggggtctgggaggaaggcagacagagctcatggtctgtggctgctctgccctccttcccctccccaaccccaggcccaccatgcctgcaactcccaacttcctcgcaaaccccagctccagcagccgctggattcccctccagccaatgcccgtggcctgggcctttgtgcagaagacctcggccctcctgtggctgctgcttctaggcacctccctgtcccctgcgtggggacaggccaagattcctctggaaacagtgaagctatgggctgacaccttcggcggggacctgtataacactgtgaccaaatactcaggctctctcttgctgcagaagaagtacaaggatgtggagtccagtctgaagatcgaggaggtggatggcttggagctggtgaggaagttctcagaggacatggagaacatgctgcggaggaaagtcgaggcggtccagaatctggtggaagctgccgaggaggccgacctgaaccacgaattcaatgaatccctggtgttcgactattacaactcggtcctgatcaacgagagggacgagaagggcaacttcgtggagctgggcgccgagttcctcctggagtccaatgctcacttcagcaacctgccggtgaacacctccatcagcagcgtgcagctgcccaccaacgtgtacaacaaagacccagatattttaaatggagtctacatgtctgaagccttgaatgctgtcttcgtggagaacttccagagagacccaacgttgacctggcaatattttggcagtgcaactggattcttcaggatctatccaggtataaaatggacacctgatgagaatggagtcattacttttgactgccgaaaccgcggctggtacattcaagctgctacttctcccaaggacatagtgattttggtggacgtgagcggcagtatgaaggggctgaggatgactattgccaagcacaccatcaccaccatcttggacaccctgggggagaatgacttcattaatatcatagcgtacaatgactacgtccattacatcgagccttgttttaaagggatcctcgtccaggcggaccgagacaatcgagagcatttcaaactgctggtggaggagttgatggtcaaaggtgtgggggtcgtggaccaagccctgagagaagccttccagatcctgaagcagttccaagaggccaagcaaggaagcctctgcaaccaggccatcatgctcatcagcgacggcgccgtggaggactacgagccggtgtttgagaagtataactggccagactgtaaggtccgagttttcacttacctcattgggagagaagtgtcttttgctgaccgcatgaagtggattgcatgcaacaacaaaggctactacacgcagatctcaacgctggcggacacccaggagaacgtgatggaatacctgcacgtgctcagccgccccatggtcatcaaccacgaccacgacatcatctggacagaggcctacatggacagcaagctcctcagctcgcaggctcagagcctgacactgctcaccactgtggccatgccagtcttcagcaagaagaacgaaacgcgatcccatggcattctcctgggtgtggtgggctcagatgtggccctgagagagctgatgaagctggcgccccggtacaagatgcccagcacaaacagcaggcctaatgcgcctccaccctggactctggcagcttggagtgcacggatacgcctttctgaacaccaacaatggctacatcctctcccatcccgacctccggcccctgtacagagaggggaagaaactaaaacccaaacctaactacaacagtgtggatctctccgaagtggagtgggaagaccaggctgaatctctgagaacagccatgatcaatagggaaacaggtactctctcgatggatgtgaaggttccgatggataaagggaagcgagttcttttcctgaccaatgactacttcttcacggacatcagcgacacccctttcagtttgggggtggtgctgtcccggggccacggagaatacatccttctggggaacacgtctgtggaagaaggcctgcatgacttgcttcacccagacctggccctggccggtgactggatctactgcatcacagatattgacccagaccaccggaagctcagccagctagaggccatgatccgcttcctcaccaggaaggacccagacctggagtgtgacgaggagctggtccgggaggtgctgtttgacgcggtggtgacagcccccatggaagcctactggacagcgctggccctcaacatgtccgaggagtctgaacacgtggtggacatggccttcctgggcacccgggctggcctcctgagaagcagcttgttcgtgggctccgagaaggtctccgacaggaagttcctgacacctgaggacgaggccagcgtgttcaccctggaccgcttcccgctgtggtaccgccaggcctcagagcatcctgctggcagcttcgtcttcaacctccgctgggcagaaggaccagaaagtgcgggtgaacccatggtggtgacggcaagcacagctgtggcggtgaccgtggacaagaggacagccattgctgcagtgcagcactgtggatgggccgtgcacacagagctgcgaggacagtgatctggactgcttcgtcatcgacaacaacgggttcattctgatctccaagaggtcccgagagacgggaagatttctgggggaggtggatggtgctgtcctgacccagctgctcagcatgggggtgttcagccaagtgactatgtatgactatcaggccatgtgcaaaccctcgagtcaccaccacagtgcagcccagcccctggtcagcccaatttctgccttcttgacggcgaccaggtggctgctgcaggagctggtgctgttcctgctggagtggagtgtctggggctcctggtacgacagaggggccgaggccaaaagtgtcttccatcactcccacaaacacaagaagcaggacccgctgcagccctgcgacacggagtaccccgtgttcgtgtaccagccggccatccgggaggccaacgggatcgtggagtgcgggccctgccagaaggtatttgtggtgcagcagattcccaacagtaacctcctcctcctggtgacagaccccacctgtgactgcagcatcttcccaccagtgctgcaggaggcgacagaagtcaaatataatgcctctgtcaaatgtgaccggatgcgctcccagaagctccgccggcgaccagactcctgccacgccttccatccagaggagaatgcccaggactgcggcggcgcctcggacacctcagcctcgccgcccctactcctgctgcctgtgtgtgcctgggggctactgccccaactcctgcggtgacaccacccagcctgacctgtgttttggcaaggtgatccttccagagccatcccaaaaagtcagcactgacatgggatgcagctaactgcagttgggtcgcccccaggccaacgctcctctcaatcctgggctggtggcccctggctccggagaatgctggatggaacaggaaaccaatcacctggcaccactttcaagatgcttcatggtgcccggtaccatctgccctaggtctcaacatgagcatacttctgacctaaccttcctgtctcctcttcgggaagccagcgtgagctcagcttggaccaagacaaaataatttagttcttcctgtactccagagtccagacccagccaagaaagggtcagttgtttctgaccctttctgtcggagtggtctctggtagaacccaaggacttctgggtactgagaagcagcagcagaatgaggccaaatgcagagatgaggctaaggcaagaatatgccccaactaaagcatagattccccaaagtgaggctcatggtgggaggccactcaccttcctagctgctgctcgaaaaggttttgactgtgttggggtgggggttgggtaagggaatggtcaagactgagaaaggaatgaaatccattcaggaaatatcgacagggctacacgtgatgtccccaaactgctgctattgaagaacttcccaaaacttctttacaaagccctaaaggaaagtttgcatctatgaaaagccaataggctgagacatccaattgctgcatggaaattgatgtacattcaggggacggcaaaaatagctgtaaaatagtgaaaaagagcagtggttgtgctcttttctggccaatgatttacaaaagaatctacttgactctg

SEQ ID NO: 113099 - DNA, 2876 bp, Homo sapiens
  Payload ID: 2124
  Gene Symbol: CACNA2D4
  Gene Name: calcium channel, voltage-dependent, alpha 2/delta subunit 4
  ENST ID: ENST00000537784
  CDS Start-End: 1-577
ggagctggtccgggaggtgctgtttgacgcggtggtgacagcccccatggaagcctactggacagcgctggccctcaacatgtccgaggagtctgaacacgtggtggacatggccttcctgggcacccgggctggcctcctgagaagcagcttgttcgtgggctccgagaaggtctccgacaggaagttcctgacacctgaggacgaggccagcgtgttcaccctggaccgcttcccgctgtggtaccgccaggcctcagagcatcctgctggcagcttcgtcttcaacctccgctgggcagaaggaccagaaagtgcgggtgaacccatggtggtgacggcaagcacagctgtggcggtgaccgtggacaagaggacagccattgctgcagccgcgggcgtccaaatgaagctggaattcctccagcgcaaattctgggcggcaacgcggcagtgcagcactgtggatgggccgtgcacacagagctgcgaggacagtgatctggactgcttcgtcatcgacaacaacgggttcattctgatctccaagaggtcccgagagagtgactatgtatgactatcaggccatgtgcaaaccctcgagtcaccaccacagtgcagcccagcccctggtcagcccaatttctgccttcttgacggcgaccaggtggctgctgcaggagctggtgctgttcctgctggagtggagtgtctggggctcctggtacgacagaggggccgaggccaaaagtgtcttccatcactcccacaaacacaagaagcaggacccgctgcagccctgcgacacggagtaccccgtgttcgtgtaccagccggccatccgggaggccaacgggatcgtggagtgcgggccctgccagaaggtatttgtggtgcagcagattcccaacagtaacctcctcctcctggtgacagaccccacctgtgactgcagcatcttcccaccagtgctgcaggaggcgacagaagtcaaatataatgcctctgtcaaatgtgaccggatgcgctcccagaagctccgccggcgaccagactcctgccacgccttccatccagaggagaatgcccaggactgcggcggcgcctcggacacctcagcctcgccgcccctactcctgctgcctgtgtgtgcctgggggctactgccccaactcctgcggtgacaccacccagcctgacctgtgttttggcaaggtgatccttccagagccatcccaaaaagtcagcactgacatgggatgcagctaactgcagttgggtcgcccccaggccaacgctcctctcaatcctgggctggtggcccctggctccggagaatgctggatggaacaggaaaccaatcacctggcaccactttcaagatgcttcatggtgcccggtaccatctgccctaggtctcaacatgagcatacttctgacctaaccttcctgtctcctcttcgggaagccagcgtgagctcagcttggaccaagacaaaataatttagttcttcctgtactccagagtccagacccagccaagaaagggtcagttgtttctgaccctttctgtcggagtggtctctggtagaacccaaggacttctgggtactgagaagcagcagcagaatgaggccaaatgcagagatgaggctaaggcaagaatatgccccaactaaagcatagattccccaaagtgaggctcatggtgggaggccactcaccttcctagctgctgctcgaaaaggttttgactgtgttggggtgggggttgggtaagggaatggtcaagactgagaaaggaatgaaatccattcaggaaatatcgacagggctacacgtgatgtccccaaactgctgctattgaagaacttcccaaaacttctttacaaagccctaaaggaaagtttgcatctatgaaaagccaataggctgagacatccaattgctgcatggaaattgatgtacattcaggggacggcaaaaatagctgtaaaatagtgaaaaagagcagtggttgtgctcttttctggccaatgatttacaaaagaatctacttgactctgtccctggagtgaaatccttagggttggaacttgtgggaacattccaacttgctaagcagggtccactgggagggaagctctatctgggaactcacccccagcgcacacacatctcccccagggtcccaaggccccgcagcttcctcccccgaccaaaccccaagacctggatcccaggagacaacagtctccacagtgagagcaacattaagggcaaagccatggagaaatgtgggagaggccggcctcaaatctttccatttaacaaaccccagtgatgggtatggacagcatgcagggcttttggggcgcttccccccgctcctccatcaccctcagcctccacacttcaaagttcaagttcaaagctgttcaagtttcctaccagcaaatagccctaacttgcctctagagtaggccaaatgccaactctgtaaaacacacttacattatcggttacagaatgtcactcttaccgtcatgtcttgcaacaaccctgtgagggcagtattaatgcccccttacagcagaagacactgcagctcgaagacagcttaagtggcagaataatgctagaacagctaaggtttacatgtaccaaataacatgtttcagctcattccatcctcacaacagccccctgaaagtgggtactatcattagtcccatgttatagaaactgcagcagagttgaaaattgcctccaaattaccggaagagtgtatgaagattgaatgtgatgtattcacgtaacatgcttgaaactgcctggcatatactaaacgctaaataaatacatgctaactgcga

SEQ ID NO: 113100 - DNA, 1615 bp, Homo sapiens
  Payload ID: 2124
  Gene Symbol: CACNA2D4
  Gene Name: calcium channel, voltage-dependent, alpha 2/delta subunit 4
  Uniprot ID: Q7Z3S7
  ENST ID: ENST00000545595
  CDS Start-End: 30-155
ctttctgccctgtagccgcgggcgtccaaatgaagctggaattcctccagcgcaaattctgggcggcaacgcggcaggatctggactgcttcgtcatcgacaacaacgggttcattctgatctccaagaggtcccgagagagtgactatgtatgactatcaggccatgtgcaaaccctcgagtcaccaccacagtgcagcccagcccctggtcagcccaatttctgccttcttgacggcgaccaggtggctgctgcaggagctggtgctgttcctgctggagtggagtgtctggggctcctggtacgacagaggggccgaggccaaaagtgtcttccatcactcccacaaacacaagaagcaggacccgctgcagccctgcgacacggagtaccccgtgttcgtgtaccagccggccatccgggaggccaacgggatcgtggagtgcgggccctgccagaaggtatttgtggtgcagcagattcccaacagtaacctcctcctcctggtgacagaccccacctgtgactgcagcatcttcccaccagtgctgcaggaggcgacagaagtcaaatataatgcctctgtcaaatgtgaccggatgcgctcccagaagctccgccggcgaccagactcctgccacgccttccatccagaggagaatgcccaggactgcggcggcgcctcggacacctcagcctcgccgcccctactcctgctgcctgtgtgtgcctgggggctactgccccaactcctgcggtgacaccacccagcctgacctgtgttttggcaaggtgatccttccagagccatcccaaaaagtcagcactgacatgggatgcagctaactgcagttgggtcgcccccaggccaacgctcctctcaatcctgggctggtggcccctggctccggagaatgctggatggaacaggaaaccaatcacctggcaccactttcaagatgcttcatggtgcccggtaccatctgccctaggtctcaacatgagcatacttctgacctaaccttcctgtctcctcttcgggaagccagcgtgagctcagcttggaccaagacaaaataatttagttcttcctgtactccagagtccagacccagccaagaaagggtcagttgtttctgaccctttctgtcggagtggtctctggtagaacccaaggacttctgggtactgagaagcagcagcagaatgaggccaaatgcagagatgaggctaaggcaagaatatgccccaactaaagcatagattccccaaagtgaggctcatggtgggaggccactcaccttcctagctgctgctcgaaaaggttttgactgtgttggggtgggggttgggtaagggaatggtcaagactgagaaaggaatgaaatccattcaggaaatatcgacagggctacacgtgatgtccccaaactgctgctattgaagaacttcccaaaacttctttacaaagccctaaaggaaagtttgcatctatgaaaagccaataggctgagacatccaattgctgcatggaaattgatgtacattcaggggacggcaaaaatagctgtaaaatagtgaaaaagagcagtggttgtgctcttttctggccaa

SEQ ID NO: 113101 - DNA, 952 bp, Homo sapiens
  Payload ID: 2124
  Gene Symbol: CACNA2D4
  Gene Name: calcium channel, voltage-dependent, alpha 2/delta subunit 4
  ENST ID: ENST00000538027
  CDS Start-End: 52-900
cttccctggccttgccctctctctttctgccctgtagccgcgggcgtccaaatgaagctggaattcctccagcgcaaattctgggcggcaacgcggcagtgcagcactgtggatgggccgtgcacacagagctgcgaggacagtgatctggactgcttcgtcatcgacaacaacgggttcattctgatctccaagaggtcccgagagacgggaagatttctgggggaggtggatggtgctgtcctgacccagctgctcagcatgggggtgttcagccaagtgactatgtatgactatcaggccatgtgcaaaccctcgagtcaccaccacagtgcagcccagcccctggtcagcccaatttctgccttcttgacggcgaccaggtggctgctgcaggagctggtgctgttcctgctggagtggagtgtctggggctcctggtacgacagaggggccgaggccaaaagtgtcttccatcactcccacaaacacaagaagcaggacccgctgcagccctgcgacacggagtaccccgtgttcgtgtaccagccggccatccgggaggccaacgggatcgtggagtgcgggccctgccagaaggtatttgtggtgcagcagattcccaacagtaacctcctcctcctggtgacagaccccacctgtgactgcagcatcttcccaccagtgctgcaggaggcgacagaagtcaaatataatgcctctgtcaaatgtgaccggatgcgctcccagaagctccgccggcgaccagactcctgccacgccttccatccagaggagaatgcccaggactgcggcggcgcctcggacacctcagcctcgccgcccctactcctgctgcctgtgtgtgcctgggggctactgccccaactcctgcggtgacaccacccagcctgacctgtgttttggcaaggtgatccttccagagccatcc

SEQ ID NO: 113102 - DNA, 1498 bp, Homo sapiens
  Payload ID: 2124
  Gene Symbol: CACNA2D4
  Gene Name: calcium channel, voltage-dependent, alpha 2/delta subunit 4
  ENST ID: ENST00000538450
  CDS Start-End: 83-886
aacttgactctatttttttctctccccgtctcttccctggccttgccctctctctttctgccctgtagccgcgggcgtccaaatgaagctggaattcctccagcgcaaattctgggcggcaacgcggcaggatctggactgcttcgtcatcgacaacaacgggttcattctgatctccaagaggtcccgagagacgggaagatttctgggggaggtggatggtgctgtcctgacccagctgctcagcatgggggtgttcagccaagtgactatgtatgactatcaggccatgtgcaaaccctcgagtcaccaccacagtgcagcccagcccctggtcagcccaatttctgccttcttgacggcgaccaggtggctgctgcaggagctggtgctgttcctgctggagtggagtgtctggggctcctggtacgacagaggggccgaggccaaaagtgtcttccatcactcccacaaacacaagaagcaggacccgctgcagccctgcgacacggagtaccccgtgttcgtgtaccagccggccatccgggaggccaacgggatcgtggagtgcgggccctgccagaaggtatttgtggtgcagcagattcccaacagtaacctcctcctcctggtgacagaccccacctgtgactgcagcatcttcccaccagtgctgcaggaggcgacagaagtcaaatataatgcctctgtcaaatgtgaccggatgcgctcccagaagctccgccggcgaccagactcctgccacgccttccatccagaggagaatgcccaggactgcggcggcgcctcggacacctcagcctcgccgcccctactcctgctgcctgtgtgtgcctgggggctactgccccaactcctgcggtgacaccacccagcctgacctgtgttttggcaaggtgatccttccagagccatcccaaaaagtcagcactgacatgggatgcagctaactgcagttgggtcgcccccaggccaacgctcctctcaatcctgggctggtggcccctggctccggagaatgctggatggaacaggaaaccaatcacctggcaccactttcaagatgcttcatggtgcccggtaccatctgccctaggtctcaacatgagcatacttctgacctaaccttcctgtctcctcttcgggaagccagcgtgagctcagcttggaccaagacaaaataatttagttcttcctgtactccagagtccagacccagccaagaaagggtcagttgtttctgaccctttctgtcggagtggtctctggtagaacccaaggacttctgggtactgagaagcagcagcagaatgaggccaaatgcagagatgaggctaaggcaagaatatgccccaactaaagcatagattccccaaagtgaggctcatggtgggaggccactcaccttcctagctgctgctcgaaaaggttttgactgtgttggggtgggggttgggtaagggaatggtcaagactg

SEQ ID NO: 113103 - DNA, 556 bp, Homo sapiens
  Payload ID: 2124
  Gene Symbol: CACNA2D4
  Gene Name: calcium channel, voltage-dependent, alpha 2/delta subunit 4
  ENST ID: ENST00000537923
  CDS Start-End: 32-202
ctctttctgccctgtagccgcgggcgtccaaatgaagctggaattcctccagcgcaaattctgggcggcaacgcggcagtgcagcactgtggatgggccgtgcacacagagctgcgaggacagtgatctggactgcttcgtcatcgacaacaacgggttcattctgatctccaagaggtcccgagagagtgactatgtatgactatcaggccatgtgcaaaccctcgagtcaccaccacagtgcagcccagcccctggtcagcccaatttctgccttcttgacggcgaccaggtggctgctgcaggagctggtgcttgtcttccatcactcccacaaacacaagaagcaggacccgctgcagccctgcgacacggagtaccccgtgttcgtgtaccagccggccatccgggaggccaacgggatcgtggagtgcgggccctgccagaaggtatttgtggtgcagcagattcccaacagtaacctcctcctcctggtgacagaccccacctgtgactgcagcatcttcccaccagtgctgcaggaggcgacagaagt

SEQ ID NO: 113104 - DNA, 3499 bp, Homo sapiens
  Payload ID: 2124
  Gene Symbol: CACNA2D4
  Gene Name: calcium channel, voltage-dependent, alpha 2/delta subunit 4
  Uniprot ID: Q7Z3S7
  ENST ID: ENST00000586184
  CDS Start-End: 1-3465
atggtctgtggctgctctgccctccttcccctccccaaccccaggcccaccatgcctgcaactcccaacttcctcgcaaaccccagctccagcagccgctggattcccctccagccaatgcccgtggcctgggcctttgtgcagaagacctcggccctcctgtggctgctgcttctaggcacctccctgtcccctgcgtggggacaggccaagattcctctggaaacagtgaagctatgggctgacaccttcggcggggacctgtataacactgtgaccaaatactcaggctctctcttgctgcagaagaagtacaaggatgtggagtccagtctgaagatcgaggaggtggatggcttggagctggtgaggaagttctcagaggacatggagaacatgctgcggaggaaagtcgaggcggtccagaatctggtggaagctgccgaggaggccgacctgaaccacgaattcaatgaatccctggtgttcgactattacaactcggtcctgatcaacgagagggacgagaagggcaacttcgtggagctgggcgccgagttcctcctggagtccaatgctcacttcagcaacctgccggtgaacacctccatcagcagcgtgcagctgcccaccaacgtgtacaacaaagacccagatattttaaatggagtctacatgtctgaagccttgaatgctgtcttcgtggagaacttccagagagacccaacgttgacctggcaatattttggcagtgcaactggattcttcaggatctatccaggtataaaatggacacctgatgagaatggagtcattacttttgactgccgaaaccgcggctggtacattcaagctgctacttctcccaaggacatagtgattttggtggacgtgagcggcagtatgaaggggctgaggatgactattgccaagcacaccatcaccaccatcttggacaccctgggggagaatgacttcattaatatcatagcgtacaatgactacgtccattacatcgagccttgttttaaagggatcctcgtccaggcggaccgagacaatcgagagcatttcaaactgctggtggaggagttgatggtcaaaggtgtgggggtcgtggaccaagccctgagagaagccttccagatcctgaagcagttccaagaggccaagcaaggaagcctctgcaaccaggccatcatgctcatcagcgacggcgccgtggaggactacgagccggtgtttgagaagtataactggccagactgtaaggtccgagttttcacttacctcattgggagagaagtgtcttttgctgaccgcatgaagtggattgcatgcaacaacaaaggctactacacgcagatctcaacgctggcggacacccaggagaacgtgatggaatacctgcacgtgctcagccgccccatggtcatcaaccacgaccacgacatcatctggacagaggcctacatggacagcaagctcctcagctcgcaggctcagagcctgacactgctcaccactgtggccatgccagtcttcagcaagaagaacgaaacgcgatcccatggcattctcctgggtgtggtgggctcagatgtggccctgagagagctgatgaagctggcgccccggtacaagcttggagtgcacggatacgcctttctgaacaccaacaatggctacatcctctcccatcccgacctccggcccctgtacagagaggggaagaaactaaaacccaaacctaactacaacagtgtggatctctccgaagtggagtgggaagaccaggctgaatctctgagaacagccatgatcaatagggaaacaggtactctctcgatggatgtgaaggttccgatggataaagggaagcgagttcttttcctgaccaatgactacttcttcacggacatcagcgacacccctttcagtttgggggtggtgctgtcccggggccacggagaatacatccttctggggaacacgtctgtggaagaaggcctgcatgacttgcttcacccagacctggccctggccggtgactggatctactgcatcacagatattgacccagaccaccggaagctcagccagctagaggccatgatccgcttcctcaccaggaaggacccagacctggagtgtgacgaggagctggtccgggaggtgctgtttgacgcggtggtgacagcccccatggaagcctactggacagcgctggccctcaacatgtccgaggagtctgaacacgtggtggacatggccttcctgggcacccgggctggcctcctgagaagcagcttgttcgtgggctccgagaaggtctccgacaggaagttcctgacacctgaggacgaggccagcgtgttcaccctggaccgcttcccgctgtggtaccgccaggcctcagagcatcctgctggcagcttcgtcttcaacctccgctgggcagaaggaccagaaagtgcgggtgaacccatggtggtgacggcaagcacagctgtggcggtgaccgtggacaagaggacagccattgctgcagccgcgggcgtccaaatgaagctggaattcctccagcgcaaattctgggcggcaacgcggcagtgcagcactgtggatgggccgtgcacacagagctgcgaggacagtgatctggactgcttcgtcatcgacaacaacgggttcattctgatctccaagaggtcccgagagacgggaagatttctgggggaggtggatggtgctgtcctgacccagctgctcagcatgggggtgttcagccaagtgactatgtatgactatcaggccatgtgcaaaccctcgagtcaccaccacagtgcagcccagcccctggtcagcccaatttctgccttcttgacggcgaccaggtggctgctgcaggagctggtgctgttcctgctggagtggagtgtctggggctcctggtacgacagaggggccgaggccaaaagtgtcttccatcactcccacaaacacaagaagcaggacccgctgcagccctgcgacacggagtaccccgtgttcgtgtaccagccggccatccgggaggccaacgggatcgtggagtgcgggccctgccagaaggtatttgtggtgcagcagattcccaacagtaacctcctcctcctggtgacagaccccacctgtgactgcagcatcttcccaccagtgctgcaggaggcgacagaagtcaaatataatgcctctgtcaaatgtgaccggatgcgctcccagaagctccgccggcgaccagactcctgccacgccttccatccagaggtgcgggttgaggcggatcgagggtgggctggattttcatccccaaaccctctgtgcctgggtctgtgcccctgcagacaggagcatatagggatgccaatgaacacacctgtgcctgtgcttctcgggggaaacattcgcgtttatgccctgtgacactgtgatataataagaaacagatctttattta

SEQ ID NO: 113105 - DNA, 3883 bp, Homo sapiens
  Payload ID: 2124
  Gene Symbol: CACNA2D4
  Gene Name: calcium channel, voltage-dependent, alpha 2/delta subunit 4
  ENST ID: ENST00000587995
  CDS Start-End: 59-3397
gcacggaagacaaaggcctggggcgtcctggggtctgggaggaaggcagacagagctcatggtctgtggctgctctgccctccttcccctccccaaccccaggcccaccatgcctgcaactcccaacttcctcgcaaaccccagctccagcagccgctggattcccctccagccaatgcccgtggcctgggcctttgtgcagaagacctcggccctcctgtggctgctgcttctaggcacctccctgtcccctgcgtggggacaggccaagattcctctggaaacagtgaagctatgggctgacaccttcggcggggacctgtataacactgtgaccaaatactcaggctctctcttgctgcagaagaagtacaaggatgtggagtccagtctgaagatcgaggaggtggatggcttggagctggtgaggaagttctcagaggacatggagaacatgctgcggaggaaagtcgaggcggtccagaatctggtggaagctgccgaggaggccgacctgaaccacgaattcaatgaatccctggtgttcgactattacaactcggtcctgatcaacgagagggacgagaagggcaacttcgtggagctgggcgccgagttcctcctggagtccaatgctcacttcagcaacctgccggtgaacacctccatcagcagcgtgcagctgcccaccaacgtgtacaacaaagacccagatattttaaatggagtctacatgtctgaagccttgaatgctgtcttcgtggagaacttccagagagacccaacgttgacctggcaatattttggcagtgcaactggattcttcaggatctatccaggtataaaatggacacctgatgagaatggagtcattacttttgactgccgaaaccgcggctggtacattcaagctgctacttctcccaaggacatagtgattttggtggacgtgagcggcagtatgaaggggctgaggatgactattgccaagcacaccatcaccaccatcttggacaccctgggggagaatgacttcattaatatcatagcgtacaatgactacgtccattacatcgagccttgttttaaagggatcctcgtccaggcggaccgagacaatcgagagcatttcaaactgctggtggaggagttgatggtcaaaggtgtgggggtcgtggaccaagccctgagagaagccttccagatcctgaagcagttccaagaggccaagcaaggaagcctctgcaaccaggccatcatgctcatcagcgacggcgccgtggaggactacgagccggtgtttgagaagtataactggccagactgtaaggtccgagttttcacttacctcattgggagagaagtgtcttttgctgaccgcatgaagtggattgcatgcaacaacaaaggctactacacgcagatctcaacgctggcggacacccaggagaacgtgatggaatacctgcacgtgctcagccgccccatggtcatcaaccacgaccacgacatcatctggacagaggcctacatggacagcaagctcctcagctcgcaggctcagagcctgacactgctcaccactgtggccatgccagtcttcagcaagaagaacgaaacgcgatcccatggcattctcctgggtgtggtgggctcagatgtggccctgagagagctgatgaagctggcgccccggtacaagtacagagaggggaagaaactaaaacccaaacctaactacaacagtgtggatctctccgaagtggagtgggaagaccaggctgaatctctgagaacagccatgatcaatagggaaacaggtactctctcgatggatgtgaaggttccgatggataaagggaagcgagttcttttcctgaccaatgactacttcttcacggacatcagcgacacccctttcagtttgggggtggtgctgtcccggggccacggagaatacatccttctggggaacacgtctgtggaagaaggcctgcatgacttgcttcacccagacctggccctggccggtgactggatctactgcatcacagatattgacccagaccaccggaagctcagccagctagaggccatgatccgcttcctcaccaggaaggacccagacctggagtgtgacgaggagctggtccgggaggtgctgtttgacgcggtggtgacagcccccatggaagcctactggacagcgctggccctcaacatgtccgaggagtctgaacacgtggtggacatggccttcctgggcacccgggctggcctcctgagaagcagcttgttcgtgggctccgagaaggtctccgacaggaagttcctgacacctgaggacgaggccagcgtgttcaccctggaccgcttcccgctgtggtaccgccaggcctcagagcatcctgctggcagcttcgtcttcaacctccgctgggcagaaggaccagaaagtgcgggtgaacccatggtggtgacggcaagcacagctgtggcggtgaccgtggacaagaggacagccattgctgcagccgcgggcgtccaaatgaagctggaattcctccagcgcaaattctgggcggcaacgcggcagtgcagcactgtggatgggccgtgcacacagagctgcgaggacagtgatctggactgcttcgtcatcgacaacaacgggttcattctgatctccaagaggtcccgagagacgggaagatttctgggggaggtggatggtgctgtcctgacccagctgctcagcatgggggtgttcagccaagtgactatgtatgactatcaggccatgtgcaaaccctcgagtcaccaccacagtgcagcccagcccctggtcagcccaatttctgccttcttgacggcgaccaggtggctgctgcaggagctggtgctgttcctgctggagtggagtgtctggggctcctggtacgacagaggggccgaggccaaaagtgtcttccatcactcccacaaacacaagaagcaggacccgctgcagccctgcgacacggagtaccccgtgttcgtgtaccagccggccatccgggaggccaacgggatcgtggagtgcgggccctgccagaaggtatttgtggtgcagcagattcccaacagtaacctcctcctcctggtgacagaccccacctgtgactgcagcatcttcccaccagtgctgcaggaggcgacagaagtcaaatataatgcctctgtcaaatgtgaccggatgcgctcccagaagctccgccggcgaccagactcctgccacgccttccatccagaggagaatgcccaggactgcggcggcgcctcggacacctcagcctcgccgcccctactcctgctgcctgtgtgtgcctgggggctactgccccaactcctgcggtgacaccacccagcctgacctgtgttttggcaaggtgatccttccagagccatcccaaaaagtcagcactgacatgggatgcagctaactgcagttgggtcgcccccaggccaacgctcctctcaatcctgggctggtggcccctggctccggagaatgctggatggaacaggaaaccaatcacctggcaccactttcaagatgcttcatggtgcccggtaccatctgccctaggtctcaacatgagcatacttctgacctaaccttcctgtctcctcttcgggaagccagcgtgagctcagcttggaccaagacaaaataatttagttcttcctgtactccagagtccagacccagccaagaaagggtcagttgtttctgaccctttctgtcggagtggtctctggtagaacccaaggacttctgggtactgagaagcagcagcagaatgaggccaaatgcagagatgaggctaaggcaagaatatgc

SEQ ID NO: 113106 - DNA, 976 bp, Homo sapiens
  Payload ID: 2124
  Gene Symbol: CACNA2D4
  Gene Name: calcium channel, voltage-dependent, alpha 2/delta subunit 4
  ENST ID: ENST00000585385
  CDS Start-End: 52-222
cttccctggccttgccctctctctttctgccctgtagccgcgggcgtccaaatgaagctggaattcctccagcgcaaattctgggcggcaacgcggcagtgcagcactgtggatgggccgtgcacacagagctgcgaggacagtgatctggactgcttcgtcatcgacaacaacgggttcattctgatctccaagaggtcccgagagagtgactatgtatgactatcaggccatgtgcaaaccctcgagtcaccaccacagtgcagcccagcccctggtcagcccaatttctgccttcttgacggcgaccaggtggctgctgcaggagctggtgctgttcctgctggagtggagtgtctggggctcctggtacgacagaggggccgaggccaaaagtgtcttccatcactcccacaaacacaagaagcaggacccgctgcagccctgcgacacggagtaccccgtgttcgtgtaccagccggccatccgggaggccaacgggatcgtggagtgcgggccctgccagaaggtatttgtggtgcagcagattcccaacagtaacctcctcctcctggtgacagaccccacctgtgactgcagcatcttcccaccagtgctgcaggaggcgacagaagtcaaatataatgcctctgtcaaatgtgaccggatgcgctcccagaagctccgccggcgaccagactcctgccacgccttccatccagaggagaatgcccaggactgcggcggcgcctcggacacctcagcctcgccgcccctactcctgctgcctgtgtgtgcctgggggctactgccccaactcctgcggtgacaccacccagcctgacctgtgttttggcaaggtgatccttccagagccatcccaaaaagtcagcactgacatgggatgcagctaactgcagttgggtcgcccccaggccaacgctcctctcaatcctgggctggtggcccctggctc

SEQ ID NO: 113107 - DNA, 3273 bp, Homo sapiens
  Payload ID: 2124
  Gene Symbol: CACNA2D4
  Gene Name: calcium channel, voltage-dependent, alpha 2/delta subunit 4
  Uniprot ID: Q7Z3S7
  ENST ID: ENST00000585708
  CDS Start-End: 1-3273
atggctgtagctttagggacaaggaggagggacagagtgaagctatgggctgacaccttcggcggggacctgtataacactgtgaccaaatactcaggctctctcttgctgcagaagaagtacaaggatgtggagtccagtctgaagatcgaggaggtggatggcttggagctggtgaggaagttctcagaggacatggagaacatgctgcggaggaaagtcgaggcggtccagaatctggtggaagctgccgaggaggccgacctgaaccacgaattcaatgaatccctggtgttcgactattacaactcggtcctgatcaacgagagggacgagaagggcaacttcgtggagctgggcgccgagttcctcctggagtccaatgctcacttcagcaacctgccggtgaacacctccatcagcagcgtgcagctgcccaccaacgtgtacaacaaagacccagatattttaaatggagtctacatgtctgaagccttgaatgctgtcttcgtggagaacttccagagagacccaacgttgacctggcaatattttggcagtgcaactggattcttcaggatctatccaggtataaaatggacacctgatgagaatggagtcattacttttgactgccgaaaccgcggctggtacattcaagctgctacttctcccaaggacatagtgattttggtggacgtgagcggcagtatgaaggggctgaggatgactattgccaagcacaccatcaccaccatcttggacaccctgggggagaatgacttcattaatatcatagcgtacaatgactacgtccattacatcgagccttgttttaaagggatcctcgtccaggcggaccgagacaatcgagagcatttcaaactgctggtggaggagttgatggtcaaaggtgtgggggtcgtggaccaagccctgagagaagccttccagatcctgaagcagttccaagaggccaagcaaggaagcctctgcaaccaggccatcatgctcatcagcgacggcgccgtggaggactacgagccggtgtttgagaagtataactggccagactgtaaggtccgagttttcacttacctcattgggagagaagtgtcttttgctgaccgcatgaagtggattgcatgcaacaacaaaggctactacacgcagatctcaacgctggcggacacccaggagaacgtgatggaatacctgcacgtgctcagccgccccatggtcatcaaccacgaccacgacatcatctggacagaggcctacatggacagcaagctcctcagctcgcaggctcagagcctgacactgctcaccactgtggccatgccagtcttcagcaagaagaacgaaacgcgatcccatggcattctcctgggtgtggtgggctcagatgtggccctgagagagctgatgaagctggcgccccggtacaagcttggagtgcacggatacgcctttctgaacaccaacaatggctacatcctctcccatcccgacctccggcccctgtacagagaggggaagaaactaaaacccaaacctaactacaacagtgtggatctctccgaagtggagtgggaagaccaggctgaatctctgagaacagccatgatcaatagggaaacaggtactctctcgatggatgtgaaggttccgatggataaagggaagcgagttcttttcctgaccaatgactacttcttcacggacatcagcgacacccctttcagtttgggggtggtgctgtcccggggccacggagaatacatccttctggggaacacgtctgtggaagaaggcctgcatgacttgcttcacccagacctggccctggccggtgactggatctactgcatcacagatattgacccagaccaccggaagctcagccagctagaggccatgatccgcttcctcaccaggaaggacccagacctggagtgtgacgaggagctggtccgggaggtgctgtttgacgcggtggtgacagcccccatggaagcctactggacagcgctggccctcaacatgtccgaggagtctgaacacgtggtggacatggccttcctgggcacccgggctggcctcctgagaagcagcttgttcgtgggctccgagaaggtctccgacaggaagttcctgacacctgaggacgaggccagcgtgttcaccctggaccgcttcccgctgtggtaccgccaggcctcagagcatcctgctggcagcttcgtcttcaacctccgctgggcagaaggaccagaaagtgcgggtgaacccatggtggtgacggcaagcacagctgtggcggtgaccgtggacaagaggacagccattgctgcagccgcgggcgtccaaatgaagctggaattcctccagcgcaaattctgggcggcaacgcggcagtgcagcactgtggatgggccgtgcacacagagctgcgaggacagtgatctggactgcttcgtcatcgacaacaacgggttcattctgatctccaagaggtcccgagagacgggaagatttctgggggaggtggatggtgctgtcctgacccagctgctcagcatgggggtgttcagccaagtgactatgtatgactatcaggccatgtgcaaaccctcgagtcaccaccacagtgcagcccagcccctggtcagcccaatttctgccttcttgacggcgaccaggtggctgctgcaggagctggtgctgttcctgctggagtggagtgtctggggctcctggtacgacagaggggccgaggccaaaagtgtcttccatcactcccacaaacacaagaagcaggacccgctgcagccctgcgacacggagtaccccgtgttcgtgtaccagccggccatccgggaggccaacgggatcgtggagtgcgggccctgccagaaggtatttgtggtgcagcagattcccaacagtaacctcctcctcctggtgacagaccccacctgtgactgcagcatcttcccaccagtgctgcaggaggcgacagaagtcaaatataatgcctctgtcaaatgtgaccggatgcgctcccagaagctccgccggcgaccagactcctgccacgccttccatccagaggtgcgggttgaggcggatcgagggtgggctggattttcatccccaaaccctctgtgcctgggtctgtgcccctgcagacaggagcatatagggatgccaatgaacacacctgtgcctgtgcttctcgggggaaacattcgcgtttatgccctgtga

SEQ ID NO: 113108 - DNA, 2566 bp, Homo sapiens
  Payload ID: 2124
  Gene Symbol: CACNA2D4
  Gene Name: calcium channel, voltage-dependent, alpha 2/delta subunit 4
  ENST ID: ENST00000585732
  CDS Start-End: 74-2416
cccaggctcgccaaggcacggaagacaaaggcctggggcgtcctggggtctgggaggaaggcagacagagctcatggtctgtggctgctctgccctccttcccctccccaaccccaggcccaccatgcctgcaactcccaacttcctcgcaaaccccagctccagcagccgctggattcccctccagccaatgcccgtggcctgggcctttgtgcagaagacctcggccctcctgtggctgctgcttctaggcacctccctgtcccctgcgtggggacaggccaagattcctctggaaacagtgaagctatgggctgacaccttcggcggggacctgtataacactgtgaccaaatactcaggctctctcttgctgcagaagaagtacaaggatgtggagtccagtctgaagatcgaggaggtggatggcttggagctggtgaggaagttctcagaggacatggagaacatgctgcggaggaaagtcgaggcggtccagaatctggtggaagctgccgaggaggccgacctgaaccacgaattcaatgaatccctggtgttcgactattacaactcggtcctgatcaacgagagggacgagaagggcaacttcgtggagctgggcgccgagttcctcctggagtccaatgctcacttcagcaacctgccggtgaacacctccatcagcagcgtgcagctgcccaccaacgtgtacaacaaagacccagatattttaaatggagtctacatgtctgaagccttgaatgctgtcttcgtggagaacttccagagagacccaacgttgacctggcaatattttggcagtgcaactggattcttcaggatctatccagggatcctcgtccaggcggaccgagacaatcgagagcatttcaaactgctggtggaggagttgatggtcaaaggtgtgggggtcgtggaccaagccctgagagaagccttccagatcctgaagcagttccaagaggccaagcaaggaagcctctgcaaccaggccatcatgctcatcagcgacggcgccgtggaggactacgagccggtgtttgagaagtataactggccagactgtaagatctcaacgctggcggacacccaggagaacgtgatggaatacctgcacgtgctcagccgccccatggtcatcaaccacgaccacgacatcatctggacagaggcctacatggacagcaagctcctcagctcgcaggctcagagcctgacactgctcaccactgtggccatgccagtcttcagcaagaagaacgaaacgcgatcccatggcattctcctgggtgtggtgggctcagatgtggccctgagagagctgatgaagctggcgccccggtacaagcttggagtgcacggatacgcctttctgaacaccaacaatggctacatcctctcccatcccgacctccggcccctgtacagagaggggaagaaactaaaacccaaacctaactacaacagtgtggatctctccgaagtggagtgggaagaccaggctgaatctaagcgagttcttttcctgaccaatgactacttcttcacggacatcagcgacacccctttcagtttgggggtggtgctgtcccggggccacggagaatacatccttctggggaacacgtctgtggaagaaggcctgcatgacttgcttcacccagacctggccctggccggtgactggatctactgcatcacagatattgacccagaccaccggaagctcagccagctagaggccatgatccgcttcctcaccaggaaggacccagacctggagtgtgacgaggagctggtccgggaggtgctgtttgacgcggtggtgacagcccccatggaagcctactggacagcgctggccctcaacatgtccgaggagtctgaacacgtggtggacatggccttcctgggcacccgggctggcctcctgagaagcagcttgttcgtgggctccgagaaggtctccgacaggaagttcctgacacctgaggacgaggccagcgtgttcaccctggaccgcttcccgctgtggtaccgccaggcctcagagcatcctgctggcagcttcgtcttcaacctccgctgggcagaaggaccagaaagtgcgggtgaacccatggtggtgacggcaagcacagctgtggcggtgaccgtggacaagaggacagccattgctgcagccgcgggcgtccaaatgaagctggaattcctccagcgcaaattctgggcggcaacgcggcagtgcagcactgtggatgggccgtgcacacagagctgcgaggacagtgatctggactgcttcgtcatcgacaacaacgggttcattctgatctccaagaggtcccgagagccaggaatcaaactgagaaagaagcccattcaaacctgaagcaaatccagatatattcaccagatgtatttccttgaagcaaggcagaagcatcagaaccgcctcctgcctgagcctcggggaaaggggcatagtatttggttctgtgtgagctttgctactaattagaaacgtgatgtgggcaagcga

SEQ ID NO: 113109 - DNA, 895 bp, Homo sapiens
  Payload ID: 2124
  Gene Symbol: CACNA2D4
  Gene Name: calcium channel, voltage-dependent, alpha 2/delta subunit 4
  ENST ID: ENST00000536846
  CDS Start-End: 1-854
cgggcgtccaaatgaagctggaattcctccagcgcaaattctgggcggcaacgcggcagtgcagcactgtggatgggccgtgcacacagagctgcgaggacagtgatctggactgcttcgtcatcgacaacaacgggttcattctgatctccaagaggtcccgagagacgggaagatttctgggggaggtggatggtgctgtcctgacccagctgctcagcatgggggtgttcagccaagtgactatgtatgactatcaggccatgtgcaaaccctcgagtcaccaccacagtgcagcccagcccctgccaatttctgccttcttgacggcgaccaggtggctgctgcaggagctggtgctgttcctgctggagtggagtgtctggggctcctggtacgacagaggggccgaggccaaaagtgtcttccatcactcccacaaacacaagaagcaggacccgctgcagccctgcgacacggagtaccccgtgttcgtgtaccagccggccatccgggaggccaacgggatcgtggagtgcgggccctgccagaaggtatttgtggtgcagcagattcccaacagtaacctcctcctcctggtgacagaccccacctgtgactgcagcatcttcccaccagtgctgcaggaggcgacagaagtcaaatataatgcctctgtcaaatgtgaccggatgcgctcccagaagctccgccggcgaccagactcctgccacgccttccatccagaggagaatgcccaggactgcggcggcgcctcggacacctcagcctcgccgcccctactcctgctgcctgtgtgtgcctgggggctactgccccaactcctgcggtgacaccacccagcctgacctgtgttttggcaaggtgatccttc

SEQ ID NO: 113110 - DNA, 3311 bp, Homo sapiens
  Payload ID: 2124
  Gene Symbol: CACNA2D4
  Gene Name: calcium channel, voltage-dependent, alpha 2/delta subunit 4
  Uniprot ID: Q7Z3S7
  ENST ID: ENST00000588077
  CDS Start-End: 1-3222
atggctgtagctttagggacaaggaggagggacagagtgaagctatgggctgacaccttcggcggggacctgtataacactgtgaccaaatactcaggctctctcttgctgcagaagaagtacaaggatgtggagtccagtctgaagatcgaggaggtggatggcttggagctggtgaggaagttctcagaggacatggagaacatgctgcggaggaaagtcgaggcggtccagaatctggtggaagctgccgaggaggccgacctgaaccacgaattcaatgaatccctggtgttcgactattacaactcggtcctgatcaacgagagggacgagaagggcaacttcgtggagctgggcgccgagttcctcctggagtccaatgctcacttcagcaacctgccggtgaacacctccatcagcagcgtgcagctgcccaccaacgtgtacaacaaagacccagatattttaaatggagtctacatgtctgaagccttgaatgctgtcttcgtggagaacttccagagagacccaacgttgacctggcaatattttggcagtgcaactggattcttcaggatctatccaggtataaaatggacacctgatgagaatggagtcattacttttgactgccgaaaccgcggctggtacattcaagctgctacttctcccaaggacatagtgattttggtggacgtgagcggcagtatgaaggggctgaggatgactattgccaagcacaccatcaccaccatcttggacaccctgggggagaatgacttcattaatatcatagcgtacaatgactacgtccattacatcgagccttgttttaaagggatcctcgtccaggcggaccgagacaatcgagagcatttcaaactgctggtggaggagttgatggtcaaaggtgtgggggtcgtggaccaagccctgagagaagccttccagatcctgaagcagttccaagaggccaagcaaggaagcctctgcaaccaggccatcatgctcatcagcgacggcgccgtggaggactacgagccggtgtttgagaagtataactggccagactgtaaggtccgagttttcacttacctcattgggagagaagtgtcttttgctgaccgcatgaagtggattgcatgcaacaacaaaggctactacacgcagatctcaacgctggcggacacccaggagaacgtgatggaatacctgcacgtgctcagccgccccatggtcatcaaccacgaccacgacatcatctggacagaggcctacatggacagcaagctcctcagctcgcaggctcagagcctgacactgctcaccactgtggccatgccagtcttcagcaagaagaacgaaacgcgatcccatggcattctcctgggtgtggtgggctcagatgtggccctgagagagctgatgaagctggcgccccggtacaagcttggagtgcacggatacgcctttctgaacaccaacaatggctacatcctctcccatcccgacctccggcccctgtacagagaggggaagaaactaaaacccaaacctaactacaacagtgtggatctctccgaagtggagtgggaagaccaggctgaatctctgagaacagccatgatcaatagggaaacaggtactctctcgatggatgtgaaggttccgatggataaagggaagcgagttcttttcctgaccaatgactacttcttcacggacatcagcgacacccctttcagtttgggggtggtgctgtcccggggccacggagaatacatccttctggggaacacgtctgtggaagaaggcctgcatgacttgcttcacccagacctggccctggccggtgactggatctactgcatcacagatattgacccagaccaccggaagctcagccagctagaggccatgatccgcttcctcaccaggaaggacccagacctggagtgtgacgaggagctggtccgggaggtgctgtttgacgcggtggtgacagcccccatggaagcctactggacagcgctggccctcaacatgtccgaggagtctgaacacgtggtggacatggccttcctgggcacccgggctggcctcctgagaagcagcttgttcgtgggctccgagaaggtctccgacaggaagttcctgacacctgaggacgaggccagcgtgttcaccctggaccgcttcccgctgtggtaccgccaggcctcagagcatcctgctggcagcttcgtcttcaacctccgctgggcagaaggaccagaaagtgcgggtgaacccatggtggtgacggcaagcacagctgtggcggtgaccgtggacaagaggacagccattgctgcagccgcgggcgtccaaatgaagctggaattcctccagcgcaaattctgggcggcaacgcggcagtgcagcactgtggatgggccgtgcacacagagctgcgaggacagtgatctggactgcttcgtcatcgacaacaacgggttcattctgatctccaagaggtcccgagagacgggaagatttctgggggaggtggatggtgctgtcctgacccagctgctcagcatgggggtgttcagccaagtgactatgtatgactatcaggccatgtgcaaaccctcgagtcaccaccacagtgcagcccagcccctggtcagcccaatttctgccttcttgacggcgaccaggtggctgctgcaggagctggtgctgttcctgctggagtggagtgtctggggctcctggtacgacagaggggccgaggccaaaagtgtcttccatcactcccacaaacacaagaagcaggacccgctgcagccctgcgacacggagtaccccgtgttcgtgtaccagccggccatccgggaggccaacgggatcgtggagtgcgggccctgccagaaggtatttgtggtgcagcagattcccaacagtaacctcctcctcctggtgacagaccccacctgtgactgcagcatcttcccaccagtgctgcaggaggcgacagaagtcaaatataatgcctctgtcaaatgtgaccggatgcgctcccagaagctccgccggcgaccagactcctgccacgccttccatccagaggagaatgcccaggactgcggcggcgcctcggacacctcagcctcgccgcccctactcctgctgcctgtgtgtgcctgggggctactgccccaactcctgcggtgacaccacccagcctgacctgtgttttggcaaggtgatccttccagagccatcccaaaaagtcagcactgacatgggatgcagctaactgc

SEQ ID NO: 113111 - DNA, 1889 bp, Homo sapiens
  Payload ID: 2125
  Gene Symbol: CACNB1
  Gene Name: calcium channel, voltage-dependent, beta 1 subunit
  Uniprot ID: Q02641
  ENST ID: ENST00000344140
  CDS Start-End: 209-1780
gagatgctgagcctacgggggaggcggcggcggcagtggagagagcgggaggagcgagggaaggcaggaaggaggcagccgaaggccgagctgggtggctggaccgggtgctggctgcgccgcgctgctttcggctcccacggcctctcccatgcgctgagggagcccggctgggccgggccggcggcgggaggggaggctcctctccatggtccagaagaccagcatgtcccggggcccttacccaccctcccaggagatccccatggaggtcttcgaccccagcccgcagggcaaatacagcaagaggaaagggcgattcaaacggtcagatgggagcacgtcctcggataccacatccaacagctttgtccgccagggctcagcggagtcctacaccagccgtccatcagactctgatgtatctctggaggaggaccgggaagccttaaggaaggaagcagagcgccaggcattagcgcagctcgagaaggccaagaccaagccagtggcatttgctgtgcggacaaatgttggctacaatccgtctccaggggatgaggtgcctgtgcagggagtggccatcaccttcgagcccaaagacttcctgcacatcaaggagaaatacaataatgactggtggatcgggcggctggtgaaggagggctgtgaggttggcttcattcccagccccgtcaaactggacagccttcgcctgctgcaggaacagaagctgcgccagaaccgcctcggctccagcaaatcaggcgataactccagttccagtctgggagatgtggtgactggcacccgccgccccacaccccctgccagtggtaatgaaatgactaacttagcctttgaactagaccccctagagttagaggaggaagaggctgagcttggtgagcagagtggctctgccaagactagtgttagcagtgtcaccaccccgccaccccatggcaaacgcatccccttctttaagaagacagagcatgtgcccccctatgacgtggtgccttccatgaggcccatcatcctggtgggaccgtcgctcaagggctacgaggttacagacatgatgcagaaagctttatttgacttcttgaagcatcggtttgatggcaggatctccatcactcgtgtgacggcagatatttccctggctaagcgctcagttctcaacaaccccagcaaacacatcatcattgagcgctccaacacacgctccagcctggctgaggtgcagagtgaaatcgagcgaatcttcgagctggcccggacccttcagttggtcgctctggatgctgacaccatcaatcacccagcccagctgtccaagacctcgctggcccccatcattgtttacatcaagatcacctctcccaaggtacttcaaaggctcatcaagtcccgaggaaagtctcagtccaaacacctcaatgtccaaatagcggcctcggaaaagctggcacagtgcccccctgaaatgtttgacatcatcctggatgagaaccaattggaggatgcctgcgagcatctggcggagtacttggaagcctattggaaggccacacacccgcccagcagcacgccacccaatccgctgctgaaccgcaccatggctaccgcagccctggctgccagccctgcccctgtctccaacctccaggtacaggtgctcacctcgctcaggagaaacctcggcttctggggcgggctggagtcctcacagcggggcagtgtggtgccccaggagcaggaacatgccatgtagtgggcgccctgcccgtcttccctcctgctctggggtcggaactggagtgcagggaacatggaggaggaagggaagagctttattttgtaaaaaaataagatgagcggca

SEQ ID NO: 113112 - DNA, 3742 bp, Homo sapiens
  Payload ID: 2125
  Gene Symbol: CACNB1
  Gene Name: calcium channel, voltage-dependent, beta 1 subunit
  Uniprot ID: Q02641
  ENST ID: ENST00000394303
  CDS Start-End: 209-2005
gagatgctgagcctacgggggaggcggcggcggcagtggagagagcgggaggagcgagggaaggcaggaaggaggcagccgaaggccgagctgggtggctggaccgggtgctggctgcgccgcgctgctttcggctcccacggcctctcccatgcgctgagggagcccggctgggccgggccggcggcgggaggggaggctcctctccatggtccagaagaccagcatgtcccggggcccttacccaccctcccaggagatccccatggaggtcttcgaccccagcccgcagggcaaatacagcaagaggaaagggcgattcaaacggtcagatgggagcacgtcctcggataccacatccaacagctttgtccgccagggctcagcggagtcctacaccagccgtccatcagactctgatgtatctctggaggaggaccgggaagccttaaggaaggaagcagagcgccaggcattagcgcagctcgagaaggccaagaccaagccagtggcatttgctgtgcggacaaatgttggctacaatccgtctccaggggatgaggtgcctgtgcagggagtggccatcaccttcgagcccaaagacttcctgcacatcaaggagaaatacaataatgactggtggatcgggcggctggtgaaggagggctgtgaggttggcttcattcccagccccgtcaaactggacagccttcgcctgctgcaggaacagaagctgcgccagaaccgcctcggctccagcaaatcaggcgataactccagttccagtctgggagatgtggtgactggcacccgccgccccacaccccctgccagtgccaaacagaagcagaagtcgacagagcatgtgcccccctatgacgtggtgccttccatgaggcccatcatcctggtgggaccgtcgctcaagggctacgaggttacagacatgatgcagaaagctttatttgacttcttgaagcatcggtttgatggcaggatctccatcactcgtgtgacggcagatatttccctggctaagcgctcagttctcaacaaccccagcaaacacatcatcattgagcgctccaacacacgctccagcctggctgaggtgcagagtgaaatcgagcgaatcttcgagctggcccggacccttcagttggtcgctctggatgctgacaccatcaatcacccagcccagctgtccaagacctcgctggcccccatcattgtttacatcaagatcacctctcccaaggtacttcaaaggctcatcaagtcccgaggaaagtctcagtccaaacacctcaatgtccaaatagcggcctcggaaaagctggcacagtgcccccctgaaatgtttgacatcatcctggatgagaaccaattggaggatgcctgcgagcatctggcggagtacttggaagcctattggaaggccacacacccgcccagcagcacgccacccaatccgctgctgaaccgcaccatggctaccgcagccctggctgccagccctgcccctgtctccaacctccagggaccctaccttgcttccggggaccagccactggaacgggccaccggggagcacgccagcatgcacgagtacccaggggagctgggccagcccccaggcctttaccccagcagccacccaccaggccgggcaggcacgctacgggcactgtcccgccaagacacttttgatgccgacacccccggcagccgaaactctgcctacacggagctgggagactcatgtgtggacatggagactgacccctcagaggggccagggcttggagaccctgcagggggcggcacgcccccagcccgacagggatcctgggaggacgaggaagaagactatgaggaagagctgaccgacaaccggaaccggggccggaataaggcccgctactgcgctgagggtgggggtccagttttggggcgcaacaagaatgagctggagggctggggacgaggcgtctacattcgctgagaggcaggggccacacggcgggaggaagggctctgagcccaggggaggggagggagcgaggggctcacacctgacatgtattcgcctccagggggcgctgtctccctcctttcagatgcctttgctcaaagcttggggtttctttggtgttaccatcccagctcccgggaggcccttaagccccagctgtcggtttttacctgcctgttgtggatggatgggggatacccacctttctgaagtgtcccctttctcccatcttaaggggctctcctccctcaccctcctagagaaaaggtgcacttccttaactctttctactcggggccctaagtgacggtcctaagtgggatggctctccttctcccaagctgcagtactggggaagggctgggcgcttttcctggaaagggaggccacagattctttcccatgggggctctcttccccagaccccagatccaaggtccctcaccctgcctgccccttcctcccagcttcctggcagcatcgtctggtcggtgaaagccatagcatggacaccccatggggagcttgtcttggggagggttctgggtggaagctggcaggcatacagcaccctctaccctccgtggccatggcaacgtccagggcccagaaccctgaggagtgagcggccgagacgctgctccccaccccccacctccatgcctcagcctttgcctaccccaggaatgagcttggcctccaacatcccttgcctgctgccattagtagagggggcccctctgcatctgagccccccatccctgtgccacctgggtgtggagcccatggaacactctggtccgcctcattttaaaccaaaaaactgctccttcaccctcaccctgaggccccaggggagaggacccgtgggatggtgcccaggggttgccttgggacctcggatctcctctggggggcttggctgctgctgttgctgctctgtatttgcctctcgtgattctgtttgttacccatgttcacttcccccaggagaggccttggtaccccctctcccctggggcatccctttgccttggcatccctgtagcccagcaaccctgcccctccccagcatcccagctgggccagagagagccgagtgtgccaacaaggactggggcctgcccggctgcccgcctcagggatgggcacctcatgcctgtctcgccacctcctgtgccaatgtcccaccctccacctgggggtggggtgcagcttccacttactgattagaagacaccactgccctcccttcccccctccctgtctggtgtcctgtgcccccatctgtctgtctatatttgtctgtactcccctaggagaagtattttgccatatataaaaccactgtcctgtcctttgtggctgcctcccaagcctgcttctttgtcctcgccacatagtcgtcagcgtaggcacctgggagctgctgatatgcacggggagttgaaagggtgggtgcctgaagatgttgtgccctgagtcattgactcaaaagaaaagatgatcctttgattttggccctctgatgtattgtgcccaagccaggagctgcttgggcagtcccagctccacactggccctgagccccttcacttacctgtctctccacaagtagagccaaaggcaatgggaagctcaatgttgctcagtgggtgagatccagacccactggtgcaatgtcttaaatacacatgactgtttttc

SEQ ID NO: 113113 - DNA, 1753 bp, Homo sapiens
  Payload ID: 2125
  Gene Symbol: CACNB1
  Gene Name: calcium channel, voltage-dependent, beta 1 subunit
  Uniprot ID: Q02641
  ENST ID: ENST00000394310
  CDS Start-End: 208-1644
agatgctgagcctacgggggaggcggcggcggcagtggagagagcgggaggagcgagggaaggcaggaaggaggcagccgaaggccgagctgggtggctggaccgggtgctggctgcgccgcgctgctttcggctcccacggcctctcccatgcgctgagggagcccggctgggccgggccggcggcgggaggggaggctcctctccatggtccagaagaccagcatgtcccggggcccttacccaccctcccaggagatccccatggaggtcttcgaccccagcccgcagggcaaatacagcaagaggaaagggcgattcaaacggtcagatgggagcacgtcctcggataccacatccaacagctttgtccgccagggctcagcggagtcctacaccagccgtccatcagactctgatgtatctctggaggaggaccgggaagccttaaggaaggaagcagagcgccaggcattagcgcagctcgagaaggccaagaccaagccagtggcatttgctgtgcggacaaatgttggctacaatccgtctccaggggatgaggtgcctgtgcagggagtggccatcaccttcgagcccaaagacttcctgcacatcaaggagaaatacaataatgactggtggatcgggcggctggtgaaggagggctgtgaggttggcttcattcccagccccgtcaaactggacagccttcgcctgctgcaggaacagaagctgcgccagaaccgcctcggctccagcaaatcaggcgataactccagttccagtctgggagatgtggtgactggcacccgccgccccacaccccctgccagtgccaaacagaagcagaagtcgacagagcatgtgcccccctatgacgtggtgccttccatgaggcccatcatcctggtgggaccgtcgctcaagggctacgaggttacagacatgatgcagaaagctttatttgacttcttgaagcatcggtttgatggcaggatctccatcactcgtgtgacggcagatatttccctggctaagcgctcagttctcaacaaccccagcaaacacatcatcattgagcgctccaacacacgctccagcctggctgaggtgcagagtgaaatcgagcgaatcttcgagctggcccggacccttcagttggtcgctctggatgctgacaccatcaatcacccagcccagctgtccaagacctcgctggcccccatcattgtttacatcaagatcacctctcccaaggtacttcaaaggctcatcaagtcccgaggaaagtctcagtccaaacacctcaatgtccaaatagcggcctcggaaaagctggcacagtgcccccctgaaatgtttgacatcatcctggatgagaaccaattggaggatgcctgcgagcatctggcggagtacttggaagcctattggaaggccacacacccgcccagcagcacgccacccaatccgctgctgaaccgcaccatggctaccgcagccctggctgccagccctgcccctgtctccaacctccaggtacaggtgctcacctcgctcaggagaaacctcggcttctggggcgggctggagtcctcacagcggggcagtgtggtgccccaggagcaggaacatgccatgtagtgggcgccctgcccgtcttccctcctgctctggggtcggaactggagtgcagggaacatggaggaggaagggaagagctttattttgtaaaaaaataagatgagcggca

SEQ ID NO: 113114 - DNA, 3722 bp, Homo sapiens
  Payload ID: 2125
  Gene Symbol: CACNB1
  Gene Name: calcium channel, voltage-dependent, beta 1 subunit
  ENST ID: ENST00000622445
  CDS Start-End: 209-859
gagatgctgagcctacgggggaggcggcggcggcagtggagagagcgggaggagcgagggaaggcaggaaggaggcagccgaaggccgagctgggtggctggaccgggtgctggctgcgccgcgctgctttcggctcccacggcctctcccatgcgctgagggagcccggctgggccgggccggcggcgggaggggaggctcctctccatggtccagaagaccagcatgtcccggggcccttacccaccctcccaggagatccccatggaggtcttcgaccccagcccgcagggcaaatacagcaagaggaaagggcgattcaaacggtcagatgggagcacgtcctcggataccacatccaacagctttgtccgccagggctcagcggagtcctacaccagccgtccatcagactctgatgtatctctggaggaggaccgggaagccttaaggaaggaagcagagcgccaggcattagcgcagctcgagaaggccaagaccaagccagtggcatttgctgtgcggacaaatgttggctacaatccgtctccaggggatgaggtgcctgtgcagggagtggccatcaccttcgagcccaaagacttcctgcacatcaaggagaaatacaataatgactggtggatcgggcggctggtgaaggagggctgtgaggttggcttcattcccagccccgtcaaactggacagccttcgcctgctgcaggaacagaagctgcgccagaaccgcctcggctccagcaaatcaggcgataactccagttccagtctgggagatgtggtgactggcacccgccgccccacaccccctgccagtgacagagcatgtgcccccctatgacgtggtgccttccatgaggcccatcatcctggtgggaccgtcgctcaagggctacgaggttacagacatgatgcagaaagctttatttgacttcttgaagcatcggtttgatggcaggatctccatcactcgtgtgacggcagatatttccctggctaagcgctcagttctcaacaaccccagcaaacacatcatcattgagcgctccaacacacgctccagcctggctgaggtgcagagtgaaatcgagcgaatcttcgagctggcccggacccttcagttggtcgctctggatgctgacaccatcaatcacccagcccagctgtccaagacctcgctggcccccatcattgtttacatcaagatcacctctcccaaggtacttcaaaggctcatcaagtcccgaggaaagtctcagtccaaacacctcaatgtccaaatagcggcctcggaaaagctggcacagtgcccccctgaaatgtttgacatcatcctggatgagaaccaattggaggatgcctgcgagcatctggcggagtacttggaagcctattggaaggccacacacccgcccagcagcacgccacccaatccgctgctgaaccgcaccatggctaccgcagccctggctgccagccctgcccctgtctccaacctccagggaccctaccttgcttccggggaccagccactggaacgggccaccggggagcacgccagcatgcacgagtacccaggggagctgggccagcccccaggcctttaccccagcagccacccaccaggccgggcaggcacgctacgggcactgtcccgccaagacacttttgatgccgacacccccggcagccgaaactctgcctacacggagctgggagactcatgtgtggacatggagactgacccctcagaggggccagggcttggagaccctgcagggggcggcacgcccccagcccgacagggatcctgggaggacgaggaagaagactatgaggaagagctgaccgacaaccggaaccggggccggaataaggcccgctactgcgctgagggtgggggtccagttttggggcgcaacaagaatgagctggagggctggggacgaggcgtctacattcgctgagaggcaggggccacacggcgggaggaagggctctgagcccaggggaggggagggagcgaggggctcacacctgacatgtattcgcctccagggggcgctgtctccctcctttcagatgcctttgctcaaagcttggggtttctttggtgttaccatcccagctcccgggaggcccttaagccccagctgtcggtttttacctgcctgttgtggatggatgggggatacccacctttctgaagtgtcccctttctcccatcttaaggggctctcctccctcaccctcctagagaaaaggtgcacttccttaactctttctactcggggccctaagtgacggtcctaagtgggatggctctccttctcccaagctgcagtactggggaagggctgggcgcttttcctggaaagggaggccacagattctttcccatgggggctctcttccccagaccccagatccaaggtccctcaccctgcctgccccttcctcccagcttcctggcagcatcgtctggtcggtgaaagccatagcatggacaccccatggggagcttgtcttggggagggttctgggtggaagctggcaggcatacagcaccctctaccctccgtggccatggcaacgtccagggcccagaaccctgaggagtgagcggccgagacgctgctccccaccccccacctccatgcctcagcctttgcctaccccaggaatgagcttggcctccaacatcccttgcctgctgccattagtagagggggcccctctgcatctgagccccccatccctgtgccacctgggtgtggagcccatggaacactctggtccgcctcattttaaaccaaaaaactgctccttcaccctcaccctgaggccccaggggagaggacccgtgggatggtgcccaggggttgccttgggacctcggatctcctctggggggcttggctgctgctgttgctgctctgtatttgcctctcgtgattctgtttgttacccatgttcacttcccccaggagaggccttggtaccccctctcccctggggcatccctttgccttggcatccctgtagcccagcaaccctgcccctccccagcatcccagctgggccagagagagccgagtgtgccaacaaggactggggcctgcccggctgcccgcctcagggatgggcacctcatgcctgtctcgccacctcctgtgccaatgtcccaccctccacctgggggtggggtgcagcttccacttactgattagaagacaccactgccctcccttcccccctccctgtctggtgtcctgtgcccccatctgtctgtctatatttgtctgtactcccctaggagaagtattttgccatatataaaaccactgtcctgtcctttgtggctgcctcccaagcctgcttctttgtcctcgccacatagtcgtcagcgtaggcacctgggagctgctgatatgcacggggagttgaaagggtgggtgcctgaagatgttgtgccctgagtcattgactcaaaagaaaagatgatcctttgattttggccctctgatgtattgtgcccaagccaggagctgcttgggcagtcccagctccacactggccctgagccccttcacttacctgtctctccacaagtagagccaaaggcaatgggaagctcaatgttgctcagtgggtgagatccagacccactggtgcaatgtcttaaatacacatgactgtttttc

SEQ ID NO: 113115 - DNA, 3524 bp, Homo sapiens
  Payload ID: 2126
  Gene Symbol: CACNB2
  Gene Name: calcium channel, voltage-dependent, beta 2 subunit
  Uniprot ID: Q08289
  ENST ID: ENST00000282343
  CDS Start-End: 223-2121
cacctcctcccctcgtcgcctgcccaccctctgctcctctcctggcgccggggaccctgcccctttgcgccttttcctggctctgcctcggcttccatttttctctgcttccgaaaagccagtggggaagggcgggggagacctgccagtcctcccagacttctcccgggttgctccagctggccctcctcgccccttcccgggagaggcacatggagagacatgaatcaggggagtggactggacctgctgaagatctcatatggaaaaggagccagaaggaaaaacagatttaaaggatctgatggaagcacgtcatctgatactacctcaaatagttttgttcgccagggttcggcagactcctacactagccgtccatccgattccgatgtatctctggaggaggaccgggaggcagtgcgcagagaagcggagcggcaggcccaggcacagttggaaaaagcaaagacaaagcccgttgcatttgcggttcggacaaatgtcagctacagtgcggcccatgaagatgatgttccagtgcctggcatggccatctcattcgaagcaaaagattttctgcatgttaaggaaaaatttaacaatgactggtggatagggcgattggtaaaagaaggctgtgaaatcggattcattccaagcccagtcaaactagaaaacatgaggctgcagcatgaacagagagccaagcaagggaaattctactccagtaaatcaggaggaaattcatcatccagtttgggtgacatagtacctagttccagaaaatcaacacctccatcatctgctatagacatagatgctactggcttagatgcagaagaaaatgatattccagcaaaccaccgctcccctaaacccagtgcaaacagtgtaacgtcaccccactccaaagagaaaagaatgcccttctttaagaagacagagcacactcctccgtatgatgtggtaccttccatgcgaccagtggtcctagtgggcccttctctgaagggctacgaggtcacagatatgatgcaaaaagcgctgtttgattttttaaaacacagatttgaagggcggatatccatcacaagggtcaccgctgacatctcgcttgccaaacgctcggtattaaacaatcccagtaagcacgcaataatagaaagatccaacacaaggtcaagcttagcggaagttcagagtgaaatcgaaaggatttttgaacttgcaagaacattgcagttggtggtccttgacgcggatacaattaatcatccagctcaactcagtaaaacctccttggcccctattatagtatatgtaaagatttcttctcctaaggttttacaaaggttaataaaatctcgagggaaatctcaagctaaacacctcaacgtccagatggtagcagctgataaactggctcagtgtcctccagagctgttcgatgtgatcttggatgagaaccagcttgaggatgcctgtgagcaccttgccgactatctggaggcctactggaaggccacccatcctcccagcagtagcctccccaaccctctccttagccgtacattagccacttcaagtctgcctcttagccccaccctagcctctaattcacagggttctcaaggtgatcagaggactgatcgctccgctcctatccgttctgcttcccaagctgaagaagaacctagtgtggaaccagtcaagaaatcccagcaccgctcttcctcctcagccccacaccacaaccatcgcagtgggacaagtcgcggcctctccaggcaagagacatttgactcggaaacccaggagagtcgagactctgcctacgtagagccaaaggaagattattcccatgaccacgtggaccactatgcctcacaccgtgaccacaaccacagagacgagacccacgggagcagtgaccacagacacagggagtcccggcaccgttcccgggacgtggatcgagagcaggaccacaacgagtgcaacaagcagcgcagccgtcataaatccaaggatcgctactgtgaaaaggatggagaagtgatatcaaaaaaacggaatgaggctggggagtggaacagggatgtttacatccgccaatgagttttgcccgtttgtgtttttttttttttttttttgaagtcttgtataactaacagcatccccaaaacaaagtctttggggtctacactgcaatcatatgtgatctgtcttgtaatattttgtattattgctgttgcttgaatagcaatagcatggatagagtattgagatactttttcttttgtaagtgctacataaattggcctggtatggctgcagtcctccggttgcatactggactcttcaaaaactgttttgggtagctgccacttgaacaaaatctgttgccacccaggtgatgttagtgttttaagaaatgtagttgatgtatccaacaagccagaatcagcacagataaaaagtggaatttcttgtttctccagatttttaatacgttaatacgcaggcatctgatttgcatattcattcatggaccactgtttcttgcttgtacctctggctgactaaatttggggacagattcagtcttgccttacacaaaggggatcataaagttagaatctattttctatgtactagtactgtgtactgtatagacagtttgtaaatgttatttctgcaaacaaacaccttcttattatatatataatatatatatatatcagtttgatcacactattttagagtcttaatgccaagtcagcagatttgctttatgaattacagggactagaaatgcccacattcaggaaatttgtaataacattgtctagacacctatcctcattctagtagaaagtgtgtacatactgtaaatatgtgtgattgcttgacttgaaaaggtttgaattctgaatgttataccatccttgtaagtaagtttgtaatttccaccataaattatggtaaatataaaactccagaggttgttctactccatacagttcacactgattgtgacacattcttagtagctagtgtctgttctagtcactgcactggagtctacgagccggaactcgctatatgcacgtgtgtgtgtccgtatgtaagaaagtgtgcaccgagtgactgaatggttgagatgaattggaatgctgaagactaacgaagaaactagagactgatatcgagcattctgcccacctcgctctgtatttaattaattgtgctatatgttgctttaacaacccattgagcagtcagggaatgtgagtaagcttgctgccaaaggtaactaggaaagcattcatctgctgcctccttgtttttgctcctagagagtgaaaatacaggcaattttactgtgagtgtttcactggaaatgtacaatctttgtgtgttagagtatttgttttagtaagaaatgtttacacagcttgtggaattatttcgtgggaaaataaatttttataacttctcccacttcaatttctaacctt

SEQ ID NO: 113116 - DNA, 3446 bp, Homo sapiens
  Payload ID: 2126
  Gene Symbol: CACNB2
  Gene Name: calcium channel, voltage-dependent, beta 2 subunit
  Uniprot ID: Q08289
  ENST ID: ENST00000324631
  CDS Start-End: 61-2043
gaggaggaggggacccgccgccgggggctggctgcttcgctccgagccgacttttcgccaatggtccaaagggacatgtccaagtcgcctcccacagcggcggcggcggtggcgcaggagatccagatggaactgctagagaacgtggctcccgcgggggcgctcggagccgccgcacagtcatatggaaaaggagccagaaggaaaaacagatttaaaggatctgatggaagcacgtcatctgatactacctcaaatagttttgttcgccagggttcggcagactcctacactagccgtccatccgattccgatgtatctctggaggaggaccgggaggcagtgcgcagagaagcggagcggcaggcccaggcacagttggaaaaagcaaagacaaagcccgttgcatttgcggttcggacaaatgtcagctacagtgcggcccatgaagatgatgttccagtgcctggcatggccatctcattcgaagcaaaagattttctgcatgttaaggaaaaatttaacaatgactggtggatagggcgattggtaaaagaaggctgtgaaatcggattcattccaagcccagtcaaactagaaaacatgaggctgcagcatgaacagagagccaagcaagggaaattctactccagtaaatcaggaggaaattcatcatccagtttgggtgacatagtacctagttccagaaaatcaacacctccatcatctgctatagacatagatgctactggcttagatgcagaagaaaatgatattccagcaaaccaccgctcccctaaacccagtgcaaacagtgtaacgtcaccccactccaaagagaaaagaatgcccttctttaagaagacagagcacactcctccgtatgatgtggtaccttccatgcgaccagtggtcctagtgggcccttctctgaagggctacgaggtcacagatatgatgcaaaaagcgctgtttgattttttaaaacacagatttgaagggcggatatccatcacaagggtcaccgctgacatctcgcttgccaaacgctcggtattaaacaatcccagtaagcacgcaataatagaaagatccaacacaaggtcaagcttagcggaagttcagagtgaaatcgaaaggatttttgaacttgcaagaacattgcagttggtggtccttgacgcggatacaattaatcatccagctcaactcagtaaaacctccttggcccctattatagtatatgtaaagatttcttctcctaaggttttacaaaggttaataaaatctcgagggaaatctcaagctaaacacctcaacgtccagatggtagcagctgataaactggctcagtgtcctccagagctgttcgatgtgatcttggatgagaaccagcttgaggatgcctgtgagcaccttgccgactatctggaggcctactggaaggccacccatcctcccagcagtagcctccccaaccctctccttagccgtacattagccacttcaagtctgcctcttagccccaccctagcctctaattcacagggttctcaaggtgatcagaggactgatcgctccgctcctatccgttctgcttcccaagctgaagaagaacctagtgtggaaccagtcaagaaatcccagcaccgctcttcctcctcagccccacaccacaaccatcgcagtgggacaagtcgcggcctctccaggcaagagacatttgactcggaaacccaggagagtcgagactctgcctacgtagagccaaaggaagattattcccatgaccacgtggaccactatgcctcacaccgtgaccacaaccacagagacgagacccacgggagcagtgaccacagacacagggagtcccggcaccgttcccgggacgtggatcgagagcaggaccacaacgagtgcaacaagcagcgcagccgtcataaatccaaggatcgctactgtgaaaaggatggagaagtgatatcaaaaaaacggaatgaggctggggagtggaacagggatgtttacatccgccaatgagttttgcccgtttgtgtttttttttttttttttttgaagtcttgtataactaacagcatccccaaaacaaagtctttggggtctacactgcaatcatatgtgatctgtcttgtaatattttgtattattgctgttgcttgaatagcaatagcatggatagagtattgagatactttttcttttgtaagtgctacataaattggcctggtatggctgcagtcctccggttgcatactggactcttcaaaaactgttttgggtagctgccacttgaacaaaatctgttgccacccaggtgatgttagtgttttaagaaatgtagttgatgtatccaacaagccagaatcagcacagataaaaagtggaatttcttgtttctccagatttttaatacgttaatacgcaggcatctgatttgcatattcattcatggaccactgtttcttgcttgtacctctggctgactaaatttggggacagattcagtcttgccttacacaaaggggatcataaagttagaatctattttctatgtactagtactgtgtactgtatagacagtttgtaaatgttatttctgcaaacaaacaccttcttattatatatataatatatatatatatcagtttgatcacactattttagagtcttaatgccaagtcagcagatttgctttatgaattacagggactagaaatgcccacattcaggaaatttgtaataacattgtctagacacctatcctcattctagtagaaagtgtgtacatactgtaaatatgtgtgattgcttgacttgaaaaggtttgaattctgaatgttataccatccttgtaagtaagtttgtaatttccaccataaattatggtaaatataaaactccagaggttgttctactccatacagttcacactgattgtgacacattcttagtagctagtgtctgttctagtcactgcactggagtctacgagccggaactcgctatatgcacgtgtgtgtgtccgtatgtaagaaagtgtgcaccgagtgactgaatggttgagatgaattggaatgctgaagactaacgaagaaactagagactgatatcgagcattctgcccacctcgctctgtatttaattaattgtgctatatgttgctttaacaacccattgagcagtcagggaatgtgagtaagcttgctgccaaaggtaactaggaaagcattcatctgctgcctccttgtttttgctcctagagagtgaaaatacaggcaattttactgtgagtgtttcactggaaatgtacaatctttgtgtgttagagtatttgttttagtaagaaatgtttacacagcttgtggaattatttcgtgggaaaataaatttttataacttctcccacttcaatttctaacctt

SEQ ID NO: 113117 - DNA, 1911 bp, Homo sapiens
  Payload ID: 2126
  Gene Symbol: CACNB2
  Gene Name: calcium channel, voltage-dependent, beta 2 subunit
  Uniprot ID: Q08289
  ENST ID: ENST00000352115
  CDS Start-End: 1-1911
atggtccaaagggacatgtccaagtcgcctcccacagcggcggcggcggtggcgcaggagatccagatggaactgctagagaacgtggctcccgcgggggcgctcggagccgccgcacagtcatatggaaaaggagccagaaggaaaaacagatttaaaggatctgatggaagcacgtcatctgatactacctcaaatagttttgttcgccagggttcggcagactcctacactagccgtccatccgattccgatgtatctctggaggaggaccgggaggcagtgcgcagagaagcggagcggcaggcccaggcacagttggaaaaagcaaagacaaagcccgttgcatttgcggttcggacaaatgtcagctacagtgcggcccatgaagatgatgttccagtgcctggcatggccatctcattcgaagcaaaagattttctgcatgttaaggaaaaatttaacaatgactggtggatagggcgattggtaaaagaaggctgtgaaatcggattcattccaagcccagtcaaactagaaaacatgaggctgcagcatgaacagagagccaagcaagggaaattctactccagtaaatcaggaggaaattcatcatccagtttgggtgacatagtacctagttccagaaaatcaacacctccatcatctggtgcaaaatctgcagatgaacaagaccagtggaaaactgcaggcttgttttggcggtttactacagagcacactcctccgtatgatgtggtaccttccatgcgaccagtggtcctagtgggcccttctctgaagggctacgaggtcacagatatgatgcaaaaagcgctgtttgattttttaaaacacagatttgaagggcggatatccatcacaagggtcaccgctgacatctcgcttgccaaacgctcggtattaaacaatcccagtaagcacgcaataatagaaagatccaacacaaggtcaagcttagcggaagttcagagtgaaatcgaaaggatttttgaacttgcaagaacattgcagttggtggtccttgacgcggatacaattaatcatccagctcaactcagtaaaacctccttggcccctattatagtatatgtaaagatttcttctcctaaggttttacaaaggttaataaaatctcgagggaaatctcaagctaaacacctcaacgtccagatggtagcagctgataaactggctcagtgtcctccagagctgttcgatgtgatcttggatgagaaccagcttgaggatgcctgtgagcaccttgccgactatctggaggcctactggaaggccacccatcctcccagcagtagcctccccaaccctctccttagccgtacattagccacttcaagtctgcctcttagccccaccctagcctctaattcacagggttctcaaggtgatcagaggactgatcgctccgctcctatccgttctgcttcccaagctgaagaagaacctagtgtggaaccagtcaagaaatcccagcaccgctcttcctcctcagccccacaccacaaccatcgcagtgggacaagtcgcggcctctccaggcaagagacatttgactcggaaacccaggagagtcgagactctgcctacgtagagccaaaggaagattattcccatgaccacgtggaccactatgcctcacaccgtgaccacaaccacagagacgagacccacgggagcagtgaccacagacacagggagtcccggcaccgttcccgggacgtggatcgagagcaggaccacaacgagtgcaacaagcagcgcagccgtcataaatccaaggatcgctactgtgaaaaggatggagaagtgatatcaaaaaaacggaatgaggctggggagtggaacagggatgtttacatccgccaatga

SEQ ID NO: 113118 - DNA, 3461 bp, Homo sapiens
  Payload ID: 2126
  Gene Symbol: CACNB2
  Gene Name: calcium channel, voltage-dependent, beta 2 subunit
  Uniprot ID: Q08289
  ENST ID: ENST00000377315
  CDS Start-End: 220-2058
gtgtgttttcagcccctcctggaatgggaaaataagaatctccctggatgggagtcctctggggcagggagtgaaagccccggaggcagaaagggacggagaacaggggcttgcccagagcatggataggaaaggagctggggttctccggggctcagcgcgcactgagaacctgtgcccggggctgcagctgcggacgataaaggcgctgtctggctcatgaaggccacctggatcaggcttctgaaaagagccaagggaggaaggctgaagaattctgatatctgtggttcggcagactcctacactagccgtccatccgattccgatgtatctctggaggaggaccgggaggcagtgcgcagagaagcggagcggcaggcccaggcacagttggaaaaagcaaagacaaagcccgttgcatttgcggttcggacaaatgtcagctacagtgcggcccatgaagatgatgttccagtgcctggcatggccatctcattcgaagcaaaagattttctgcatgttaaggaaaaatttaacaatgactggtggatagggcgattggtaaaagaaggctgtgaaatcggattcattccaagcccagtcaaactagaaaacatgaggctgcagcatgaacagagagccaagcaagggaaattctactccagtaaatcaggaggaaattcatcatccagtttgggtgacatagtacctagttccagaaaatcaacacctccatcatctgctatagacatagatgctactggcttagatgcagaagaaaatgatattccagcaaaccaccgctcccctaaacccagtgcaaacagtgtaacgtcaccccactccaaagagaaaagaatgcccttctttaagaagacagagcacactcctccgtatgatgtggtaccttccatgcgaccagtggtcctagtgggcccttctctgaagggctacgaggtcacagatatgatgcaaaaagcgctgtttgattttttaaaacacagatttgaagggcggatatccatcacaagggtcaccgctgacatctcgcttgccaaacgctcggtattaaacaatcccagtaagcacgcaataatagaaagatccaacacaaggtcaagcttagcggaagttcagagtgaaatcgaaaggatttttgaacttgcaagaacattgcagttggtggtccttgacgcggatacaattaatcatccagctcaactcagtaaaacctccttggcccctattatagtatatgtaaagatttcttctcctaaggttttacaaaggttaataaaatctcgagggaaatctcaagctaaacacctcaacgtccagatggtagcagctgataaactggctcagtgtcctccagagctgttcgatgtgatcttggatgagaaccagcttgaggatgcctgtgagcaccttgccgactatctggaggcctactggaaggccacccatcctcccagcagtagcctccccaaccctctccttagccgtacattagccacttcaagtctgcctcttagccccaccctagcctctaattcacagggttctcaaggtgatcagaggactgatcgctccgctcctatccgttctgcttcccaagctgaagaagaacctagtgtggaaccagtcaagaaatcccagcaccgctcttcctcctcagccccacaccacaaccatcgcagtgggacaagtcgcggcctctccaggcaagagacatttgactcggaaacccaggagagtcgagactctgcctacgtagagccaaaggaagattattcccatgaccacgtggaccactatgcctcacaccgtgaccacaaccacagagacgagacccacgggagcagtgaccacagacacagggagtcccggcaccgttcccgggacgtggatcgagagcaggaccacaacgagtgcaacaagcagcgcagccgtcataaatccaaggatcgctactgtgaaaaggatggagaagtgatatcaaaaaaacggaatgaggctggggagtggaacagggatgtttacatccgccaatgagttttgcccgtttgtgtttttttttttttttttttgaagtcttgtataactaacagcatccccaaaacaaagtctttggggtctacactgcaatcatatgtgatctgtcttgtaatattttgtattattgctgttgcttgaatagcaatagcatggatagagtattgagatactttttcttttgtaagtgctacataaattggcctggtatggctgcagtcctccggttgcatactggactcttcaaaaactgttttgggtagctgccacttgaacaaaatctgttgccacccaggtgatgttagtgttttaagaaatgtagttgatgtatccaacaagccagaatcagcacagataaaaagtggaatttcttgtttctccagatttttaatacgttaatacgcaggcatctgatttgcatattcattcatggaccactgtttcttgcttgtacctctggctgactaaatttggggacagattcagtcttgccttacacaaaggggatcataaagttagaatctattttctatgtactagtactgtgtactgtatagacagtttgtaaatgttatttctgcaaacaaacaccttcttattatatatataatatatatatatatcagtttgatcacactattttagagtcttaatgccaagtcagcagatttgctttatgaattacagggactagaaatgcccacattcaggaaatttgtaataacattgtctagacacctatcctcattctagtagaaagtgtgtacatactgtaaatatgtgtgattgcttgacttgaaaaggtttgaattctgaatgttataccatccttgtaagtaagtttgtaatttccaccataaattatggtaaatataaaactccagaggttgttctactccatacagttcacactgattgtgacacattcttagtagctagtgtctgttctagtcactgcactggagtctacgagccggaactcgctatatgcacgtgtgtgtgtccgtatgtaagaaagtgtgcaccgagtgactgaatggttgagatgaattggaatgctgaagactaacgaagaaactagagactgatatcgagcattctgcccacctcgctctgtatttaattaattgtgctatatgttgctttaacaacccattgagcagtcagggaatgtgagtaagcttgctgccaaaggtaactaggaaagcattcatctgctgcctccttgtttttgctcctagagagtgaaaatacaggcaattttactgtgagtgtttcactggaaatgtacaatctttgtgtgttagagtatttgttttagtaagaaatgtttacacagcttgtggaattatttcgtgggaaaataaatttttataacttctcccacttcaatttctaacctt

SEQ ID NO: 113119 - DNA, 3116 bp, Homo sapiens
  Payload ID: 2126
  Gene Symbol: CACNB2
  Gene Name: calcium channel, voltage-dependent, beta 2 subunit
  Uniprot ID: Q08289
  ENST ID: ENST00000377319
  CDS Start-End: 10-1713
cccctcttcatgcagtgctgcgggctggtgcatcgccggcgagtacgggtgtcctatggttcggcagactcctacactagccgtccatccgattccgatgtatctctggaggaggaccgggaggcagtgcgcagagaagcggagcggcaggcccaggcacagttggaaaaagcaaagacaaagcccgttgcatttgcggttcggacaaatgtcagctacagtgcggcccatgaagatgatgttccagtgcctggcatggccatctcattcgaagcaaaagattttctgcatgttaaggaaaaatttaacaatgactggtggatagggcgattggtaaaagaaggctgtgaaatcggattcattccaagcccagtcaaactagaaaacatgaggctgcagcatgaacagagagccaagcaagggaaattctactccagtaaatcaggaggaaattcatcatccagtttgggtgacatagtacctagttccagaaaatcaacacctccatcatctgctaagcagaagcagaaatcgacagagcacactcctccgtatgatgtggtaccttccatgcgaccagtggtcctagtgggcccttctctgaagggctacgaggtcacagatatgatgcaaaaagcgctgtttgattttttaaaacacagatttgaagggcggatatccatcacaagggtcaccgctgacatctcgcttgccaaacgctcggtattaaacaatcccagtaagcacgcaataatagaaagatccaacacaaggtcaagcttagcggaagttcagagtgaaatcgaaaggatttttgaacttgcaagaacattgcagttggtggtccttgacgcggatacaattaatcatccagctcaactcagtaaaacctccttggcccctattatagtatatgtaaagatttcttctcctaaggttttacaaaggttaataaaatctcgagggaaatctcaagctaaacacctcaacgtccagatggtagcagctgataaactggctcagtgtcctccagagctgttcgatgtgatcttggatgagaaccagcttgaggatgcctgtgagcaccttgccgactatctggaggcctactggaaggccacccatcctcccagcagtagcctccccaaccctctccttagccgtacattagccacttcaagtctgcctcttagccccaccctagcctctaattcacagggttctcaaggtgatcagaggactgatcgctccgctcctatccgttctgcttcccaagctgaagaagaacctagtgtggaaccagtcaagaaatcccagcaccgctcttcctcctcagccccacaccacaaccatcgcagtgggacaagtcgcggcctctccaggcaagagacatttgactcggaaacccaggagagtcgagactctgcctacgtagagccaaaggaagattattcccatgaccacgtggaccactatgcctcacaccgtgaccacaaccacagagacgagacccacgggagcagtgaccacagacacagggagtcccggcaccgttcccgggacgtggatcgagagcaggaccacaacgagtgcaacaagcagcgcagccgtcataaatccaaggatcgctactgtgaaaaggatggagaagtgatatcaaaaaaacggaatgaggctggggagtggaacagggatgtttacatccgccaatgagttttgcccgtttgtgtttttttttttttttttttgaagtcttgtataactaacagcatccccaaaacaaagtctttggggtctacactgcaatcatatgtgatctgtcttgtaatattttgtattattgctgttgcttgaatagcaatagcatggatagagtattgagatactttttcttttgtaagtgctacataaattggcctggtatggctgcagtcctccggttgcatactggactcttcaaaaactgttttgggtagctgccacttgaacaaaatctgttgccacccaggtgatgttagtgttttaagaaatgtagttgatgtatccaacaagccagaatcagcacagataaaaagtggaatttcttgtttctccagatttttaatacgttaatacgcaggcatctgatttgcatattcattcatggaccactgtttcttgcttgtacctctggctgactaaatttggggacagattcagtcttgccttacacaaaggggatcataaagttagaatctattttctatgtactagtactgtgtactgtatagacagtttgtaaatgttatttctgcaaacaaacaccttcttattatatatataatatatatatatatcagtttgatcacactattttagagtcttaatgccaagtcagcagatttgctttatgaattacagggactagaaatgcccacattcaggaaatttgtaataacattgtctagacacctatcctcattctagtagaaagtgtgtacatactgtaaatatgtgtgattgcttgacttgaaaaggtttgaattctgaatgttataccatccttgtaagtaagtttgtaatttccaccataaattatggtaaatataaaactccagaggttgttctactccatacagttcacactgattgtgacacattcttagtagctagtgtctgttctagtcactgcactggagtctacgagccggaactcgctatatgcacgtgtgtgtgtccgtatgtaagaaagtgtgcaccgagtgactgaatggttgagatgaattggaatgctgaagactaacgaagaaactagagactgatatcgagcattctgcccacctcgctctgtatttaattaattgtgctatatgttgctttaacaacccattgagcagtcagggaatgtgagtaagcttgctgccaaaggtaactaggaaagcattcatctgctgcctccttgtttttgctcctagagagtgaaaatacaggcaattttactgtgagtgtttcactggaaatgtacaatctttgtgtgttagagtatttgttttagtaagaaatgtttacacagcttgtggaattatttcgtgggaaaataaatttttataacttctcccacttcaatttctaacctt

SEQ ID NO: 113120 - DNA, 1233 bp, Homo sapiens
  Payload ID: 2126
  Gene Symbol: CACNB2
  Gene Name: calcium channel, voltage-dependent, beta 2 subunit
  ENST ID: ENST00000377328
  CDS Start-End: 1-1233
atggtccaaagggacatgtccaagtcgcctcccacagcggcggcggcggtggcgcaggagatccagatggaactgctagagaacgtggctcccgcgggggcgctcggagccgccgcacagtcatatggaaaaggagccagaaggaaaaacagatttaaaggatctgatggaagcacgtcatctgatactacctcaaatagttttgttcgccagggttcggcagactcctacactagccgtccatccgattccgatgtatctctggaggaggaccgggaggcagtgcgcagagaagcggagcggcaggcccaggcacagttggaaaaagcaaagacaaagcccgttgcatttgcggttcggacaaatgtcagctacagtgcggcccatgaagatgatgttccagtgcctggcatggccatctcattcgaagcaaaagattttctgcatgttaaggaagttttacaaaggttaataaaatctcgagggaaatctcaagctaaacacctcaacgtccagatggtagcagctgataaactggctcagtgtcctccagagctgttcgatgtgatcttggatgagaaccagcttgaggatgcctgtgagcaccttgccgactatctggaggcctactggaaggccacccatcctcccagcagtagcctccccaaccctctccttagccgtacattagccacttcaagtctgcctcttagccccaccctagcctctaattcacagggttctcaaggtgatcagaggactgatcgctccgctcctatccgttctgcttcccaagctgaagaagaacctagtgtggaaccagtcaagaaatcccagcaccgctcttcctcctcagccccacaccacaaccatcgcagtgggacaagtcgcggcctctccaggcaagagacatttgactcggaaacccaggagagtcgagactctgcctacgtagagccaaaggaagattattcccatgaccacgtggaccactatgcctcacaccgtgaccacaaccacagagacgagacccacgggagcagtgaccacagacacagggagtcccggcaccgttcccgggacgtggatcgagagcaggaccacaacgagtgcaacaagcagcgcagccgtcataaatccaaggatcgctactgtgaaaaggatggagaagtgatatcaaaaaaacggaatgaggctggggagtggaacagggatgtttacatccgccaatga

SEQ ID NO: 113121 - DNA, 3396 bp, Homo sapiens
  Payload ID: 2126
  Gene Symbol: CACNB2
  Gene Name: calcium channel, voltage-dependent, beta 2 subunit
  Uniprot ID: Q08289
  ENST ID: ENST00000377329
  CDS Start-End: 191-2011
ttgtgatccgacgaactttagaaagtcacactaactaagactacacaccccaagccagcaagaaaaaggaaagcagttgctatgctgttcagcaaagcaagacttggctgccttttagctagtcctgaattcttgctcctgtgaagaaaattcctgctggagtgctgggcgcacttggaattggtctagcatgcttgacagacgccttatagctcctcaaactaaatacattattcctgggggttcggcagactcctacactagccgtccatccgattccgatgtatctctggaggaggaccgggaggcagtgcgcagagaagcggagcggcaggcccaggcacagttggaaaaagcaaagacaaagcccgttgcatttgcggttcggacaaatgtcagctacagtgcggcccatgaagatgatgttccagtgcctggcatggccatctcattcgaagcaaaagattttctgcatgttaaggaaaaatttaacaatgactggtggatagggcgattggtaaaagaaggctgtgaaatcggattcattccaagcccagtcaaactagaaaacatgaggctgcagcatgaacagagagccaagcaagggaaattctactccagtaaatcaggaggaaattcatcatccagtttgggtgacatagtacctagttccagaaaatcaacacctccatcatctgctatagacatagatgctactggcttagatgcagaagaaaatgatattccagcaaaccaccgctcccctaaacccagtgcaaacagtgtaacgtcaccccactccaaagagaaaagaatgcccttctttaagaagacagagcacactcctccgtatgatgtggtaccttccatgcgaccagtggtcctagtgggcccttctctgaagggctacgaggtcacagatatgatgcaaaaagcgctgtttgattttttaaaacacagatttgaagggcggatatccatcacaagggtcaccgctgacatctcgcttgccaaacgctcggtattaaacaatcccagtaagcacgcaataatagaaagatccaacacaaggtcaagcttagcggaagttcagagtgaaatcgaaaggatttttgaacttgcaagaacattgcagttggtggtccttgacgcggatacaattaatcatccagctcaactcagtaaaacctccttggcccctattatagtatatgtaaagatttcttctcctaaggttttacaaaggttaataaaatctcgagggaaatctcaagctaaacacctcaacgtccagatggtagcagctgataaactggctcagtgtcctccagagctgttcgatgtgatcttggatgagaaccagcttgaggatgcctgtgagcaccttgccgactatctggaggcctactggaaggccacccatcctcccagcagtagcctccccaaccctctccttagccgtacattagccacttcaagtctgcctcttagccccaccctagcctctaattcacagggttctcaaggtgatcagaggactgatcgctccgctcctatccgttctgcttcccaagctgaagaagaacctagtgtggaaccagtcaagaaatcccagcaccgctcttcctcctcagccccacaccacaaccatcgcagtgggacaagtcgcggcctctccaggcaagagacatttgactcggaaacccaggagagtcgagactctgcctacgtagagccaaaggaagattattcccatgaccacgtggaccactatgcctcacaccgtgaccacaaccacagagacgagacccacgggagcagtgaccacagacacagggagtcccggcaccgttcccgggacgtggatcgagagcaggaccacaacgagtgcaacaagcagcgcagccgtcataaatccaaggatcgctactgtgaaaaggatggagaagtgatatcaaaaaaacggaatgaggctggggagtggaacagggatgtttacatccgccaatgagttttgcccgtttgtgtttttttttttttttttttgaagtcttgtataactaacagcatccccaaaacaaagtctttggggtctacactgcaatcatatgtgatctgtcttgtaatattttgtattattgctgttgcttgaatagcaatagcatggatagagtattgagatactttttcttttgtaagtgctacataaattggcctggtatggctgcagtcctccggttgcatactggactcttcaaaaactgttttgggtagctgccacttgaacaaaatctgttgccacccaggtgatgttagtgttttaagaaatgtagttgatgtatccaacaagccagaatcagcacagataaaaagtggaatttcttgtttctccagatttttaatacgttaatacgcaggcatctgatttgcatattcattcatggaccactgtttcttgcttgtacctctggctgactaaatttggggacagattcagtcttgccttacacaaaggggatcataaagttagaatctattttctatgtactagtactgtgtactgtatagacagtttgtaaatgttatttctgcaaacaaacaccttcttattatatatataatatatatatatatcagtttgatcacactattttagagtcttaatgccaagtcagcagatttgctttatgaattacagggactagaaatgcccacattcaggaaatttgtaataacattgtctagacacctatcctcattctagtagaaagtgtgtacatactgtaaatatgtgtgattgcttgacttgaaaaggtttgaattctgaatgttataccatccttgtaagtaagtttgtaatttccaccataaattatggtaaatataaaactccagaggttgttctactccatacagttcacactgattgtgacacattcttagtagctagtgtctgttctagtcactgcactggagtctacgagccggaactcgctatatgcacgtgtgtgtgtccgtatgtaagaaagtgtgcaccgagtgactgaatggttgagatgaattggaatgctgaagactaacgaagaaactagagactgatatcgagcattctgcccacctcgctctgtatttaattaattgtgctatatgttgctttaacaacccattgagcagtcagggaatgtgagtaagcttgctgccaaaggtaactaggaaagcattcatctgctgcctccttgtttttgctcctagagagtgaaaatacaggcaattttactgtgagtgtttcactggaaatgtacaatctttgtgtgttagagtatttgttttagtaagaaatgtttacacagcttgtggaattatttcgtgggaaaataaatttttataacttctccc

SEQ ID NO: 113122 - DNA, 1827 bp, Homo sapiens
  Payload ID: 2126
  Gene Symbol: CACNB2
  Gene Name: calcium channel, voltage-dependent, beta 2 subunit
  Uniprot ID: Q08289
  ENST ID: ENST00000377331
  CDS Start-End: 1-1827
atgaatcaggggagtggactggacctgctgaagatctcatatggaaaaggagccagaaggaaaaacagatttaaaggatctgatggaagcacgtcatctgatactacctcaaatagttttgttcgccagggttcggcagactcctacactagccgtccatccgattccgatgtatctctggaggaggaccgggaggcagtgcgcagagaagcggagcggcaggcccaggcacagttggaaaaagcaaagacaaagcccgttgcatttgcggttcggacaaatgtcagctacagtgcggcccatgaagatgatgttccagtgcctggcatggccatctcattcgaagcaaaagattttctgcatgttaaggaaaaatttaacaatgactggtggatagggcgattggtaaaagaaggctgtgaaatcggattcattccaagcccagtcaaactagaaaacatgaggctgcagcatgaacagagagccaagcaagggaaattctactccagtaaatcaggaggaaattcatcatccagtttgggtgacatagtacctagttccagaaaatcaacacctccatcatctggtgcaaaatctgcagatgaacaagaccagtggaaaactgcaggcttgttttggcggtttactacagagcacactcctccgtatgatgtggtaccttccatgcgaccagtggtcctagtgggcccttctctgaagggctacgaggtcacagatatgatgcaaaaagcgctgtttgattttttaaaacacagatttgaagggcggatatccatcacaagggtcaccgctgacatctcgcttgccaaacgctcggtattaaacaatcccagtaagcacgcaataatagaaagatccaacacaaggtcaagcttagcggaagttcagagtgaaatcgaaaggatttttgaacttgcaagaacattgcagttggtggtccttgacgcggatacaattaatcatccagctcaactcagtaaaacctccttggcccctattatagtatatgtaaagatttcttctcctaaggttttacaaaggttaataaaatctcgagggaaatctcaagctaaacacctcaacgtccagatggtagcagctgataaactggctcagtgtcctccagagctgttcgatgtgatcttggatgagaaccagcttgaggatgcctgtgagcaccttgccgactatctggaggcctactggaaggccacccatcctcccagcagtagcctccccaaccctctccttagccgtacattagccacttcaagtctgcctcttagccccaccctagcctctaattcacagggttctcaaggtgatcagaggactgatcgctccgctcctatccgttctgcttcccaagctgaagaagaacctagtgtggaaccagtcaagaaatcccagcaccgctcttcctcctcagccccacaccacaaccatcgcagtgggacaagtcgcggcctctccaggcaagagacatttgactcggaaacccaggagagtcgagactctgcctacgtagagccaaaggaagattattcccatgaccacgtggaccactatgcctcacaccgtgaccacaaccacagagacgagacccacgggagcagtgaccacagacacagggagtcccggcaccgttcccgggacgtggatcgagagcaggaccacaacgagtgcaacaagcagcgcagccgtcataaatccaaggatcgctactgtgaaaaggatggagaagtgatatcaaaaaaacggaatgaggctggggagtggaacagggatgtttacatccgccaatga

SEQ ID NO: 113123 - DNA, 4464 bp, Homo sapiens
  Payload ID: 2126
  Gene Symbol: CACNB2
  Gene Name: calcium channel, voltage-dependent, beta 2 subunit
  Uniprot ID: Q08289
  ENST ID: ENST00000396576
  CDS Start-End: 502-2319
cagcagcgtgctaagaagcagtcacataaacagcagcaggagtaggcctcctgcttttcaaaagcagagtactgcagggtcgcgaaatgcaagacactcagatgtttgaaaatctcccgagttgagaatggctactgtaaaagcgtcaccaagaaactctgacgatctggacagtcctaactctgtgttagcaatacttacttccggaaaattaatgctacttcttgtagatttttgcaaataggaaacccccttgaagaagatctcaaattacgccccccacccccaaaaaaagacaaacaggggagaacaaagttttggcatgcctgcaggaacggtggcttttttagaaactacctaggaggcagaagctaagtgatttgctcatgcctcttacctgggagtagaaggtgggaagaaatggaccgaggctgtgacgagaagacaaggcacagtgcagcttggtgaagccacacgctgactgcgttctgccccctcttcatgcagtgctgcgggctggtgcatcgccggcgagtacgggtgtcctatggttcggcagactcctacactagccgtccatccgattccgatgtatctctggaggaggaccgggaggcagtgcgcagagaagcggagcggcaggcccaggcacagttggaaaaagcaaagacaaagcccgttgcatttgcggttcggacaaatgtcagctacagtgcggcccatgaagatgatgttccagtgcctggcatggccatctcattcgaagcaaaagattttctgcatgttaaggaaaaatttaacaatgactggtggatagggcgattggtaaaagaaggctgtgaaatcggattcattccaagcccagtcaaactagaaaacatgaggctgcagcatgaacagagagccaagcaagggaaattctactccagtaaatcaggaggaaattcatcatccagtttgggtgacatagtacctagttccagaaaatcaacacctccatcatctgctatagacatagatgctactggcttagatgcagaagaaaatgatattccagcaaaccaccgctcccctaaacccagtgcaaacagtgtaacgtcaccccactccaaagagaaaagaatgcccttctttaagaagacagagcacactcctccgtatgatgtggtaccttccatgcgaccagtggtcctagtgggcccttctctgaagggctacgaggtcacagatatgatgcaaaaagcgctgtttgattttttaaaacacagatttgaagggcggatatccatcacaagggtcaccgctgacatctcgcttgccaaacgctcggtattaaacaatcccagtaagcacgcaataatagaaagatccaacacaaggtcaagcttagcggaagttcagagtgaaatcgaaaggatttttgaacttgcaagaacattgcagttggtggtccttgacgcggatacaattaatcatccagctcaactcagtaaaacctccttggcccctattatagtatatgtaaagatttcttctcctaaggttttacaaaggttaataaaatctcgagggaaatctcaagctaaacacctcaacgtccagatggtagcagctgataaactggctcagtgtcctccagagctgttcgatgtgatcttggatgagaaccagcttgaggatgcctgtgagcaccttgccgactatctggaggcctactggaaggccacccatcctcccagcagtagcctccccaaccctctccttagccgtacattagccacttcaagtctgcctcttagccccaccctagcctctaattcacagggttctcaaggtgatcagaggactgatcgctccgctcctatccgttctgcttcccaagctgaagaagaacctagtgtggaaccagtcaagaaatcccagcaccgctcttcctcctcagccccacaccacaaccatcgcagtgggacaagtcgcggcctctccaggcaagagacatttgactcggaaacccaggagagtcgagactctgcctacgtagagccaaaggaagattattcccatgaccacgtggaccactatgcctcacaccgtgaccacaaccacagagacgagacccacgggagcagtgaccacagacacagggagtcccggcaccgttcccgggacgtggatcgagagcaggaccacaacgagtgcaacaagcagcgcagccgtcataaatccaaggatcgctactgtgaaaaggatggagaagtgatatcaaaaaaacggaatgaggctggggagtggaacagggatgtttacatccgccaatgagttttgcccgtttgtgtttttttttttttttttttgaagtcttgtataactaacagcatccccaaaacaaagtctttggggtctacactgcaatcatatgtgatctgtcttgtaatattttgtattattgctgttgcttgaatagcaatagcatggatagagtattgagatactttttcttttgtaagtgctacataaattggcctggtatggctgcagtcctccggttgcatactggactcttcaaaaactgttttgggtagctgccacttgaacaaaatctgttgccacccaggtgatgttagtgttttaagaaatgtagttgatgtatccaacaagccagaatcagcacagataaaaagtggaatttcttgtttctccagatttttaatacgttaatacgcaggcatctgatttgcatattcattcatggaccactgtttcttgcttgtacctctggctgactaaatttggggacagattcagtcttgccttacacaaaggggatcataaagttagaatctattttctatgtactagtactgtgtactgtatagacagtttgtaaatgttatttctgcaaacaaacaccttcttattatatatataatatatatatatatcagtttgatcacactattttagagtcttaatgccaagtcagcagatttgctttatgaattacagggactagaaatgcccacattcaggaaatttgtaataacattgtctagacacctatcctcattctagtagaaagtgtgtacatactgtaaatatgtgtgattgcttgacttgaaaaggtttgaattctgaatgttataccatccttgtaagtaagtttgtaatttccaccataaattatggtaaatataaaactccagaggttgttctactccatacagttcacactgattgtgacacattcttagtagctagtgtctgttctagtcactgcactggagtctacgagccggaactcgctatatgcacgtgtgtgtgtccgtatgtaagaaagtgtgcaccgagtgactgaatggttgagatgaattggaatgctgaagactaacgaagaaactagagactgatatcgagcattctgcccacctcgctctgtatttaattaattgtgctatatgttgctttaacaacccattgagcagtcagggaatgtgagtaagcttgctgccaaaggtaactaggaaagcattcatctgctgcctccttgtttttgctcctagagagtgaaaatacaggcaattttactgtgagtgtttcactggaaatgtacaatctttgtgtgttagagtatttgttttagtaagaaatgtttacacagcttgtggaattatttcgtgggaaaataaatttttataacttctcccacttcaatttctaaccttgcctattgttcctgttgtttgtttacctcccagttacctaccattcctccccaccaccgactccagcaggttcactgtctgtcagaacccagaagtgcttcttataaccaaagtttctgttcttcagaagaaatcagggcaaaatggggtgacttgaagtgaataaaatgttaagaatattatcctacataagacatgtacacagaaggggaaccttgaagacattatctccatgcctcaattacactgctgtaagaagcttacaatgtcatcatgtttaaggctaagaccttttccgtgtctcaagtgtatattttgtccagttataactggatggtaagacagtattaagagtgcaagtacctggcacttgaagtttgtcccaggaaaatgcctgtgtataattacctaacttcagatctgcacattaacttatttaacaaaataaatcagccgggcgcagtggctcatgcctgtaatcccagcaatttgggaggctgaggagggtggatcacctgaggtcaggagttcaagaccagcctggccaacgtggcgaaaccccgtctctactaaaaagataaaaaattagccaggtgtggtggtgcacacctgtaatcccagctacttgggaggctgaggcaggagaattgcttgaacccaggaggtggagcctgcagtaagccaagatcacaccactgtactccagcctgggtgacagagtgagactccatctccaaaaaag

SEQ ID NO: 113124 - DNA, 597 bp, Homo sapiens
  Payload ID: 2126
  Gene Symbol: CACNB2
  Gene Name: calcium channel, voltage-dependent, beta 2 subunit
  ENST ID: ENST00000612743
  CDS Start-End: 97-591
ctagcatgcttgacagacgccttatagctcctcaaactaaatacattattcctgggggttcggcagactcctacactagccgtccatccgattccgatgtatctctggaggaggaccgggaggcagtgcgctcctatccgttctgcttcccaagctgaagaagaacctagtgtggaaccagtcaagaaatcccagcaccgctcttcctcctcagccccacaccacaaccatcgcagtgggacaagtcgcggcctctccaggcaagagacatttgactcggaaacccaggagagtcgagactctgcctacgtagagccaaaggaagattattcccatgaccacgtggaccactatgcctcacaccgtgaccacaaccacagagacgagacccacgggagcagtgaccacagacacagggagtcccggcaccgttcccgggacgtggatcgagagcaggaccacaacgagtgcaacaagcagcgcagccgtcataaatccaaggatcgctactgtgaaaaggatggagaagtgatatcaaaaaaacggaatgaggctggggagtggaacagggatgtttacatccgccaatgagttttg

SEQ ID NO: 113125 - DNA, 4385 bp, Homo sapiens
  Payload ID: 2126
  Gene Symbol: CACNB2
  Gene Name: calcium channel, voltage-dependent, beta 2 subunit
  ENST ID: ENST00000617363
  CDS Start-End: 502-2247
cagcagcgtgctaagaagcagtcacataaacagcagcaggagtaggcctcctgcttttcaaaagcagagtactgcagggtcgcgaaatgcaagacactcagatgtttgaaaatctcccgagttgagaatggctactgtaaaagcgtcaccaagaaactctgacgatctggacagtcctaactctgtgttagcaatacttacttccggaaaattaatgctacttcttgtagatttttgcaaataggaaacccccttgaagaagatctcaaattacgccccccacccccaaaaaaagacaaacaggggagaacaaagttttggcatgcctgcaggaacggtggcttttttagaaactacctaggaggcagaagctaagtgatttgctcatgcctcttacctgggagtagaaggtgggaagaaatggaccgaggctgtgacgagaagacaaggcacagtgcagcttggtgaagccacacgctgactgcgttctgccccctcttcatgcagtgctgcgggctggtgcatcgccggcgagtacgggtgtcctatggttcggcagactcctacactagccgtccatccgattccgatgtatctctggaggaggaccgggaggcagtgcgcagagaagcggagcggcaggcccaggcacagttggaaaaagcaaagacaaagcccgttgcatttgcggttcggacaaatgtcagctacagtgcggcccatgaagatgatgttccagtgcctggcatggccatctcattcgaagcaaaagattttctgcatgttaaggaaaaatttaacaatgactggtggatagggcgattggtaaaagaaggctgtgaaatcggattcattccaagcccagtcaaactagaaaacatgaggctgcagcatgaacagagagccaagcaagggaaattctactccagtaaatcaggaggaaattcatcatccagtttgggtgacatagtacctagttccagaaaatcaacacctccatcatctggtgcaaaatctgcagatgaacaagaccagtggaaaactgcaggcttgttttggcggtttactacagagcacactcctccgtatgatgtggtaccttccatgcgaccagtggtcctagtgggcccttctctgaagggctacgaggtcacagatatgatgcaaaaagcgctgtttgattttttaaaacacagatttgaagggcggatatccatcacaagggtcaccgctgacatctcgcttgccaaacgctcggtattaaacaatcccagtaagcacgcaataatagaaagatccaacacaaggtcaagcttagcggaagttcagagtgaaatcgaaaggatttttgaacttgcaagaacattgcagttggtggtccttgacgcggatacaattaatcatccagctcaactcagtaaaacctccttggcccctattatagtatatgtaaagatttcttctcctaaggttttacaaaggttaataaaatctcgagggaaatctcaagctaaacacctcaacgtccagatggtagcagctgataaactggctcagtgtcctccagagctgttcgatgtgatcttggatgagaaccagcttgaggatgcctgtgagcaccttgccgactatctggaggcctactggaaggccacccatcctcccagcagtagcctccccaaccctctccttagccgtacattagccacttcaagtctgcctcttagccccaccctagcctctaattcacagggttctcaaggtgatcagaggactgatcgctccgctcctatccgttctgcttcccaagctgaagaagaacctagtgtggaaccagtcaagaaatcccagcaccgctcttcctcctcagccccacaccacaaccatcgcagtgggacaagtcgcggcctctccaggcaagagacatttgactcggaaacccaggagagtcgagactctgcctacgtagagccaaaggaagattattcccatgaccacgtggaccactatgcctcacaccgtgaccacaaccacagagacgagacccacgggagcagtgaccacagacacagggagtcccggcaccgttcccgggacgtggatcgagagcaggaccacaacgagtgcaacaagcagcgcagccgtcataaatccaaggatcgctactgtgaaaaggatggagaagtgatatcaaaaaaacggaatgaggctggggagtggaacagggatgtttacatccgccaatgagttttgcccgtttgtgtttttttttttttttttttgaagtcttgtataactaacagcatccccaaaacaaagtctttggggtctacactgcaatcatatgtgatctgtcttgtaatattttgtattattgctgttgcttgaatagcaatagcatggatagagtattgagatactttttcttttgtaagtgctacataaattggcctggtatggctgcagtcctccggttgcatactggactcttcaaaaactgttttgggtagctgccacttgaacaaaatctgttgccacccaggtgatgttagtgttttaagaaatgtagttgatgtatccaacaagccagaatcagcacagataaaaagtggaatttcttgtttctccagatttttaatacgttaatacgcaggcatctgatttgcatattcattcatggaccactgtttcttgcttgtacctctggctgactaaatttggggacagattcagtcttgccttacacaaaggggatcataaagttagaatctattttctatgtactagtactgtgtactgtatagacagtttgtaaatgttatttctgcaaacaaacaccttcttattatatatataatatatatatatatcagtttgatcacactattttagagtcttaatgccaagtcagcagatttgctttatgaattacagggactagaaatgcccacattcaggaaatttgtaataacattgtctagacacctatcctcattctagtagaaagtgtgtacatactgtaaatatgtgtgattgcttgacttgaaaaggtttgaattctgaatgttataccatccttgtaagtaagtttgtaatttccaccataaattatggtaaatataaaactccagaggttgttctactccatacagttcacactgattgtgacacattcttagtagctagtgtctgttctagtcactgcactggagtctacgagccggaactcgctatatgcacgtgtgtgtgtccgtatgtaagaaagtgtgcaccgagtgactgaatggttgagatgaattggaatgctgaagactaacgaagaaactagagactgatatcgagcattctgcccacctcgctctgtatttaattaattgtgctatatgttgctttaacaacccattgagcagtcagggaatgtgagtaagcttgctgccaaaggtaactaggaaagcattcatctgctgcctccttgtttttgctcctagagagtgaaaatacaggcaattttactgtgagtgtttcactggaaatgtacaatctttgtgtgttagagtatttgttttagtaagaaatgtttacacagcttgtggaattatttcgtgggaaaataaatttttataacttctcccacttcaatttctaaccttgcctattgttcctgttgtttgtttacctcccagttacctaccattcctccccaccaccgactccagcaggttcactgtctgtcagaacccagaagtgcttcttataaccaaagtttctgttcttcagaagaaatcagggcaaaatggggtgacttgaagtgaataaaatgttaagaatattatcctacataagacatgtacacagaaggggaaccttgaagacattatctccatgcctcaattacactgctgtaagaagcttacaatgtcatcatgtttaaggctaagaccttttccgtgtctcaagtgtatattttgtccagttataactggatggtaagacagtattaagagtgcaagtacctggcacttgaagtttgtcccaggaaaatgcctgtgtataattacctaacttcagatctgcacattaacttatttaacaaaataaatcagccgggcgcagtggctcatgcctgtaatcccagcaatttgggaggctgaggagggtggatcacctgaggtcaggagttcaagaccagcctggccaacgtggcgaaaccccgtctctactaaaaagataaaaaattagccaggtgtggtggtgcacacctgtaatcccagctacttgggaggctgaggcaggagaattgcttgaacccaggaggtggagcctgcagtaagccaagatcacaccactgtactccagcctgggtgacagagtgagactccatctcc

SEQ ID NO: 113126 - DNA, 3707 bp, Homo sapiens
  Payload ID: 2126
  Gene Symbol: CACNB2
  Gene Name: calcium channel, voltage-dependent, beta 2 subunit
  ENST ID: ENST00000615785
  CDS Start-End: 502-1569
cagcagcgtgctaagaagcagtcacataaacagcagcaggagtaggcctcctgcttttcaaaagcagagtactgcagggtcgcgaaatgcaagacactcagatgtttgaaaatctcccgagttgagaatggctactgtaaaagcgtcaccaagaaactctgacgatctggacagtcctaactctgtgttagcaatacttacttccggaaaattaatgctacttcttgtagatttttgcaaataggaaacccccttgaagaagatctcaaattacgccccccacccccaaaaaaagacaaacaggggagaacaaagttttggcatgcctgcaggaacggtggcttttttagaaactacctaggaggcagaagctaagtgatttgctcatgcctcttacctgggagtagaaggtgggaagaaatggaccgaggctgtgacgagaagacaaggcacagtgcagcttggtgaagccacacgctgactgcgttctgccccctcttcatgcagtgctgcgggctggtgcatcgccggcgagtacgggtgtcctatggttcggcagactcctacactagccgtccatccgattccgatgtatctctggaggaggaccgggaggcagtgcgcagagaagcggagcggcaggcccaggcacagttggaaaaagcaaagacaaagcccgttgcatttgcggttcggacaaatgtcagctacagtgcggcccatgaagatgatgttccagtgcctggcatggccatctcattcgaagcaaaagattttctgcatgttaaggaagttttacaaaggttaataaaatctcgagggaaatctcaagctaaacacctcaacgtccagatggtagcagctgataaactggctcagtgtcctccagagctgttcgatgtgatcttggatgagaaccagcttgaggatgcctgtgagcaccttgccgactatctggaggcctactggaaggccacccatcctcccagcagtagcctccccaaccctctccttagccgtacattagccacttcaagtctgcctcttagccccaccctagcctctaattcacagggttctcaaggtgatcagaggactgatcgctccgctcctatccgttctgcttcccaagctgaagaagaacctagtgtggaaccagtcaagaaatcccagcaccgctcttcctcctcagccccacaccacaaccatcgcagtgggacaagtcgcggcctctccaggcaagagacatttgactcggaaacccaggagagtcgagactctgcctacgtagagccaaaggaagattattcccatgaccacgtggaccactatgcctcacaccgtgaccacaaccacagagacgagacccacgggagcagtgaccacagacacagggagtcccggcaccgttcccgggacgtggatcgagagcaggaccacaacgagtgcaacaagcagcgcagccgtcataaatccaaggatcgctactgtgaaaaggatggagaagtgatatcaaaaaaacggaatgaggctggggagtggaacagggatgtttacatccgccaatgagttttgcccgtttgtgtttttttttttttttttttgaagtcttgtataactaacagcatccccaaaacaaagtctttggggtctacactgcaatcatatgtgatctgtcttgtaatattttgtattattgctgttgcttgaatagcaatagcatggatagagtattgagatactttttcttttgtaagtgctacataaattggcctggtatggctgcagtcctccggttgcatactggactcttcaaaaactgttttgggtagctgccacttgaacaaaatctgttgccacccaggtgatgttagtgttttaagaaatgtagttgatgtatccaacaagccagaatcagcacagataaaaagtggaatttcttgtttctccagatttttaatacgttaatacgcaggcatctgatttgcatattcattcatggaccactgtttcttgcttgtacctctggctgactaaatttggggacagattcagtcttgccttacacaaaggggatcataaagttagaatctattttctatgtactagtactgtgtactgtatagacagtttgtaaatgttatttctgcaaacaaacaccttcttattatatatataatatatatatatatcagtttgatcacactattttagagtcttaatgccaagtcagcagatttgctttatgaattacagggactagaaatgcccacattcaggaaatttgtaataacattgtctagacacctatcctcattctagtagaaagtgtgtacatactgtaaatatgtgtgattgcttgacttgaaaaggtttgaattctgaatgttataccatccttgtaagtaagtttgtaatttccaccataaattatggtaaatataaaactccagaggttgttctactccatacagttcacactgattgtgacacattcttagtagctagtgtctgttctagtcactgcactggagtctacgagccggaactcgctatatgcacgtgtgtgtgtccgtatgtaagaaagtgtgcaccgagtgactgaatggttgagatgaattggaatgctgaagactaacgaagaaactagagactgatatcgagcattctgcccacctcgctctgtatttaattaattgtgctatatgttgctttaacaacccattgagcagtcagggaatgtgagtaagcttgctgccaaaggtaactaggaaagcattcatctgctgcctccttgtttttgctcctagagagtgaaaatacaggcaattttactgtgagtgtttcactggaaatgtacaatctttgtgtgttagagtatttgttttagtaagaaatgtttacacagcttgtggaattatttcgtgggaaaataaatttttataacttctcccacttcaatttctaaccttgcctattgttcctgttgtttgtttacctcccagttacctaccattcctccccaccaccgactccagcaggttcactgtctgtcagaacccagaagtgcttcttataaccaaagtttctgttcttcagaagaaatcagggcaaaatggggtgacttgaagtgaataaaatgttaagaatattatcctacataagacatgtacacagaaggggaaccttgaagacattatctccatgcctcaattacactgctgtaagaagcttacaatgtcatcatgtttaaggctaagaccttttccgtgtctcaagtgtatattttgtccagttataactggatggtaagacagtattaagagtgcaagtacctggcacttgaagtttgtcccaggaaaatgcctgtgtataattacctaacttcagatctgcacattaacttatttaacaaaataaatcagccgggcgcagtggctcatgcctgtaatcccagcaatttgggaggctgaggagggtggatcacctgaggtcaggagttcaagaccagcctggccaacgtggcgaaaccccgtctctactaaaaagataaaaaattagccaggtgtggtggtgcacacctgtaatcccagctacttgggaggctgaggcaggagaattgcttgaacccaggaggtggagcctgcagtaagccaagatcacaccactgtactccagcctgggtgacagagtgagactccatctcc

SEQ ID NO: 113127 - DNA, 3825 bp, Homo sapiens
  Payload ID: 2126
  Gene Symbol: CACNB2
  Gene Name: calcium channel, voltage-dependent, beta 2 subunit
  ENST ID: ENST00000612134
  CDS Start-End: 1-531
atgcttgacagacgccttatagctcctcaaactaaatacattattcctgggggttcggcagactcctacactagccgtccatccgattccgatgtatctctggaggaggaccgggaggcagtgcgcagagaagcggagcggcaggcccaggcacagttggaaaaagcaaagacaaagcccgttgcatttgcggttcggacaaatgtcagctacagtgcggcccatgaagatgatgttccagtgcctggcatggccatctcattcgaagcaaaagattttctgcatgttaaggaaaaatttaacaatgactggtggatagggcgattggtaaaagaaggctgtgaaatcggattcattccaagcccagtcaaactagaaaacatgaggctgcagcatgaacagagagccaagcaagggaaattctactccagtaaatcaggaggaaattcatcatccagtttgggtgacatagtacctagttccagaaaatcaacacctccatcatctgacagagcacactcctccgtatgatgtggtaccttccatgcgaccagtggtcctagtgggcccttctctgaagggctacgaggtcacagatatgatgcaaaaagcgctgtttgattttttaaaacacagatttgaagggcggatatccatcacaagggtcaccgctgacatctcgcttgccaaacgctcggtattaaacaatcccagtaagcacgcaataatagaaagatccaacacaaggtcaagcttagcggaagttcagagtgaaatcgaaaggatttttgaacttgcaagaacattgcagttggtggtccttgacgcggatacaattaatcatccagctcaactcagtaaaacctccttggcccctattatagtatatgtaaagatttcttctcctaaggttttacaaaggttaataaaatctcgagggaaatctcaagctaaacacctcaacgtccagatggtagcagctgataaactggctcagtgtcctccagagctgttcgatgtgatcttggatgagaaccagcttgaggatgcctgtgagcaccttgccgactatctggaggcctactggaaggccacccatcctcccagcagtagcctccccaaccctctccttagccgtacattagccacttcaagtctgcctcttagccccaccctagcctctaattcacagggttctcaaggtgatcagaggactgatcgctccgctcctatccgttctgcttcccaagctgaagaagaacctagtgtggaaccagtcaagaaatcccagcaccgctcttcctcctcagccccacaccacaaccatcgcagtgggacaagtcgcggcctctccaggcaagagacatttgactcggaaacccaggagagtcgagactctgcctacgtagagccaaaggaagattattcccatgaccacgtggaccactatgcctcacaccgtgaccacaaccacagagacgagacccacgggagcagtgaccacagacacagggagtcccggcaccgttcccgggacgtggatcgagagcaggaccacaacgagtgcaacaagcagcgcagccgtcataaatccaaggatcgctactgtgaaaaggatggagaagtgatatcaaaaaaacggaatgaggctggggagtggaacagggatgtttacatccgccaatgagttttgcccgtttgtgtttttttttttttttttttgaagtcttgtataactaacagcatccccaaaacaaagtctttggggtctacactgcaatcatatgtgatctgtcttgtaatattttgtattattgctgttgcttgaatagcaatagcatggatagagtattgagatactttttcttttgtaagtgctacataaattggcctggtatggctgcagtcctccggttgcatactggactcttcaaaaactgttttgggtagctgccacttgaacaaaatctgttgccacccaggtgatgttagtgttttaagaaatgtagttgatgtatccaacaagccagaatcagcacagataaaaagtggaatttcttgtttctccagatttttaatacgttaatacgcaggcatctgatttgcatattcattcatggaccactgtttcttgcttgtacctctggctgactaaatttggggacagattcagtcttgccttacacaaaggggatcataaagttagaatctattttctatgtactagtactgtgtactgtatagacagtttgtaaatgttatttctgcaaacaaacaccttcttattatatatataatatatatatatatcagtttgatcacactattttagagtcttaatgccaagtcagcagatttgctttatgaattacagggactagaaatgcccacattcaggaaatttgtaataacattgtctagacacctatcctcattctagtagaaagtgtgtacatactgtaaatatgtgtgattgcttgacttgaaaaggtttgaattctgaatgttataccatccttgtaagtaagtttgtaatttccaccataaattatggtaaatataaaactccagaggttgttctactccatacagttcacactgattgtgacacattcttagtagctagtgtctgttctagtcactgcactggagtctacgagccggaactcgctatatgcacgtgtgtgtgtccgtatgtaagaaagtgtgcaccgagtgactgaatggttgagatgaattggaatgctgaagactaacgaagaaactagagactgatatcgagcattctgcccacctcgctctgtatttaattaattgtgctatatgttgctttaacaacccattgagcagtcagggaatgtgagtaagcttgctgccaaaggtaactaggaaagcattcatctgctgcctccttgtttttgctcctagagagtgaaaatacaggcaattttactgtgagtgtttcactggaaatgtacaatctttgtgtgttagagtatttgttttagtaagaaatgtttacacagcttgtggaattatttcgtgggaaaataaatttttataacttctcccacttcaatttctaaccttgcctattgttcctgttgtttgtttacctcccagttacctaccattcctccccaccaccgactccagcaggttcactgtctgtcagaacccagaagtgcttcttataaccaaagtttctgttcttcagaagaaatcagggcaaaatggggtgacttgaagtgaataaaatgttaagaatattatcctacataagacatgtacacagaaggggaaccttgaagacattatctccatgcctcaattacactgctgtaagaagcttacaatgtcatcatgtttaaggctaagaccttttccgtgtctcaagtgtatattttgtccagttataactggatggtaagacagtattaagagtgcaagtacctggcacttgaagtttgtcccaggaaaatgcctgtgtataattacctaacttcagatctgcacattaacttatttaacaaaataaatcagccgggcgcagtggctcatgcctgtaatcccagcaatttgggaggctgaggagggtggatcacctgaggtcaggagttcaagaccagcctggccaacgtggcgaaaccccgtctctactaaaaagataaaaaattagccaggtgtggtggtgcacacctgtaatcccagctacttgggaggctgaggcaggagaattgcttgaacccaggaggtggagcctgcagtaagccaagatcacaccactgtactccagcctgggtgacagagtgagactccatctcc

SEQ ID NO: 113128 - DNA, 2696 bp, Homo sapiens
  Payload ID: 2127
  Gene Symbol: CACNB3
  Gene Name: calcium channel, voltage-dependent, beta 3 subunit
  Uniprot ID: P54284
  ENST ID: ENST00000301050
  CDS Start-End: 200-1654
gtggggggagcggtgatctgagctccgagcagctggtcttcgcggctcgctccctccttcgcgctctctcgctccctgccgccgcccgcagggctgcggggctcggtggcatctcccgggcgcggcccgcagtccttgcccctgcctccgggccgctcccgcccccggcgccgctcgctcccccgacccggactcccccatgtatgacgactcctacgtgcccgggtttgaggactcggaggcgggttcagccgactcctacaccagccgcccatctctggactcagacgtctccctggaggaggaccgggagagtgcccggcgtgaagtagagagccaggctcagcagcagctcgaaagggccaagcacaaacctgtggcatttgcggtgaggaccaatgtcagctactgtggcgtactggatgaggagtgcccagtccagggctctggagtcaactttgaggccaaagattttctgcacattaaagagaagtacagcaatgactggtggatcgggcggctagtgaaagagggcggggacatcgccttcatccccagcccccagcgcctggagagcatccggctcaaacaggagcagaaggccaggagatctgggaacccttccagcctgagtgacattggcaaccgacgctcccctccgccatctctagccaagcagaagcaaaagcaggcggaacatgttcccccatatgacgtggtgccctccatgcggcctgtggtgctggtgggaccctctctgaaaggttatgaggtcacagacatgatgcagaaggctctcttcgacttcctcaaacacagatttgatggcaggatctccatcacccgagtcacagccgacctctccctggcaaagcgatctgtgctcaacaatccgggcaagaggaccatcattgagcgctcctctgcccgctccagcattgcggaagtgcagagtgagatcgagcgcatatttgagctggccaaatccctgcagctagtagtgttggacgctgacaccatcaaccacccagcacagctggccaagacctcgctggcccccatcatcgtctttgtcaaagtgtcctcaccaaaggtactccagcgtctcattcgctcccgggggaagtcacagatgaagcacctgaccgtacagatgatggcatatgataagctggttcagtgcccaccggagtcatttgatgtgattctggatgagaaccagctggaggatgcctgtgagcacctggctgagtacctggaggtttactggcgggccacgcaccacccagcccctggccccggacttctgggtcctcccagtgccatccccggacttcagaaccagcagctgctgggggagcgtggcgaggagcactccccccttgagcgggacagcttgatgccctctgatgaggccagcgagagctcccgccaagcctggacaggatcttcacagcgtagctcccgccacctggaggaggactatgcagatgcctaccaggacctgtaccagcctcaccgccaacacacctcggggctgcctagtgctaacgggcatgacccccaagaccggcttctagcccaggactcagagcacaaccacagtgaccggaactggcagcgcaaccggccttggcccaaggatagctactgacagcctcctgctgccctaccctggcaggcacaggcgcagctggctggggggcccactccaggcagggtggcgttagactggcatcaggctggcactaggctcagcccccaaaaccccctgcccagccccagcttcagggctgcctgtggtcccaaggttctgggagaaacaggggaccccctcacctcctgggcagtgacccctactaggctcccattccaggtactagctgtgtgttctgcacccctggcaccttcctctcctcccacacaggaagctgccccactgggcagtgccctcaggccaggatccccttagcagggtccttcccaccagactcagggaagggatgccccattaaagtgacaaaagggtggggtgtgggcaccatggcatgaggaagaaacaaggtccctgagcaggcacaagtcctgacagtcaagggactgctttggcatccagggcctccagtcacctcactgccatacattagaaatgagacaatcaaagcccccccagggtggcacacccatctgtttgctggggtgtggcagccacatccaagactggagcagcaggctggccacgctcgggccagagagagctcacagctgaagctcttggagggaagggctctcctcaccctgccaggaagcttcttaacatgtgacaggaccagggaccaggagcatggtgaagccaagtggcagatgggagccaacctggatgggggtttggggaaggagggcatgtgtagcagagaacttaggggggcctccttgcctttctcattcttttgccctgcatcctgtcatttctgttcttgtccctcatacatctttggagaaccgggctccagactttgttccctgactcatagctgccgcttgttaggttagggttagatggggagagacagggcacagaggacctgtctccccggctactcttgccttatggctctagtgtgtgacctacagagcatgctccacaagcccctgcctcacctcactgtcatcactaataaacatcatgcacagtc

SEQ ID NO: 113129 - DNA, 1872 bp, Homo sapiens
  Payload ID: 2127
  Gene Symbol: CACNB3
  Gene Name: calcium channel, voltage-dependent, beta 3 subunit
  Uniprot ID: P54284
  ENST ID: ENST00000536187
  CDS Start-End: 101-1552
aggcgtgcaggcgggagcagcgtgcagagcagcggccgggttttgctcccgcctcggagcccctggcccgggggagggggagaggccgctagcctggtctatgtctttttctgactccagtgcaaccttcctgctgaacgagggttcagccgactcctacaccagccgcccatctctggactcagacgtctccctggaggaggaccgggagagtgcccggcgtgaagtagagagccaggctcagcagcagctcgaaagggccaagcacaaacctgtggcatttgcggtgaggaccaatgtcagctactgtggcgtactggatgaggagtgcccagtccagggctctggagtcaactttgaggccaaagattttctgcacattaaagagaagtacagcaatgactggtggatcgggcggctagtgaaagagggcggggacatcgccttcatccccagcccccagcgcctggagagcatccggctcaaacaggagcagaaggccaggagatctgggaacccttccagcctgagtgacattggcaaccgacgctcccctccgccatctctagccaagcagaagcaaaagcaggcggaacatgttcccccatatgacgtggtgccctccatgcggcctgtggtgctggtgggaccctctctgaaaggttatgaggtcacagacatgatgcagaaggctctcttcgacttcctcaaacacagatttgatggcaggatctccatcacccgagtcacagccgacctctccctggcaaagcgatctgtgctcaacaatccgggcaagaggaccatcattgagcgctcctctgcccgctccagcattgcggaagtgcagagtgagatcgagcgcatatttgagctggccaaatccctgcagctagtagtgttggacgctgacaccatcaaccacccagcacagctggccaagacctcgctggcccccatcatcgtctttgtcaaagtgtcctcaccaaaggtactccagcgtctcattcgctcccgggggaagtcacagatgaagcacctgaccgtacagatgatggcatatgataagctggttcagtgcccaccggagtcatttgatgtgattctggatgagaaccagctggaggatgcctgtgagcacctggctgagtacctggaggtttactggcgggccacgcaccacccagcccctggccccggacttctgggtcctcccagtgccatccccggacttcagaaccagcagctgctgggggagcgtggcgaggagcactccccccttgagcgggacagcttgatgccctctgatgaggccagcgagagctcccgccaagcctggacaggatcttcacagcgtagctcccgccacctggaggaggactatgcagatgcctaccaggacctgtaccagcctcaccgccaacacacctcggggctgcctagtgctaacgggcatgacccccaagaccggcttctagcccaggactcagagcacaaccacagtgaccggaactggcagcgcaaccggccttggcccaaggatagctactgacagcctcctgctgccctaccctggcaggcacaggcgcagctggctggggggcccactccaggcagggtggcgttagactggcatcaggctggcactaggctcagcccccaaaaccccctgcccagccccagcttcagggctgcctgtggtcccaaggttctgggagaaacaggggaccccctcacctcctgggcagtgacccctactaggctcccattccaggtactagctgtgtgttctgcacccctggcaccttcctctcctcccacacaggaagctgccccactgggcagtgccctcaggccaggatccccttagca

SEQ ID NO: 113130 - DNA, 1814 bp, Homo sapiens
  Payload ID: 2127
  Gene Symbol: CACNB3
  Gene Name: calcium channel, voltage-dependent, beta 3 subunit
  Uniprot ID: P54284
  ENST ID: ENST00000540990
  CDS Start-End: 98-1513
actgacccgaggagcggtcccgcgactctgtactccctgctgcccagtcccggccaggacgctgcccggcttagctggggcgcccctcgagaccaggatggagggttcagccgactcctacaccagccgcccatctctggactcagacgtctccctggaggaggaccgggagagtgcccggcgtgaagtagagagccaggctcagcagcagctcgaaagggccaagcacaaacctgtggcatttgcggtgaggaccaatgtcagctactgtggcgtactggatgaggagtgcccagtccagggctctggagtcaactttgaggccaaagattttctgcacattaaagagaagtacagcaatgactggtggatcgggcggctagtgaaagagggcggggacatcgccttcatccccagcccccagcgcctggagagcatccggctcaaacaggagcagaaggccaggagatctgggaacccttccagcctgagtgacattggcaaccgacgctcccctccgccatctctagccaagcagaagcaaaagcaggcggaacatgttcccccatatgacgtggtgccctccatgcggcctgtggtgctggtgggaccctctctgaaaggttatgaggtcacagacatgatgcagaaggctctcttcgacttcctcaaacacagatttgatggcaggatctccatcacccgagtcacagccgacctctccctggcaaagcgatctgtgctcaacaatccgggcaagaggaccatcattgagcgctcctctgcccgctccagcattgcggaagtgcagagtgagatcgagcgcatatttgagctggccaaatccctgcagctagtagtgttggacgctgacaccatcaaccacccagcacagctggccaagacctcgctggcccccatcatcgtctttgtcaaagtgtcctcaccaaaggtactccagcgtctcattcgctcccgggggaagtcacagatgaagcacctgaccgtacagatgatggcatatgataagctggttcagtgcccaccggagtcatttgatgtgattctggatgagaaccagctggaggatgcctgtgagcacctggctgagtacctggaggtttactggcgggccacgcaccacccagcccctggccccggacttctgggtcctcccagtgccatccccggacttcagaaccagcagctgctgggggagcgtggcgaggagcactccccccttgagcgggacagcttgatgccctctgatgaggccagcgagagctcccgccaagcctggacaggatcttcacagcgtagctcccgccacctggaggaggactatgcagatgcctaccaggacctgtaccagcctcaccgccaacacacctcggggctgcctagtgctaacgggcatgacccccaagaccggcttctagcccaggactcagagcacaaccacagtgaccggaactggcagcgcaaccggccttggcccaaggatagctactgacagcctcctgctgccctaccctggcaggcacaggcgcagctggctggggggcccactccaggcagggtggcgttagactggcatcaggctggcactaggctcagcccccaaaaccccctgcccagccccagcttcagggctgcctgtggtcccaaggttctgggagaaacaggggaccccctcacctcctgggcagtgacccctactaggctcccattccaggtactagctgtgtgttctgcacccctggcaccttcctctcctcccacacaggaagctgccccactgggcagtgccctca

SEQ ID NO: 113131 - DNA, 2237 bp, Homo sapiens
  Payload ID: 2127
  Gene Symbol: CACNB3
  Gene Name: calcium channel, voltage-dependent, beta 3 subunit
  ENST ID: ENST00000547392
  CDS Start-End: 427-1800
tccccgccgccacggccccgtaggtgctcggggacccaccttccacctagcacgggttcgttcccctctcccggcctggcccgggctccccggtggccgccgccccctcgccgcccccgccttctcccggggagggggtcaggtgggcgggcactattgttgtaggagccggcgccagattcctcagccgcgctcggggtgggaccggctgggtttgggggggtggggtggggggagcggtgatctgagctccgagcagctggtcttcgcggctcgctccctccttcgcgctctctcgctccctgccgccgcccgcagggctgcggggctcggtggcatctcccgggcgcggcccgcagtccttgcccctgcctccgggccgctcccgcccccggcgccgctcgctcccccgacccggactcccccatgtatgacgactcctacgtgcccgggtttgaggactcggaggcgggttcagccgactcctacaccagccgcccatctctggactcagacgtctccctggaggaggaccgggagagtgcccggcgtgaagtagagagccaggctcagcagcagctcgaaagggccaagcacaaacctgtggcatttgcggtgaggaccaatgtcagctactgtggcgtactggatgaggagtgcccagtccagggctctggagtcaactttgaggccaaagattttctgcacattaaagagaagtacagcaatgactggtggatcgggcggctagtgaaagagggcggggacatcgccttcatccccagcccccagcgcctggagagcatccggctcaaacaggagcagaaggccaggagatctgggaacccttccagcctgagtgacattggcaaccgacgctcccctccgccatctctagccaagcagaagcaaaagcaggtcacagacatgatgcagaaggctctcttcgacttcctcaaacacagatttgatggcaggatctccatcacccgagtcacagccgacctctccctggcaaagcgatctgtgctcaacaatccgggcaagaggaccatcattgagcgctcctctgcccgctccagcattgcggaagtgcagagtgagatcgagcgcatatttgagctggccaaatccctgcagctagtagtgttggacgctgacaccatcaaccacccagcacagctggccaagacctcgctggcccccatcatcgtctttgtcaaagtgtcctcaccaaaggtactccagcgtctcattcgctcccgggggaagtcacagatgaagcacctgaccgtacagatgatggcatatgataagctggttcagtgcccaccggagtcatttgatgtgattctggatgagaaccagctggaggatgcctgtgagcacctggctgagtacctggaggtttactggcgggccacgcaccacccagcccctggccccggacttctgggtcctcccagtgccatccccggacttcagaaccagcagctgctgggggagcgtggcgaggagcactccccccttgagcgggacagcttgatgccctctgatgaggccagcgagagctcccgccaagcctggacaggatcttcacagcgtagctcccgccacctggaggaggactatgcagatgcctaccaggacctgtaccagcctcaccgccaacacacctcggggctgcctagtgctaacgggcatgacccccaagaccggcttctagcccaggactcagagcacaaccacagtgaccggaactggcagcgcaaccggccttggcccaaggatagctactgacagcctcctgctgccctaccctggcaggcacaggcgcagctggctggggggcccactccaggcagggtggcgttagactggcatcaggctggcactaggctcagcccccaaaaccccctgcccagccccagcttcagggctgcctgtggtcccaaggttctgggagaaacaggggaccccctcacctcctgggcagtgacccctactaggctcccattccaggtactagctgtgtgttctgcacccctggcaccttcctctcctcccacacaggaagctgccccactgggcagtgccctcaggccaggatccccttagcagggtccttcccaccagactcagggaagggatgccccattaaagtgacaaaagggtggggtgtgggcaccatggcatgaggaagaaacaaggtccctgagcaggcacaagtcctgaca

SEQ ID NO: 113132 - DNA, 581 bp, Homo sapiens
  Payload ID: 2127
  Gene Symbol: CACNB3
  Gene Name: calcium channel, voltage-dependent, beta 3 subunit
  ENST ID: ENST00000548874
  CDS Start-End: 97-414
gtgcaggcgggagcagcgtgcagagcagcggccgggttttgctcccgcctcggagcccctggcccgggggagggggagaggccgctagcctggtctatgtctttttctgactccagtgcaaccttcctgctgaacgagggttcagccgactcctacaccagccgcccatctctggactcagacgtctccctggaggaggaccgggagagtgcccggcgtgaagtagagagccaggctcagcagcagctcgaaagggccaagcacaaacctgtggcatttgcggtgaggaccaatgtcagctactgtggcgtactggatgaggagtgcccagtccagggctctggagtcaactttgaggccaaagattttctgcacattaaagaggagatctgggaacccttccagcctgagtgacattggcaaccgacgctcccctccgccatctctaggcggaacatgttcccccatatgacgtggtgccctccatgcggcctgtggtgctggtgggaccctctctgaaaggttatgaggtcacagacatgatgcagaaggctctcttcgacttcctcaaacacagattt

SEQ ID NO: 113133 - DNA, 424 bp, Homo sapiens
  Payload ID: 2127
  Gene Symbol: CACNB3
  Gene Name: calcium channel, voltage-dependent, beta 3 subunit
  ENST ID: ENST00000550190
  CDS Start-End: 1-255
cagcagctcgaaagggccaagcacaaacctgtggcatttgcggtgaggaccaatgtcagctactgtggcgtactggatgaggagtgcccagtccagggctctggagtcaactttgaggccaaagattttctgcacattaaagagaacttaggggggcctccttgcctttctcattcttttgccctgcatcctgtcatttctgttcttgtccctcatacatctttggagaaccgggctccagactttgttccctgactcatagctgccgcttgttaggttagggttagatggggagagacagggcacagaggacctgtctccccggctactcttgccttatggctctagtgtgtgacctacagagcatgctccacaagcccctgcctcacctcactgtcatcactaataaacatcatgcacagtc

SEQ ID NO: 113134 - DNA, 2825 bp, Homo sapiens
  Payload ID: 2127
  Gene Symbol: CACNB3
  Gene Name: calcium channel, voltage-dependent, beta 3 subunit
  ENST ID: ENST00000551544
  CDS Start-End: 22-135
tcccccgacccggactcccccatgtatgacgactcctacgtgcccgggtttgaggactcggaggcgccccctgctgaggcttcctctgcagcgggcatcctgagctcttgcccagcatggagggcctggaggtgaggccagaggagctgagggcctggggatggagaggaagcgctttgctcagagaaacaggcaaccgataaatatttaattctcctctttgcttttatctcctgacccactgagacaaatcagctcattaagcagtgattcccggagctcagacagcagggagagtgcctggaaagatggggcaagaatgcggagcagcttctcagccccttggagctgacaactttccctcaaatgtcctggttcagccgactcctacaccagccgcccatctctggactcagacgtctccctggaggaggaccgggagagtgcccggcgtgaagtagagagccaggctcagcagcagctcgaaagggccaagcacaaacctgtggcatttgcggtgaggaccaatgtcagctactgtggcgtactggatgaggagtgcccagtccagggctctggagtcaactttgaggccaaagattttctgcacattaaagagaagtacagcaatgactggtggatcgggcggctagtgaaagagggcggggacatcgccttcatccccagcccccagcgcctggagagcatccggctcaaacaggagcagaaggccaggagatctgggaacccttccagcctgagtgacattggcaaccgacgctcccctccgccatctctagccaagcagaagcaaaagcaggcggaacatgttcccccatatgacgtggtgccctccatgcggcctgtggtgctggtgggaccctctctgaaaggttatgaggtcacagacatgatgcagaaggctctcttcgacttcctcaaacacagatttgatggcaggatctccatcacccgagtcacagccgacctctccctggcaaagcgatctgtgctcaacaatccgggcaagaggaccatcattgagcgctcctctgcccgctccagcattgcggaagtgcagagtgagatcgagcgcatatttgagctggccaaatccctgcagctagtagtgttggacgctgacaccatcaaccacccagcacagctggccaagacctcgctggcccccatcatcgtctttgtcaaagtgtcctcaccaaaggtactccagcgtctcattcgctcccgggggaagtcacagatgaagcacctgaccgtacagatgatggcatatgataagctggttcagtgcccaccggagtcatttgatgtgattctggatgagaaccagctggaggatgcctgtgagcacctggctgagtacctggaggtttactggcgggccacgcaccacccagcccctggccccggacttctgggtcctcccagtgccatccccggacttcagaaccagcagctgctgggggagcgtggcgaggagcactccccccttgagcgggacagcttgatgccctctgatgaggccagcgagagctcccgccaagcctggacaggatcttcacagcgtagctcccgccacctggaggaggactatgcagatgcctaccaggacctgtaccagcctcaccgccaacacacctcggggctgcctagtgctaacgggcatgacccccaagaccggcttctagcccaggactcagagcacaaccacagtgaccggaactggcagcgcaaccggccttggcccaaggatagctactgacagcctcctgctgccctaccctggcaggcacaggcgcagctggctggggggcccactccaggcagggtggcgttagactggcatcaggctggcactaggctcagcccccaaaaccccctgcccagccccagcttcagggctgcctgtggtcccaaggttctgggagaaacaggggaccccctcacctcctgggcagtgacccctactaggctcccattccaggtactagctgtgtgttctgcacccctggcaccttcctctcctcccacacaggaagctgccccactgggcagtgccctcaggccaggatccccttagcagggtccttcccaccagactcagggaagggatgccccattaaagtgacaaaagggtggggtgtgggcaccatggcatgaggaagaaacaaggtccctgagcaggcacaagtcctgacagtcaagggactgctttggcatccagggcctccagtcacctcactgccatacattagaaatgagacaatcaaagcccccccagggtggcacacccatctgtttgctggggtgtggcagccacatccaagactggagcagcaggctggccacgctcgggccagagagagctcacagctgaagctcttggagggaagggctctcctcaccctgccaggaagcttcttaacatgtgacaggaccagggaccaggagcatggtgaagccaagtggcagatgggagccaacctggatgggggtttggggaaggagggcatgtgtagcagagaacttaggggggcctccttgcctttctcattcttttgccctgcatcctgtcatttctgttcttgtccctcatacatctttggagaaccgggctccagactttgttccctgactcatagctgccgcttgttaggttagggttagatggggagagacagggcacagaggacctgtctccccggctactcttgccttatggctctagtgtgtgacctacagagcatgctccacaagcccctgcctcacctcactgtcatcactaataaacatcatgcacagtc

SEQ ID NO: 113135 - DNA, 746 bp, Homo sapiens
  Payload ID: 2127
  Gene Symbol: CACNB3
  Gene Name: calcium channel, voltage-dependent, beta 3 subunit
  ENST ID: ENST00000550064
  CDS Start-End: 582-746
cggatgccttggcactgtctggcacaatccttggcagggaagtggggaagggaacccccatcctggcaggactaagacaaaatctatccgtgcaacagggttcagccgactcctacaccagccgcccatctctggactcagacgtctccctggaggaggaccgggagagtgcccggcgtgaagtagagagccaggctcagcagcagctcgaaagggccaagcacaaacctgtggcatttgcggtgaggaccaatgtcagctactgtggcgtactggatgaggagtgcccagtccagggctctggagtcaactttgaggccaaagattttctgcacattaaagagaagtacagcaatgactggtggatcgggcggctagtgaaagagggcggggacatcgccttcatccccagcccccagcgcctggagagcatccggctcaaacaggagcagaaggccaggagatctgggaacccttccagcctgagtgacattggcaaccgacgctcccctccgccatctctagccaagcagaagcaaaagcaggcggaacatgttcccccatatgacgtggtgccctccatgcggcctgtggtgctggtgggaccctctctgaaaggttatgaggtcacagacatgatgcagaaggctctcttcgacttcctcaaacacagatttgatggcaggatctccatcacccgagtcacagccgacctctccctggcaaagcgatctgtgctcaacaat

SEQ ID NO: 113136 - DNA, 730 bp, Homo sapiens
  Payload ID: 2127
  Gene Symbol: CACNB3
  Gene Name: calcium channel, voltage-dependent, beta 3 subunit
  ENST ID: ENST00000550483
  CDS Start-End: 1-229
caaagattttctgcacattaaagagaagtacagcaatgactggtggatcgggcggctagtgaaagagggcggggacatcgccttcatccccagcccccagcgcctggagagcatccggctcaaacaggagcagaaggccaggagatctgggaacccttccagcctgagtgacattggcaaccgacgctcccctccgccatctctaggcggaacatgttcccccatatgacgtggtgccctccatgcggcctgtggtgctggtgggaccctctctgaaaggttatgaggtcacagacatgatgcagaaggctctcttcgacttcctcaaacacagatttgatggcaggatctccatcacccgagtcacagccgacctctccctggcaaagcgatctgtgctcaacaatccgggcaagaggaccatcattgagcgctcctctgcccgctccagcattggcttcgatgaatgcccttttcctccaattccttcctgtccaccattcgggagccctcaaagcctgctggagtgagcagtgggcagagctcctggtgagcactgctgctgcctccctccatagcggaagtgcagagtgagatcgagcgcatatttgagctggccaaatccctgcagctagtagtgttggacgctgacaccatcaaccacccagcacagctggccaagacctcgctggcccccatcatcgtctttgtcaaagtgtcctcaccaaag

SEQ ID NO: 113137 - DNA, 904 bp, Homo sapiens
  Payload ID: 2127
  Gene Symbol: CACNB3
  Gene Name: calcium channel, voltage-dependent, beta 3 subunit
  ENST ID: ENST00000547818
  CDS Start-End: 539-904
gcagcctctcctccccttcctccccgccgccacggccccgtaggtgctcggggacccaccttccacctagcacggggttcagccgactcctacaccagccgcccatctctggactcagacgtctccctggaggaggaccgggagagtgcccggcgtgaagtagagagccaggctcagcagcagctcgaaagggccaagcacaaacctgtggcatttgcggtgaggaccaatgtcagctactgtggcgtactggatgaggagtgcccagtccagggctctggagtcaactttgaggccaaagattttctgcacattaaagagaagtacagcaatgactggtggatcgggcggctagtgaaagagggcggggacatcgccttcatccccagcccccagcgcctggagagcatccggctcaaacaggagcagaaggccaggagatctgggaacccttccagcctgagtgacattggcaaccgacgctcccctccgccatctctaggcggaacatgttcccccatatgacgtggtgccctccatgcggcctgtggtgctggtgggaccctctctgaaaggttatgaggtcacagacatgatgcagaaggctctcttcgacttcctcaaacacagatttgatggcaggatctccatcacccgagtcacagccgacctctccctggcaaagcgatctgtgctcaacaatccgggcaagaggaccatcattgagcgctcctctgcccgctccagcattgcggaagtgcagagtgagatcgagcgcatatttgagctggccaaatccctgcagctagtagtgttggacgctgacaccatcaaccacccagcacagctggccaagacctcgctggcccccatcatcgtctttgtcaaagtgtcctcaccaaag

SEQ ID NO: 113138 - DNA, 2395 bp, Homo sapiens
  Payload ID: 2127
  Gene Symbol: CACNB3
  Gene Name: calcium channel, voltage-dependent, beta 3 subunit
  Uniprot ID: P54284
  ENST ID: ENST00000547230
  CDS Start-End: 22-1353
tcccccgacccggactcccccatgtatgacgactcctacgtgcccgggtttgaggactcggaggcgggttcagccgactcctacaccagccgcccatctctggactcagacgtctccctggaggaggaccgggagagtgcccggcgtgaagtagagagccaggctcagcagcagctcgaaagggccaagaagtacagcaatgactggtggatcgggcggctagtgaaagagggcggggacatcgccttcatccccagcccccagcgcctggagagcatccggctcaaacaggagcagaaggccaggagatctgggaacccttccagcctgagtgacattggcaaccgacgctcccctccgccatctctagccaagcagaagcaaaagcaggcggaacatgttcccccatatgacgtggtgccctccatgcggcctgtggtgctggtgggaccctctctgaaaggttatgaggtcacagacatgatgcagaaggctctcttcgacttcctcaaacacagatttgatggcaggatctccatcacccgagtcacagccgacctctccctggcaaagcgatctgtgctcaacaatccgggcaagaggaccatcattgagcgctcctctgcccgctccagcattgcggaagtgcagagtgagatcgagcgcatatttgagctggccaaatccctgcagctagtagtgttggacgctgacaccatcaaccacccagcacagctggccaagacctcgctggcccccatcatcgtctttgtcaaagtgtcctcaccaaaggtactccagcgtctcattcgctcccgggggaagtcacagatgaagcacctgaccgtacagatgatggcatatgataagctggttcagtgcccaccggagtcatttgatgtgattctggatgagaaccagctggaggatgcctgtgagcacctggctgagtacctggaggtttactggcgggccacgcaccacccagcccctggccccggacttctgggtcctcccagtgccatccccggacttcagaaccagcagctgctgggggagcgtggcgaggagcactccccccttgagcgggacagcttgatgccctctgatgaggccagcgagagctcccgccaagcctggacaggatcttcacagcgtagctcccgccacctggaggaggactatgcagatgcctaccaggacctgtaccagcctcaccgccaacacacctcggggctgcctagtgctaacgggcatgacccccaagaccggcttctagcccaggactcagagcacaaccacagtgaccggaactggcagcgcaaccggccttggcccaaggatagctactgacagcctcctgctgccctaccctggcaggcacaggcgcagctggctggggggcccactccaggcagggtggcgttagactggcatcaggctggcactaggctcagcccccaaaaccccctgcccagccccagcttcagggctgcctgtggtcccaaggttctgggagaaacaggggaccccctcacctcctgggcagtgacccctactaggctcccattccaggtactagctgtgtgttctgcacccctggcaccttcctctcctcccacacaggaagctgccccactgggcagtgccctcaggccaggatccccttagcagggtccttcccaccagactcagggaagggatgccccattaaagtgacaaaagggtggggtgtgggcaccatggcatgaggaagaaacaaggtccctgagcaggcacaagtcctgacagtcaagggactgctttggcatccagggcctccagtcacctcactgccatacattagaaatgagacaatcaaagcccccccagggtggcacacccatctgtttgctggggtgtggcagccacatccaagactggagcagcaggctggccacgctcgggccagagagagctcacagctgaagctcttggagggaagggctctcctcaccctgccaggaagcttcttaacatgtgacaggaccagggaccaggagcatggtgaagccaagtggcagatgggagccaacctggatgggggtttggggaaggagggcatgtgtagcagagaacttaggggggcctccttgcctttctcattcttttgccctgcatcctgtcatttctgttcttgtccctcatacatctttggagaaccgggctccagactttgttccctgactcatagctgccgcttgttaggttagggttagatggggagagacagggcacagaggacctgtctccccggctactcttgccttatggctctagtgtgtgacctacagagcatgctccacaagcccctgcctcacctcactgtcatcactaataaacatcatgcacagtc

SEQ ID NO: 113139 - DNA, 754 bp, Homo sapiens
  Payload ID: 2127
  Gene Symbol: CACNB3
  Gene Name: calcium channel, voltage-dependent, beta 3 subunit
  ENST ID: ENST00000550391
  CDS Start-End: 117-572
agaaaggggcgggaggggtactgacccgaggagcggtcccgcgactctgtactccctgctgcccagtcccggccaggacgctgcccggcttagctggggcgcccctcgagaccaggatggagggttcagccgactcctacaccagccgcccatctctggactcagacgtctccctggaggaggaccgggagagtgcccggcgtgaagtagagagccaggctcagcagcagctcgaaagggccaagcacaaacctgtggcatttgcggtgaggaccaatgtcagctactgtggcgtactggatgaggagtgcccagtccagggctctggagtcaactttgaggccaaagattttctgcacattaaagagaagtacagcaatgactggtggatcgggcggctagtgaaagagggcggggacatcgccttcatccccagcccccagcgcctggagagcatccggctcaaacaggagcagaaggccaggagatctgggaacccttccagcctgagtgacattggcaaccgacgctcccctccgccatctctaggcggaacatgttcccccatatgacgtggtgccctccatgcggcctgtggtgctggtgggaccctctctgaaaggttatgaggtcacagacatgatgcagaaggctctcttcgacttcctcaaacacagatttgatggcaggatctccatcacccgagtcacagccgacctctccctggcaaagcgatctgtgctcaacaatccgg

SEQ ID NO: 113140 - DNA, 576 bp, Homo sapiens
  Payload ID: 2127
  Gene Symbol: CACNB3
  Gene Name: calcium channel, voltage-dependent, beta 3 subunit
  ENST ID: ENST00000548279
  CDS Start-End: 144-576
cttcgcgctctctcgctccctgccgccgcccgcagggctgcggggctcggtggcatctcccgggcgcggcccgcagtccttgcccctgcctccgggccgctcccgcccccggcgccgctcgctcccccgacccggactcccccatgtatgacgactcctacgtgcccgggtttgaggactcggaggcgggttcagccgactcctacaccagccgcccatctctggactcagacgtctccctggaggaggaccgggagagtgcccggcgtgaagtagagagccaggctcagcagcagctcgaaagggccaagcacaaacctgtggcatttgcggtgaggaccaatgtcagctactgtggcgtactggatgaggagtgcccagtccagggctctggagtcaactttgaggccaaagattttctgcacattaaagagtacagcaatgactggtggatcgggcggctagtgaaagagggcggggacatcgccttcatccccagcccccagcgcctggagagcatccggctcaaacaggagcagaaggccaggagatctgggaacccttccagcctgagtg

SEQ ID NO: 113141 - DNA, 1394 bp, Homo sapiens
  Payload ID: 2128
  Gene Symbol: CACNB4
  Gene Name: calcium channel, voltage-dependent, beta 4 subunit
  Uniprot ID: O00305
  ENST ID: ENST00000201943
  CDS Start-End: 13-1389
cggctctgaacgatgtcctcctcctcctacgccaagaacgggaccgcggacgggccgcactcccccacctcgcaggtggcccgaggcaccacaacccggaggagcaggttgaaaagatccgatggcagcaccacttcgaccagcttcatcctcagacagggttcagcggattcctacacaagcaggccgtctgactccgatgtctctttggaagaggaccgggaagcaattcgacaggagagagaacagcaagcagctatccagcttgagagagcaaagtccaaacctgtagcatttgccgtgaagacaaatgtgagctactgcggcgccctggacgaggatgtgcctgttccaagcacagctatctcctttgatgctaaagactttctacatattaaagagaaatataacaatgattggtggataggaaggctggtgaaagagggctgtgaaattggcttcattccaagtccactcagattggagaacatacggatccagcaagaacaaaaaagaggacgttttcacggagggaaatcaagtggaaattcttcttcaagtcttggagaaatggtatctgggacattccgagcaactcccacatcaacagcaaaacagaagcaaaaagtgacggagcacattcctccttacgatgttgtaccgtcaatgcgtccggtggtgttagtggggccgtcactgaaaggttacgaggtaacagacatgatgcagaaagccctctttgatttcctgaagcacaggtttgatgggaggatttcaataacgagagtgacagctgacatttctcttgctaagaggtctgtcctaaataatcccagcaagagagcaataattgaacgttcgaacacccggtccagcttagcggaagtacaaagtgaaattgaaagaatctttgagttggcaagatctttgcaactggttgttcttgatgcagacaccatcaatcacccagcacaacttataaagacttccttagcaccaattattgttcatgtaaaagtctcatctccaaaggttttacagcggttgattaaatctagaggaaagtcacaaagtaaacacttgaatgttcaactggtggcagctgataaacttgcacaatgccccccaagtcagcgaatgaggcacagcaaccactccacagagaactctccaattgaaagacgaagtctaatgacctctgatgaaaattatcacaatgaaagggctcggaagagtaggaaccgcttgtcttccagttctcagcatagccgagatcattaccctcttgtggaagaagattaccctgactcataccaggacacttacaaaccccataggaaccgaggatcacctgggggatatagccatgactcccgacataggctttgagtcta

SEQ ID NO: 113142 - DNA, 1816 bp, Homo sapiens
  Payload ID: 2128
  Gene Symbol: CACNB4
  Gene Name: calcium channel, voltage-dependent, beta 4 subunit
  ENST ID: ENST00000360283
  CDS Start-End: 223-846
ctgtattgggaaggcagataaaatgccaggtctggactgcctctggggataacctcaccctgtgggatgtgaatgaatagcatcttgcctggtaaatccacaggaattgataaggcaggcgcagttctcccaaacaggccttttctctttaagctgtagctgtggtttctgcagcaattttgtttttgccttgaaagaggtgctctggattatcacacctccatgtatgacaatttgtacctgcatggaattgaagactcggaggctggttcagcggattcctacacaagcaggccgtctgactccgatgtctctttggaagaggaccgggaagcaattcgacaggagagagaacagcaagcagctatccagcttgagagagcaaagtccaaacctgtagcatttgccgtgaagacaaatgtgagctactgcggcgccctggacgaggatgtgcctgttccaagcacagctatctcctttgatgctaaagactttctacatattaaagagaaatataacaatgattggtggataggaaggctggtgaaagagggctgtgaaattggcttcattccaagtccactcagattggagaacatacggatccagcaagaacaaaaaagaggacgttttcacggagggaaatcaagtggaaattcttcttcaagtcttggagaaatggtatctgggacattccgagcaactcccacatcaacagcaaaacagaagcaaaaagtgacggagcacattcctccttacgatgttgtaccgtcaatgcgtccggtggtgttagtggggccgtcactgaaaggttacgaggatttcaataacgagagtgacagctgacatttctcttgctaagaggtctgtcctaaataatcccagcaagagagcaataattgaacgttcgaacacccggtccagcttagcggaagtacaaagtgaaattgaaagaatctttgagttggcaagatctttgcaactggttgttcttgatgcagacaccatcaatcacccagcacaacttataaagacttccttagcaccaattattgttcatgtaaaagtctcatctccaaaggttttacagcggttgattaaatctagaggaaagtcacaaagtaaacacttgaatgttcaactggtggcagctgataaacttgcacaatgccccccagaaatgtttgatgttatattggatgaaaatcagcttgaggatgcatgtgaacatctaggggagtacctggaggcgtactggcgtgccacccacacaaccagtagcacacccatgaccccgctgctgggaaggaatttgggctccacggcactctcaccatatcccacagcaatttctgggttacagagtcagcgaatgaggcacagcaaccactccacagagaactctccaattgaaagacgaagtctaatgacctctgatgaaaattatcacaatgaaagggctcggaagagtaggaaccgcttgtcttccagttctcagcatagccgagatcattaccctcttgtggaagaagattaccctgactcataccaggacacttacaaaccccataggaaccgaggatcacctgggggatatagccatgactcccgacataggctttgagtctaatgaaacaaaaaatattcatctgttgacaatttgccatagcagtgctaggataaaccaatcatcttaacttggctaacatagcacagtatttactgtgctaatgggctgctgtcattttatgctaagtaaggggcaaaaaaaaaaattacattatgcccttgagtctagatggatattagatgcccg

SEQ ID NO: 113143 - DNA, 2283 bp, Homo sapiens
  Payload ID: 2128
  Gene Symbol: CACNB4
  Gene Name: calcium channel, voltage-dependent, beta 4 subunit
  ENST ID: ENST00000397327
  CDS Start-End: 427-1848
gtgctctgtattgggaaggcagataaaatgccaggtctggactgcctctggggataacctcaccctgtgggatgtgaatgaatagcatcttgcctggtaaatccacaggaattgataaggcaggcgcagttctcccaaacaggccttttctctttaagctgtagctgtggtttctgcagcaattttgtttttgccttgaaagaggtgctctggattatcacacctccatgtatgacaatttgtacctgcatggaattgaagactcggaggctgaagaataatgtgatgtgttacccaagatggtgtgaacagagcttcaagccaatggagaagactaggcctaaatagctgacctggtgaagtgacacataaagccacacctggagtgccacctcctcagcagtctttctcagtgccaatgcatttatggctggttcagcggattcctacacaagcaggccgtctgactccgatgtctctttggaagaggaccgggaagcaattcgacaggagagagaacagcaagcagctatccagcttgagagagcaaagtccaaacctgtagcatttgccgtgaagacaaatgtgagctactgcggcgccctggacgaggatgtgcctgttccaagcacagctatctcctttgatgctaaagactttctacatattaaagagaaatataacaatgattggtggataggaaggctggtgaaagagggctgtgaaattggcttcattccaagtccactcagattggagaacatacggatccagcaagaacaaaaaagaggacgttttcacggagggaaatcaagtggaaattcttcttcaagtcttggagaaatggtatctgggacattccgagcaactcccacatcaacagcaaaacagaagcaaaaagtgacggagcacattcctccttacgatgttgtaccgtcaatgcgtccggtggtgttagtggggccgtcactgaaaggttacgaggtaacagacatgatgcagaaagccctctttgatttcctgaagcacaggtttgatgggaggatttcaataacgagagtgacagctgacatttctcttgctaagaggtctgtcctaaataatcccagcaagagagcaataattgaacgttcgaacacccggtccagcttagcggaagtacaaagtgaaattgaaagaatctttgagttggcaagatctttgcaactggttgttcttgatgcagacaccatcaatcacccagcacaacttataaagacttccttagcaccaattattgttcatgtaaaagtctcatctccaaaggttttacagcggttgattaaatctagaggaaagtcacaaagtaaacacttgaatgttcaactggtggcagctgataaacttgcacaatgccccccagaaatgtttgatgttatattggatgaaaatcagcttgaggatgcatgtgaacatctaggggagtacctggaggcgtactggcgtgccacccacacaaccagtagcacacccatgaccccgctgctgggaaggaatttgggctccacggcactctcaccatatcccacagcaatttctgggttacagagtcagcgaatgaggcacagcaaccactccacagagaactctccaattgaaagacgaagtctaatgacctctgatgaaaattatcacaatgaaagggctcggaagagtaggaaccgcttgtcttccagttctcagcatagccgagatcattaccctcttgtggaagaagattaccctgactcataccaggacacttacaaaccccataggaaccgaggatcacctgggggatatagccatgactcccgacataggctttgagtctaatgaaacaaaaaatattcatctgttgacaatttgccatagcagtgctaggataaaccaatcatcttaacttggctaacatagcacagtatttactgtgctaatgggctgctgtcattttatgctaagtaaggggcaaaaaaaaaaattacattatgcccttgagtctagatggatattagatgcccgatcatatagatatttttaagtgcaacatttacatgataacagtacattttgttttcttcatagatttagacacatcaatttgtaatttagggtacttacaaggcacatataaaataatttcccatgctggaaattccaaatgaccagttccagttggaaccaatttataaaccaattcctgttggaatttgggtgaattgactagaaagtctacttgagcatgttgtaatcaactgaaaaatc

SEQ ID NO: 113144 - DNA, 2053 bp, Homo sapiens
  Payload ID: 2128
  Gene Symbol: CACNB4
  Gene Name: calcium channel, voltage-dependent, beta 4 subunit
  ENST ID: ENST00000439467
  CDS Start-End: 1-1548
gctgcggtcctcaccggcttctctctggcccccgtgtgtcgagtccaggtggcccgaggcaccacaacccggaggagcaggttgaaaagatccgatggcagcaccacttcgaccagcttcatcctcagacagggttcagcggattcctacacaagcaggccgtctgactccgatgtctctttggaagaggaccgggaagcaattcgacaggagagagaacagcaagcagctatccagcttgagagagcaaagtccaaacctgtagcatttgccgtgaagacaaatgtgagctactgcggcgccctggacgaggatgtgcctgttccaagcacagctatctcctttgatgctaaagactttctacatattaaagagaaatataacaatgattggtggataggaaggctggtgaaagagggctgtgaaattggcttcattccaagtccactcagattggagaacatacggatccagcaagaacaaaaaagaggacgttttcacggagggaaatcaagtggaaattcttcttcaagtcttggagaaatggtatctgggacattccgagcaactcccacatcaacagcaaaacagaagcaaaaagtgacggagcacattcctccttacgatgttgtaccgtcaatgcgtccggtggtgttagtggggccgtcactgaaaggttacgaggtaacagacatgatgcagaaagccctctttgatttcctgaagcacaggtttgatgggaggatttcaataacgagagtgacagctgacatttctcttgctaagaggtctgtcctaaataatcccagcaagagagcaataattgaacgttcgaacacccggtccagcttagcggaagtacaaagtgaaattgaaagaatctttgagttggcaagatctttgcaactggttgttcttgatgcagacaccatcaatcacccagcacaacttataaagacttccttagcaccaattattgttcatgtaaaagtctcatctccaaaggttttacagcggttgattaaatctagaggaaagtcacaaagtaaacacttgaatgttcaactggtggcagctgataaacttgcacaatgccccccagaaatgtttgatgttatattggatgaaaatcagcttgaggatgcatgtgaacatctaggggagtacctggaggcgtactggcgtgccacccacacaaccagtagcacacccatgaccccgctgctgggaaggaatttgggctccacggcactctcaccatatcccacagcaatttctgggttacagagtcagcgaatgaggcacagcaaccactccacagagaactctccaattgaaagacgaagtctaatgacctctgatgaaaattatcacaatgaaagggctcggaagagtaggaaccgcttgtcttccagttctcagcatagccgagatcattaccctcttgtggaagaagattaccctgactcataccaggacacttacaaaccccataggaaccgaggatcacctgggggatatagccatgactcccgacataggctttgagtctaatgaaacaaaaaatattcatctgttgacaatttgccatagcagtgctaggataaaccaatcatcttaacttggctaacatagcacagtatttactgtgctaatgggctgctgtcattttatgctaagtaaggggcaaaaaaaaaaattacattatgcccttgagtctagatggatattagatgcccgatcatatagatatttttaagtgcaacatttacatgataacagtacattttgttttcttcatagatttagacacatcaatttgtaatttagggtacttacaaggcacatataaaataatttcccatgctggaaattccaaatgaccagttccagttggaaccaatttataaaccaattcctgttggaatttgggtgaattgactagaaagtctacttgagcatgttgtaatcaactgaaaaatctggggggaaaaaaaaaaaactaataagaaaatcgaaataccaatagaagccaaatccagctttggtattt

SEQ ID NO: 113145 - DNA, 583 bp, Homo sapiens
  Payload ID: 2128
  Gene Symbol: CACNB4
  Gene Name: calcium channel, voltage-dependent, beta 4 subunit
  ENST ID: ENST00000434468
  CDS Start-End: 258-583
agtagttgatggcgggtagtgctaggtactgcagtgctgtactcctggtgactcagtggtggccagcaggctgagatcctccgggctgtgcacatctgtggaggaagaataatgtgatgtgttacccaagatggtgtgaacagagcttcaagccaatggagaagactaggcctaaatagctgacctggtgaagtgacacataaagccacacctggagtgccacctcctcagcagtctttctcagtgccaatgcatttatggctggttcagcggattcctacacaagcaggccgtctgactccgatgtctctttggaagaggaccgggaagcaattcgacaggagagagaacagcaagcagctatccagcttgagagagcaaagtccaaacctgtagcatttgccgtgaagacaaatgtgagctactgcggcgccctggacgaggatgtgcctgttccaagcacagctatctcctttgatgctaaagactttctacatattaaagagaaatataacaatgattggtggataggaaggctggtgaaagagggctgtgaaattggcttcattccaagtccactcag

SEQ ID NO: 113146 - DNA, 1886 bp, Homo sapiens
  Payload ID: 2128
  Gene Symbol: CACNB4
  Gene Name: calcium channel, voltage-dependent, beta 4 subunit
  Uniprot ID: O00305
  ENST ID: ENST00000427385
  CDS Start-End: 73-1581
ccgctccggagcccgcagcctcccccagcggatgccggggactcggaccccgcaccctgagagtctttgttaatggatgtggtggcccgaggcaccacaacccggaggagcaggttgaaaagatccgatggcagcaccacttcgaccagcttcatcctcagacagggttcagcggattcctacacaagcaggccgtctgactccgatgtctctttggaagaggaccgggaagcaattcgacaggagagagaacagcaagcagctatccagcttgagagagcaaagtccaaacctgtagcatttgccgtgaagacaaatgtgagctactgcggcgccctggacgaggatgtgcctgttccaagcacagctatctcctttgatgctaaagactttctacatattaaagagaaatataacaatgattggtggataggaaggctggtgaaagagggctgtgaaattggcttcattccaagtccactcagattggagaacatacggatccagcaagaacaaaaaagaggacgttttcacggagggaaatcaagtggaaattcttcttcaagtcttggagaaatggtatctgggacattccgagcaactcccacatcaacagcaaaacagaagcaaaaagtgacggagcacattcctccttacgatgttgtaccgtcaatgcgtccggtggtgttagtggggccgtcactgaaaggttacgaggtaacagacatgatgcagaaagccctctttgatttcctgaagcacaggtttgatgggaggatttcaataacgagagtgacagctgacatttctcttgctaagaggtctgtcctaaataatcccagcaagagagcaataattgaacgttcgaacacccggtccagcttagcggaagtacaaagtgaaattgaaagaatctttgagttggcaagatctttgcaactggttgttcttgatgcagacaccatcaatcacccagcacaacttataaagacttccttagcaccaattattgttcatgtaaaagtctcatctccaaaggttttacagcggttgattaaatctagaggaaagtcacaaagtaaacacttgaatgttcaactggtggcagctgataaacttgcacaatgccccccagaaatgtttgatgttatattggatgaaaatcagcttgaggatgcatgtgaacatctaggggagtacctggaggcgtactggcgtgccacccacacaaccagtagcacacccatgaccccgctgctgggaaggaatttgggctccacggcactctcaccatatcccacagcaatttctgggttacagagtcagcgaatgaggcacagcaaccactccacagagaactctccaattgaaagacgaagtctaatgacctctgatgaaaattatcacaatgaaagggctcggaagagtaggaaccgcttgtcttccagttctcagcatagccgagatcattaccctcttgtggaagaagattaccctgactcataccaggacacttacaaaccccataggaaccgaggatcacctgggggatatagccatgactcccgacataggctttgagtctaatgaaacaaaaaatattcatctgttgacaatttgccatagcagtgctaggataaaccaatcatcttaacttggctaacatagcacagtatttactgtgctaatgggctgctgtcattttatgctaagtaaggggcaaaaaaaaaaattacattatgcccttgagtctagatggatattagatgcccgatcatatagatatttttaagtgcaacatttacatgataacagtacattttgttttcttcatagatttagacacatcaatttgtaatttagggtacttacaaggcacatataaa

SEQ ID NO: 113147 - DNA, 7974 bp, Homo sapiens
  Payload ID: 2128
  Gene Symbol: CACNB4
  Gene Name: calcium channel, voltage-dependent, beta 4 subunit
  Uniprot ID: O00305
  ENST ID: ENST00000539935
  CDS Start-End: 69-1631
agcccagcctcgggggccagccccctccgcccaccgcacacgggctggccatgcggcggctctgaacgatgtcctcctcctcctacgccaagaacgggaccgcggacgggccgcactcccccacctcgcaggtggcccgaggcaccacaacccggaggagcaggttgaaaagatccgatggcagcaccacttcgaccagcttcatcctcagacagggttcagcggattcctacacaagcaggccgtctgactccgatgtctctttggaagaggaccgggaagcaattcgacaggagagagaacagcaagcagctatccagcttgagagagcaaagtccaaacctgtagcatttgccgtgaagacaaatgtgagctactgcggcgccctggacgaggatgtgcctgttccaagcacagctatctcctttgatgctaaagactttctacatattaaagagaaatataacaatgattggtggataggaaggctggtgaaagagggctgtgaaattggcttcattccaagtccactcagattggagaacatacggatccagcaagaacaaaaaagaggacgttttcacggagggaaatcaagtggaaattcttcttcaagtcttggagaaatggtatctgggacattccgagcaactcccacatcaacagcaaaacagaagcaaaaagtgacggagcacattcctccttacgatgttgtaccgtcaatgcgtccggtggtgttagtggggccgtcactgaaaggttacgaggtaacagacatgatgcagaaagccctctttgatttcctgaagcacaggtttgatgggaggatttcaataacgagagtgacagctgacatttctcttgctaagaggtctgtcctaaataatcccagcaagagagcaataattgaacgttcgaacacccggtccagcttagcggaagtacaaagtgaaattgaaagaatctttgagttggcaagatctttgcaactggttgttcttgatgcagacaccatcaatcacccagcacaacttataaagacttccttagcaccaattattgttcatgtaaaagtctcatctccaaaggttttacagcggttgattaaatctagaggaaagtcacaaagtaaacacttgaatgttcaactggtggcagctgataaacttgcacaatgccccccagaaatgtttgatgttatattggatgaaaatcagcttgaggatgcatgtgaacatctaggggagtacctggaggcgtactggcgtgccacccacacaaccagtagcacacccatgaccccgctgctgggaaggaatttgggctccacggcactctcaccatatcccacagcaatttctgggttacagagtcagcgaatgaggcacagcaaccactccacagagaactctccaattgaaagacgaagtctaatgacctctgatgaaaattatcacaatgaaagggctcggaagagtaggaaccgcttgtcttccagttctcagcatagccgagatcattaccctcttgtggaagaagattaccctgactcataccaggacacttacaaaccccataggaaccgaggatcacctgggggatatagccatgactcccgacataggctttgagtctaatgaaacaaaaaatattcatctgttgacaatttgccatagcagtgctaggataaaccaatcatcttaacttggctaacatagcacagtatttactgtgctaatgggctgctgtcattttatgctaagtaaggggcaaaaaaaaaaattacattatgcccttgagtctagatggatattagatgcccgatcatatagatatttttaagtgcaacatttacatgataacagtacattttgttttcttcatagatttagacacatcaatttgtaatttagggtacttacaaggcacatataaaataatttcccatgctggaaattccaaatgaccagttccagttggaaccaatttataaaccaattcctgttggaatttgggtgaattgactagaaagtctacttgagcatgttgtaatcaactgaaaaatctggggggaaaaaaaaaaaactaataagaaaatcgaaataccaatagaagccaaatccagctttggtatttatttgctggaagctaaatttacacttaaagttggagtgtataaacattttaatatatgttaatgttgccagaatgacttttcagacttaccaaatgtattgatagtgccaaaaaaaaaatctcagaaatcttaatgcagaaattatatagtctcctcagattttaatatttttatttctttcctggcacagctgttgtattcaaagtgttttgctttttgtttggtcagtactgttagctcatttgaagttggcaaaaacaaatacaaacaagcaaaaaacctcaaatttttttcagcagtgagagagaatagtaaagagaggcccaagcatagctggttatgtgaaatataaaatggggtgttgttctccctttaatcaatctgagcacaactacatacatccaggaatctgaagtcagatagtaaggatgtggtaccaatcctcccgagtgcaatgctaaacacttccaggtgggaattcatctatttcacttaacacaaacgcagggtctgtatttcctgccaacaagattgagtatctttccattgcttctctcagtctctgtctttgaatatctgaatgttctggcccttcaacaaattctttaaatcatgctaaggaatttcgttttatgtggacacactcaactttgatattcaggagatgtttttacaaaatgactaattgaaaaaagttgaaacaaatgattttaaaagcttgcagtaaaaaataaactcatagattcagcaaatatttgttgactaaaattatagcatttttaatgcagaaaattataaagaatttggagattgagctgccttatttctaatgaacactcctcttcatcttattaagtcttcacagtttttccagtggctataattatggaattggtgacctatgttttatattatcaaggaagccttagattcactctgatctaagaaattattgaaattgaccctttttacacaaatgtctttaaaaaaaaaaacttatttctaaatgtccatagtgcatgcattttctaaaaccccaataagtccagccataaaagttcttttctgctagtacatgtcatgaagcctatttttgaaaataatgataattaattttatagtatcttcttttctccccaagcctttcagtattcaggcactcaaagcatgcaccagttcagtaatcttcttgaccatggaaataagttccacattactgatgagttatatatatatcttgaaccccattacaacctcaccacatccccctgcatttatgttcagtgtttgtaccccattatgaacctgtttagctgataatgaggatacctataattctgtaagtcatttcaaatatttgatacaattaaaaaatatgggcttagtaaattttaaaagttaacatgtgatactggcttgtgagattcttctgtcatctagtgaagcttataaaactttcagttaagacattttaaaagagttatatccattaggcactttaataaacatataacctgccattactgaatactttgttagaacacagaagagcatcttccagcaaacaaaaatatatttattacatgtacagcacatacttgcatgagaaagaaaacattagccaaaacatttttctatatgctttactggtttcttgtttatgcgcattaaagtatttaattgcaaagagtgcaccaaggtgtacaaatttagactagacagctgttcagctttttctgtagtagcattagcagtttggtcatttaactactttaagatacttacattttatggcaggtagctgtaacagcatttaaatatatttcctagtcatcaagattaccatcttctttcaactttttaaaagtcacttgtttttaaaggtttttcaaagccttgtttttagtcttccatgtcatgccgataaagagagtctcattcaatatctgtgcacaaaaccaatctatcaattaccatcagatgtccatacctgttttgctttgcattcttattcaaaagctgacaatcttggaaagggtataatgtatattttattgatggatatatttaaatgtttactttaatttggaatattctttccccttctttctgtaataagtttatcttcctcaaataaggggatatacatcttattttttttaaagacttaagagtttattgtgtaaatgatacttaaaatctagatatatactaaatgaaaagttttatttttgccaagcacaccaagcacctttgaaaaatacatactccatactttgtttttaattaatttcatttaaagatagcaaatgattataagcaagagaaacaagtcttttactgttttgaggctgttttaacttacagtataagccacatactagaattctgtaatttcagtcacagacatataataatgtggactcatgtgacaatgtggaaatgtagttctggaaaaaaacgaatgcaatttgtcaatcctgatgttaattctcaagggtataatgtcactctaatattataaccaacaacattatcttgtttaatatttaaagcaacacttagaaatgtttataaatgatgattctctcttatctttatacagttctattggagagaaggttgaaattgttcacaatttagatgatggtctttcctaataagagtcttaattttgtgactatataagtcattgcagttagtctttaatgaaatgaattttattaatgtaaaacaaattctgagacaattatttgtttcctttaaataatctgctatttaattattattgtcgttgtttgcaaaatgtatttttggaatgttaacctcttttcatacctgcatacttgaacttgtcttttgtgtgggggccttaaaattcataataggaagtggaggcagtgaaaggaagtaagaaaaggaaattatgctaaaagatggtttgcaaatttaaattctttaaatgaacatatcacaaaatgttgttaagacccaggatgtccgttaagaatgtgtcttggcaaccttaatttgcatgttagtatatattttcttagttacacagttttattttggtatttgcttaaaaaatgtaataccattgtagaaattaccctatgtactgatatatttactacctcttctctagagaagacaatctgtctttaaagggaaaaacactggtcaataagtagtgatcaaaattatcactattctggctaaccttgctgcaaagctaaatacatagattattaaaatatgccttccctttagattttaaactgtttccaaaatgctgtttggcaccctttcatttcttccacgttagtgaagttttctttgaattggttcacagtttatcatgaggcaaggttaatttaacaaataagtcatcatagggaacaaaacaaactgcaagggaattgcctttgtgtgcaacttgttataatatctagttctaagtctaaaggagtaaaagtccaaagactttatgtttaagagcagctggtttgcaaattcacattttgttggtccttgacttccacagagcatgacttagccatttactgggtaaggatatgcataatcttggactcccatgtaattggaataaacttcatatcaatgtttcaaataaatgctatgtaccccttattccttttacatttctgcctttgtcttttatgacaatgttgcatgttgtgtttttttaaattatataaaactcatccttgaatgactgtatgaatgaaaaatttataggaaattatgtaataaaatctgttttattagtttctcatacctttaaatactgtcaatactataactgttagtaagttacttactcaagctgtgtctatggggcagagaacagtcctcttctttaaaataatcatgatcaaaccagtcaagtcaatccaattagctgttagacagacaataaggataaccttctttttgacttaagcagtcaagttagtcaaaatagaaaaattggcttatatgggcacccagaactacagcattcaaaaattacttttaaaagtttcttcttttattaaaatggactttcttaaataaaatacatcctctgatagcagctatctctttttacttgtaatgattaattctaaatgcttcatgtaattgagggacattatgagaagactagaaagtatctcatcagataatcctaagggctgtaacttctacttgccataaacaaagtataattaagagtgagtagcaattggtttggggagtcgtagttatatatgaaactttcttttgtttctcatgatgtatgtaaaatgtttgcagaaggatggtagaaaatgttactaatgaatttagagtggtttgggagaatacactgatacttcctcatttgaaaattataaggagttacaaggggaactaagaaccagaagtggctggcctctagcttttcaatacctgataagtgttcttggttatgttttgaacacttaaatttctcaacaaatggctatgtctatatttatgtaggggccacccttgccctacttgcatgccactttgacttttaactgaaatcagtgtgaattctgtatgcataagggatgtaataaagaggcgggatcattaacgctatatcgttgcatactatttttcatatgccttacaatattttctgggatgttattaaaatgaaagcattttattgccaaaataaatctatgttgttacttataatctgcattagcagtagaaaaataatgtagcaaaaacatattgtacagtacaaaattataaaatatatattttgccaataatataaaaatagattgaggagaaagaagcacatttgttatagcacaaacttataacaaaatccaccgttaaatttggcagtcatattttttaaaagtatgtcgatttagttctaagttttgtcagatttacttcatctaccatctttttaacttgctgcttgatacttttccagcaatttatttcatagccttgcaatctgtggatgtaatttcttttgttttattcccttccataaaatttattaaattttattttgtgataacactcataccatattttctcctcttatttcttctctttcaataacaacagcagaaagtcacagcaagtgagctcatagggctcctctgaattttggacatgtgtgagatttttgtatttttcacagcctcgagtcagaatgatcaataaagatgtcccaaccacaaaaaattatattagttagggattctttaatttgttttgtactgaatactactttgaaacataagttaaagccattagctgtgtttttgtagggatggtgggaaggaataaaaaataaatgtattaacataaaacatactaaaacagaaatatggcaaaatgatgtaaaaagatttttcctactattctgagggctgttgaaatcccaggctattgctatatctccattgacaaagtgggataaaaaatgcctttgtcaaataattttttttctttctttaaattttagttatttattttaataatttgtccccttttatttttcttatctaggtatgtgtagcattctacaaggcatgctgggtaaaatatactatgcaaatgtgtacagtgctgcatgttttgttctccctctgctttagtggctttaaagaaaaaaacgtggtgttatttttgtgaataaaaacattaacaaagaaaatgcagagtgcatgcatagagtatcctcatttctatggatttgttttatggaatttaaatgtgtacaaaacaactgcattactttttttcttttatataataaatgaaaaaaacac

SEQ ID NO: 113148 - DNA, 2181 bp, Homo sapiens
  Payload ID: 2128
  Gene Symbol: CACNB4
  Gene Name: calcium channel, voltage-dependent, beta 4 subunit
  Uniprot ID: O00305
  ENST ID: ENST00000534999
  CDS Start-End: 228-1688
gtgctctgtattgggaaggcagataaaatgccaggtctggactgcctctggggataacctcaccctgtgggatgtgaatgaatagcatcttgcctggtaaatccacaggaattgataaggcaggcgcagttctcccaaacaggccttttctctttaagctgtagctgtggtttctgcagcaattttgtttttgccttgaaagaggtgctctggattatcacacctccatgtatgacaatttgtacctgcatggaattgaagactcggaggctggttcagcggattcctacacaagcaggccgtctgactccgatgtctctttggaagaggaccgggaagcaattcgacaggagagagaacagcaagcagctatccagcttgagagagcaaagtccaaacctgtagcatttgccgtgaagacaaatgtgagctactgcggcgccctggacgaggatgtgcctgttccaagcacagctatctcctttgatgctaaagactttctacatattaaagagaaatataacaatgattggtggataggaaggctggtgaaagagggctgtgaaattggcttcattccaagtccactcagattggagaacatacggatccagcaagaacaaaaaagaggacgttttcacggagggaaatcaagtggaaattcttcttcaagtcttggagaaatggtatctgggacattccgagcaactcccacatcaacagcaaaacagaagcaaaaagtgacggagcacattcctccttacgatgttgtaccgtcaatgcgtccggtggtgttagtggggccgtcactgaaaggttacgaggtaacagacatgatgcagaaagccctctttgatttcctgaagcacaggtttgatgggaggatttcaataacgagagtgacagctgacatttctcttgctaagaggtctgtcctaaataatcccagcaagagagcaataattgaacgttcgaacacccggtccagcttagcggaagtacaaagtgaaattgaaagaatctttgagttggcaagatctttgcaactggttgttcttgatgcagacaccatcaatcacccagcacaacttataaagacttccttagcaccaattattgttcatgtaaaagtctcatctccaaaggttttacagcggttgattaaatctagaggaaagtcacaaagtaaacacttgaatgttcaactggtggcagctgataaacttgcacaatgccccccagaaatgtttgatgttatattggatgaaaatcagcttgaggatgcatgtgaacatctaggggagtacctggaggcgtactggcgtgccacccacacaaccagtagcacacccatgaccccgctgctgggaaggaatttgggctccacggcactctcaccatatcccacagcaatttctgggttacagagtcagcgaatgaggcacagcaaccactccacagagaactctccaattgaaagacgaagtctaatgacctctgatgaaaattatcacaatgaaagggctcggaagagtaggaaccgcttgtcttccagttctcagcatagccgagatcattaccctcttgtggaagaagattaccctgactcataccaggacacttacaaaccccataggaaccgaggatcacctgggggatatagccatgactcccgacataggctttgagtctaatgaaacaaaaaatattcatctgttgacaatttgccatagcagtgctaggataaaccaatcatcttaacttggctaacatagcacagtatttactgtgctaatgggctgctgtcattttatgctaagtaaggggcaaaaaaaaaaattacattatgcccttgagtctagatggatattagatgcccgatcatatagatatttttaagtgcaacatttacatgataacagtacattttgttttcttcatagatttagacacatcaatttgtaatttagggtacttacaaggcacatataaaataatttcccatgctggaaattccaaatgaccagttccagttggaaccaatttataaaccaattcctgttggaatttgggtgaattgactagaaagtctacttgagcatgttgtaatcaactgaaaaatctggggggaaaaaaaaaaaactaataagaaaatcgaaataccaatagaagccaaatcca

SEQ ID NO: 113149 - DNA, 834 bp, Homo sapiens
  Payload ID: 2129
  Gene Symbol: CBARP
  Gene Name: calcium channel, voltage-dependent, beta subunit associated regulatory protein
  ENST ID: ENST00000215376
  CDS Start-End: 87-431
cgcgagcgccacgcagccgcccgccgccagcccgccgcccatgggccgctcgtcccggcgctgagggccctcctccccagttcagaatgcagcccacagccaccatggccacagccgccaccaccaccaccaccaccactgccacagtagccctgacgacgtcgtgggacaatgccactggacgccccacggcagagccagaccccatcctggacaactacgtgctgctggtggtggtgatgtcgctgttcgtggggggcacgctggtggtgttgtctggcgtcctgctcctctgcaagcgctgctgggacgtccaccagcgcctcaacagggccatggaggaagcggagaagaccaccaccacctacctggacaacggcacccacccagcccaaggcgtaggtgggcccaggcgcgtgctgagcgagtgagtgtgtgagcggatggacgagtgtccctcgccccgccagcccggccgcccgtgccgcggccccagccctccctgccgtggccgcccggaggagcagccctcccgggaccaggcgcctggcgtggcccgcccggggcccaccctctcctgcctctccacgcagaccccgacttccggggagaggaccccgagtgccaggatgcggagaccgaacgcttcctgtccaccagctccacgggccgccgggtctccttcaatgaggcggcgctgtttgagcagagccgcaagacgcaggacaagggtcgccggtacacactgacggagggggacttccaccacctgaagaatgcccggctcacgcacctgcacctgccgcccctcaagattgtcaccatccacgagtg

SEQ ID NO: 113150 - DNA, 2453 bp, Homo sapiens
  Payload ID: 2129
  Gene Symbol: CBARP
  Gene Name: calcium channel, voltage-dependent, beta subunit associated regulatory protein
  Uniprot ID: Q8N350
  ENST ID: ENST00000382477
  CDS Start-End: 276-2453
gcgcagcgggggcggcgggccggggaccgggcagcaccgggcgcgcggagcgggcgcgccgccaacgcggtcacgtgcgcggcccctcctctcgcgccggcctcccccgcgccgcgctctccattcataaattctccgcctgctccgcggccaccgggcgccggagccagccgcgagcgccacgcagccgcccgccgccagcccgccgcccatgggccgctcgtcccggcgctgagggccctcctccccagttcagaatgcagcccacagccaccatggccacagccgccaccaccaccaccaccaccactgccacagtagccctgacgacgtcgtgggacaatgccactggacgccccacggcagagccagaccccatcctggacaactacgtgctgctggtggtggtgatgtcgctgttcgtggggggcacgctggtggtgttgtctggcgtcctgctcctctgcaagcgctgctgggacgtccaccagcgcctcaacagggccatggaggaagcggagaagaccaccaccacctacctggacaacggcacccacccagcccaagaccccgacttccggggagaggaccccgagtgccaggatgcggagaccgaacgcttcctgtccaccagctccacgggccgccgggtctccttcaatgaggcggcgctgtttgagcagagccgcaagacgcaggacaagggccggcagggtggatggcagagcacggcagctggggcatcgggcatgggaggtgggcgggctctgatggccagatgctgtcgcaggtacacactgacggagggggacttccaccacctgaagaatgcccggctcacgcacctgcacctgccgcccctcaagattgtcaccatccacgagtgtgactcaggcgaggccagctcagccaccacgccccacccggccacctctcccaaggccactctggccatcttccagcccccggggaaggccctcaccggccgctctgtgggccccagctccgccctgccaggtgacccctacaactcagccgcgggcgccactgacttcgcagagatcagcccctcggcatctagcgactctggggaaggcacctcgttggatgccggtaccaggagcaccaaggctggagggcccggggctgcagcagggcctggggaggcgggcccgggatccggggcaggtaccgttctgcagttcctcacccgcctgcgccgccatgccagcctggatggggccagcccctatttcaaggtcaagaagtggaagctggagcccagccagcgggcagccagtctggacacgagaggttcccccaagcggcaccacttccagcggcagcgggcagccagtgagagcacggagcaggaggagggggatgccccccaggaggacttcatccagtacattgcccgggcgggcgacgccgtggccttcccgcacccccgcccctttctggccagcccgccccctgctctcggcaggctagaggcggccgaggcagcgggaggagcgagccccgattcccccccggagcgcggcgcgggcagcgcggggcctgagcagcagcagccgccactggagccggacgccgagcgggacgcgggccccgagcaggcccagaccagctaccgcgacctgtggagcctgcgcgcctcgcttgagctgcatgcggccgcctcggaccacagcagcagcggcaacgaccgcgactcggtgcgcagcggcgacagctcgggctcaggctccgggggcgcggcgcccgccttcccgccgccctccccgcccgcgccgcggcccaaggacggcgaggcgcgccggctgctgcagatggacagtggctacgccagcatcgagggccgcggcgcaggcgacgacaccgagccacctgccgcgcccgcccggccccgcagcccgcgcgcctggccccgccgcccgcgccgcgactacagcatcgacgagaagacggacgcgctgttccacgagttcctgcgccacgacccgcacttcgacgacacgccggctgccgcgcgacaccgcgcccgcgcgcacccgcacgcccgcaaacagtggcagcgtggccggcagcacagcgaccccggcgcccgcgcggccccggccctggccggaaccccggcaccgcctgccggcgcggcccgacccgcgcgtgcgcccttgcggcgcggcgacagcgtggacggcccgcccgacggtcgcaccctgggcggcgccggcgacgaccccgccatccccgtcatcgaggaggagccgggcggcggggggtgccccggctcgggcctgtgcgtcctaccatccgggtcggtgctggacaagctggcggctggcctcgacgagagactctttccgccgcgcctcgccgagcccgtcgtggcgactcccgcgttggtcgccgccgcccccacgtcccccgaccacagcccggcctaa

SEQ ID NO: 113151 - DNA, 929 bp, Homo sapiens
  Payload ID: 2129
  Gene Symbol: CBARP
  Gene Name: calcium channel, voltage-dependent, beta subunit associated regulatory protein
  ENST ID: ENST00000589260
  CDS Start-End: 113-262
cgcggccaccgggcgccggagccagccgcgagcgccacgcagccgcccgccgccagcccgccgcccatgggccgctcgtcccggcgctgagggccctcctccccagttcagaatgcagcccacagccaccatggccacagccgccaccaccaccaccaccaccactgccacagtagccctgacgacgtcgtgggacaatgccactggacgccccacgagccagaccccatcctggacaactacgtgctgctggtggtggtgatgtcgctgttcgtggggggcacgctggtggtgttgtctggcgtcctgctcctctgcaagcgctgctgggacgtccaccagcgcctcaacagggccatggaggaagcggagaagaccaccaccacctacctggacaacggcacccacccagcccaaggcgtaggtgggcccaggcgcgtgctgagcgagtgagtgtgtgagcggatggacgagtgtccctcgccccgccagcccggccgcccgtgccgcggccccagccctccctgccgtggccgcccggaggagcagccctcccgggaccaggcgcctggcgtggcccgcccggggcccaccctctcctgcctctccacgcagaccccgacttccggggagaggaccccgagtgccaggatgcggagaccgaacgcttcctgtccaccagctccacgggccgccgggtctccttcaatgaggcggcgctgtttgagcagagccgcaagacgcaggacaagggtcgccggtacacactgacggagggggacttccaccacctgaagaatgcccggctcacgcacctgcacctgccgcccctcaagattgtcaccatccacgagtgtgactcaggcgaggccagctcagccaccacgccccacccggccacctctcccaaggccactctggccatcttc

SEQ ID NO: 113152 - DNA, 4261 bp, Homo sapiens
  Payload ID: 2129
  Gene Symbol: CBARP
  Gene Name: calcium channel, voltage-dependent, beta subunit associated regulatory protein
  ENST ID: ENST00000590083
  CDS Start-End: 294-1655
ggtggccggcgcggagccagccagacccagcggcgagcgcagcgggggcggcgggccggggaccgggcagcaccgggcgcgcggagcgggcgcgccgccaacgcggtcacgtgcgcggcccctcctctcgcgccggcctcccccgcgccgcgctctccattcataaattctccgcctgctccgcggccaccgggcgccggagccagccgcgagcgccacgcagccgcccgccgccagcccgccgcccatgggccgctcgtcccggcgctgagggccctcctccccagttcagaatgcagcccacagccaccatggccacagccgccaccaccaccaccaccaccactgccacagtagccctgacgacgtcgtgggacaatgccactggacgccccacggcagagccagaccccatcctggacaactacgtgctgctggtggtggtgatgtcgctgttcgtggggggcacgctggtggtgttgtctggcgtcctgctcctctgcaagcgctgctgggacgtccaccagcgcctcaacagggccatggaggaagcggagaagaccaccaccacctacctggacaacggcacccacccagcccaagaccccgacttccggggagaggaccccgagtgccaggatgcggagaccgaacgcttcctgtccaccagctccacgggccgccgggtctccttcaatgaggcggcgctgtttgagcagagccgcaagacgcaggacaagggtcgccggtacacactgacggagggggacttccaccacctgaagaatgcccggctcacgcacctgcacctgccgcccctcaagattgtcaccatccacgagtgtgactcaggcgaggccagctcagccaccacgccccacccggccacctctcccaaggccactctggccatcttccagcccccggggaaggccctcaccggccgctctgtgggccccagctccgccctgccaggtgacccctacaactcagccgcgggcgccactgacttcgcagagatcagcccctcggcatctagcgactctggggaaggcacctcgttggatgccggtaccaggagcaccaaggctggagggcccggggctgcagcagggcctggggaggcgggcccgggatccggggcaggtaccgttctgcagttcctcacccgcctgcgccgccatgccagcctggatggggccagcccctatttcaaggtcaagaagtggaagctggagcccagccagcgggcagccagtctggacacgagaggttcccccaagcggcaccacttccagcggcagcgggcagccagtgagagcacggagcaggaggagggggatgccccccaggaggacttcatccagtacattgcccgggcgggcgacgccgtggccttcccgcacccccgcccctttctggccagcccgccccctgctctcggcaggtatttttcagtagatggaggtgctaggggtggacctgtgggcccttgccccccttcgcccccccctaggcggcccagggagcgctctccaggccccgtggacacgcgctcgcctgcctccagcggcaaggcccctcccagaggcggactcactggggccacctctccagcatggaccagaggagggaagcagggagagactgggtaagggtagggcggtgggtggggaggaggggccccccgaggatggcgctggtactgctgcttgctggtggagtccgaggcctgaagggttctgctgtggtcccaggccctctcccacccccgccccgcccatgctcccaaggctgggcagactcctctcagaagctgctgtgaccactccggccagcagcacccctcccccaacccaagggcaacttccctgaagcccagggcccacgtcggtgggatgggaatggggcgtggggctggggcagagcagggttcctggggcagccctggtatggcgggtgaccctcacgtctgtgcactgtcctcctgctggttatccagcatgggtgggcagagagccctagcctggagcaggggctgagctggactcaaccgcgtccagtccatcccctgcggctcccacgtccactgggaggctgggaaaacgtgactcccggagagaagcatgttgacttttcctgggggcttccaagggagggggccccgccgtctgcagtccagcatggaggcaccctgcttaataagcaggcgccacagctcagggtcaatgcaagacgcatcccctgcaaaacacactggctcattttaaagctctcaccttccaaggcccgcccgagtcccaagtcccacccgcgtccaccctccctgatccagaggcgggatggccggccgggtagggggcgcggggctcggcggggctctgacggcgcggcctggcttgcaggctagaggcggccgaggcagcgggaggagcgagccccgattcccccccggagcgcggcgcgggcagcgcggggcctgagcagcagcagccgccactggagccggacgccgagcgggacgcgggccccgagcaggcccagaccagctaccgcgacctgtggagcctgcgcgcctcgcttgagctgcatgcggccgcctcggaccacagcagcagcggcaacgaccgcgactcggtgcgcagcggcgacagctcgggctcaggctccgggggcgcggcgcccgccttcccgccgccctccccgcccgcgccgcggcccaaggacggcgaggcgcgccggctgctgcagatggacagtggctacgccagcatcgagggccgcggcgcaggcgacgacaccgagccacctgccgcgcccgcccggccccgcagcccgcgcgcctggccccgccgcccgcgccgcgactacagcatcgacgagaagacggacgcgctgttccacgagttcctgcgccacgacccgcacttcgacgacacgccggctgccgcgcgacaccgcgcccgcgcgcacccgcacgcccgcaaacagtggcagcgtggccggcagcacagcgaccccggcgcccgcgcggccccggccctggccggaaccccggcaccgcctgccggcgcggcccgacccgcgcgtgcgcccttgcggcgcggcgacagcgtggacggcccgcccgacggtcgcaccctgggcggcgccggcgacgaccccgccatccccgtcatcgaggaggagccgggcggcggggggtgccccggctcgggcctgtgcgtcctaccatccgggtcggtgctggacaagctggcggctggcctcgacgagagactctttccgccgcgcctcgccgagcccgtcgtggcgactcccgcgttggtcgccgccgcccccacgtcccccgaccacagcccggcctaagtcccgcgtcctgggcccatctctctggcagcttctccggcgccgcacggggcctcggcggcgggagagacgtgggggcgcgacgccccgacgcgaatgcgcggggaccgcgggcccttcgcgcacgcgccgggcgacggaggcgcgctcgccgcttcagggcgcaggcgcagagccccggccgccctcgcgccgccgaagtgtgcactgctctttccggtgcttgccgggtgctgggcgtcgtgaggcgcgggccgcggagaccccggctgggcgggaaggaaggggcgtgaacggctctcagcttcgggctcctgaggacaacgatcactcgccctcagtcccggacggggcggccgcttagtcgcagggcccgccacccgagggtcgcgcagcccactgggcccgatggagccgccgcgtgccgggcgcgtgcgcgagctcgcccgggcgggggccgcggggcgctaacggtcgcagacgagttcgccgccctgggccgggaggcggctcaacaccgtgactgccgacctccgagaccgtttacctcactgcggcgtgtgctggcggcagcccgcgccgcctccgagcaataaccgcgccgccaccgctgctgccgccggccctgagggagccggccccggccctcccgcgccccgagtccccactgccctccgcatgtcaacggcgcccgccccgctgccgccccatccacgttgagacgcgaacaaaacccagacggccaggtccaagcttcccaagctttatttattgccaaatttgggcggcctcgcccgcacggcaccctccgagtccccgccgcgtctgcaccatcccgcgatggcgtttctcgtgtttttcttttctggatgatataaatattgaccgcaca

SEQ ID NO: 113153 - DNA, 933 bp, Homo sapiens
  Payload ID: 2129
  Gene Symbol: CBARP
  Gene Name: calcium channel, voltage-dependent, beta subunit associated regulatory protein
  ENST ID: ENST00000591127
  CDS Start-End: 1-275
ccaccagctccacgggccgccgggtctccttcaatgaggcggcgctgtttgagcagagccgcaagacgcaggacaagggtcgccggtacacactgacggagggggacttccaccacctgaagaatgcccggctcacgcacctgcacctgccgcccctcaagattgtcaccatccacgagtgtgactcaggcgaggccagctcagccaccacgccccacccggccacctctcccaaggccactctggccatcttccagctccgccctgccaggtgacccctacaactcagccgcgggcgccactgacttcgcagagatcagcccctcggcatctagcgactctggggaaggcacctcgttggatgccggtaccaggagcaccaaggctggagggcccggggctgcagcagggcctggggaggcgggcccgggatccggggcaggtaccgttctgcagttcctcacccgcctgcgccgccatgccagcctggatggggccagcccctatttcaaggtcaagaagtggaagctggagcccagccagcgggcagccagtctggacacgagaggttcccccaagcggcaccacttccagcggcagcgggcagccagtgagagcacggagcaggaggagggggatgccccccaggaggacttcatccagtacattgcccgggcgggcgacgccgtggccttcccgcacccccgcccctttctggccagcccgccccctgctctcggcagaggcggccgaggcagcgggaggagcgagccccgattcccccccggagcgcggcgcgggcagcgcggggcctgagcagcagcagccgccactggagccggacgccgagcgggacgcgggccccgagcaggcccagaccagctaccgcgacctgtggagcctgcgcgcctcgcttgagctgcatgcggccgc

SEQ ID NO: 113154 - DNA, 1266 bp, Homo sapiens
  Payload ID: 2130
  Gene Symbol: CACNG1
  Gene Name: calcium channel, voltage-dependent, gamma subunit 1
  Uniprot ID: Q06432
  ENST ID: ENST00000226021
  CDS Start-End: 72-740
cggcttgtcacctgccctaggagacgcagccgccggaccctgcccagggcacccacgcctcggcgaccaccatgtcccagaccaaaatgctgaaggtccgcgtgaccctcttctgcatcctggcaggcatcgtgctggccatgacagccgtggtaaccgaccactgggctgtgctgagcccccacatggagcaccacaacactacctgcgaggcggcccacttcggcctctggcggatttgtaccaagcgcatccccatggacgacagcaagacctgcgggcccatcaccctgcccggggagaagaactgttcctacttcaggcattttaaccccggcgagagctcggagatcttcgaattcaccactcagaaggagtacagcatctcggcagccgccatcgccatcttcagccttggcttcatcatcctgggcagcctctgtgtcctcctgtccctcgggaagaagagggactatctgctgcgacccgcgtccatgttctatgcctttgcaggtctctgcatcctcgtctcggtggaggtcatgcggcagtcggtgaagcgcatgattgacagtgaggacaccgtctggatcgagtactattactcctggtcctttgcctgcgcctgtgccgccttcatcctcctctttctcggcggtctcgccctcctgctgttctccctgcctcgaatgccccggaacccatgggagtcctgcatggatgctgagcccgagcactaaccctcctgcggccctagcgaccctcaggcttcttccccaggaagcggggtcttggcctggaaccttccagagaggaggcgggagcaattttagccccaccctgctcccatctgcccccctgcaacagtcgcaggctgcttcctctctctgagttcctctgggctgccgcaggctcccctgggaatagagcaagacgtgagtcctaacctggccacagttgggggaggcagagccagcaggtggacaggtgtttgcaggggcccaacttcccctggagctcagaggtgtccccactgtaccagcctctgataagctgcctccagttgtcctttatgaacattgcagggacaacctgtgtttgccagctgggtgttccgtgtaaatagccagcctgtctctttctcggtgataaaacacaccctctctggtgagcccagcgtcccctccttggcttccaggagccctgggaagcatttttaactgggtagaatctgactgtggcttgaaataaaaagctctcagaaaa

SEQ ID NO: 113155 - DNA, 2384 bp, Homo sapiens
  Payload ID: 2131
  Gene Symbol: CACNG2
  Gene Name: calcium channel, voltage-dependent, gamma subunit 2
  Uniprot ID: Q9Y698
  ENST ID: ENST00000300105
  CDS Start-End: 983-1954
gcggcgcagggagctgtccggttcagcaccacccgtaatgcagtaggtgggagcgcctccgcgggcgcccagccggtagcgagtggggggcaggcgcgcggcccaccctgcagcaagacgccggctccctcgtttccaggagctttgcagatagggggagggaaatccgcctcgattctccaggagaaaccccctctctcccccacttcgccaacactacccccgccaccaacaacaataaccgccgccgctgctcgtcctgctgccgccgccgccgccgcgcctgcccgccctgccgccgccgccgccgccgccgccgctgcccgggcaaaaccatggaaagcgagacccccgcacctgtgcagctgagctcaagggcttacagaatactgggaagtctggtctgaaacgaaagcgccgagaccccccaaggaagagaactggcgaagcaaaggattttcatggcgcaggccgcagagccgagaacgaagaccgaaggttgcatctcggctctcacagtctctaactgtctaggtcccgaccatgagaaatggtgttgagaattcggctgttccctggttcactgtggaagccatctccaaattaactatcacatatggaaactggagaccagaattttagaaaaagagattaaggcatctcacttgggggggtggggggtgtctttttattttttttttccttttctttttaaaaaaaaaacactgcaactggaacagtttctgatctcaaaaggcaagcctcttcccgtgtgatctttataatttacactcttttccgtgagctttcttacctccctttttttataactctccatattctctattcatacatatatccattatattagtagtggaataatttttatttttatttattttttttggctttagtacttgcaccctcacacacactctcccgagaaccagaagtcggttgggtgtttatataatgaagaattatggggctgtttgatcgaggtgttcaaatgcttttaaccaccgttggtgctttcgctgccttcagcctgatgaccatagctgtgggaaccgactattggctctactccagaggggtttgcaagaccaaaagtgtcagtgagaatgaaaccagcaaaaagaacgaggaagttatgacccattccggattatggagaacctgctgcctagaagggaatttcaaaggtctgtgcaagcaaattgatcacttcccagaggatgcagattacgaagctgacacagcagaatatttcctccgggccgtgagggcctccagcattttcccaatcctgagtgtgattctgcttttcatgggtggcctctgcatcgcagccagcgagttctacaaaactcgacacaacatcatcctgagtgccggcatcttcttcgtgtctgcaggtctgagtaacatcattggcatcatagtgtacatatctgccaatgccggagacccctccaagagcgactccaaaaagaatagttactcatacggctggtccttctacttcggggccctgtccttcatcatcgccgagatggtcggggtgctggcggtgcacatgtttatcgaccggcacaaacagctgcgggccacggcccgcgccacggactacctccaggcctctgccatcacccgcatccccagctaccgctaccgctaccagcgccgcagccgctccagctcgcgctccacggagccctcacactccagggacgcctcccccgtgggcatcaagggcttcaacaccctgccgtccacggagatctccatgtacacgctcagcagggaccccctgaaggccgccaccacgcccaccgccacctacaactccgacagggataacagcttcctccaggttcacaactgtatccagaaggagaacaaggactctctccactccaacacagccaaccgccggaccacccccgtataaagaccgcgggcctcgccagaagaccgcgggaggagggcgcggtccccgggggcggggcggggcggggagacccagaccctccgctgggagaccttccaaaagcaaaaacaaaaaacaaaaaaaacaaaaaaacaaaaaacaaaaaaacacacacacacaaaaaaagagaaaaaacataacaagtaaattttaaaaaaaagaacaaaatataagaggaacaaagaagcaaaacaacaggaaatgtgggaaaatataaacgagggaagaaaacaaactttaaaaaaaagcgagagggataaaaaattaaaaatagaaaataaatctaaaagaaaatgcatgatttcccatgtaccattattttaacatttaataaaaatcaatttaaatgaaaaaataaaagggaaccaagataacattaaagcaaaaaaaa

SEQ ID NO: 113156 - DNA, 3088 bp, Homo sapiens
  Payload ID: 2132
  Gene Symbol: CACNG3
  Gene Name: calcium channel, voltage-dependent, gamma subunit 3
  Uniprot ID: O60359
  ENST ID: ENST00000005284
  CDS Start-End: 1203-2150
actttttgcccgcctaagcgagccatagagccgtctccagagctgccggtgcctttaagaagactcggtctttcgggtcttctttttccccaatgggctccagtggtgcccgcagcaaaaggcaaacttgcctggctcatggggtgaaagggaggattgaagaatgccgcgttgggtgggtgctgagggagcgccagagtgcgctacgggcttcgctccccttcccctttccttaacccttcctagagcggaggaaccgggtcgtgctgcagcgcccaggagccagggcgctgactgtcctcggctccagaaactttgcgcggagagtgggcttgactgggcagagccgagccggctggctgacccgggaaggaacgggggaagggcggggtgagggaagaaagaccctttagcaccccgggtttctagcccgggcggcggtgtgcagctgcatgagggagctgtcccttcggcaccacggaccttaaagcctaggcgttaagacgacggaggcggggcaacaggcggggagctgtcccttcagcaccacggaccttggcgcccccagggaaaccagccggcccccgccccaggactctgtcttttctccagtttgagcgggggtgtcgggagcaggcggagagctttcctgcgaggctgtggaagcagtgaacactcttctcagcggctcgcctcccagcagtgctattttttgccatccgccctcacccccagcacacgcgctcgcacacacacgcacgcacgcacacacacacacacacacactcacacagagacctctctgggtttctttgccttgagtctcccggggctgtgagaagccaggcgcatctcaaaccgagctggcagctccaggctccggagccatgccctgcacggaccctcgtctttaccacgctcctgaggaatgaaaggaacccagggaccctcagaaggcagcagtgatgcggaccaaccccccggagcctgcacccttccgagggccataggcgacccagggaactggagagagctccagaaaggaaatcccagctttcccaaagtccctgtggatgctgacaaaaggagacctgaatttttggaagagcctgtactaggttacccggctgcagagtgattttcccctccggcactgactctccccctccaacccccagccgtccagagtaccatgaagaattatgaggatgtgtgacagaggtatccagatgttgatcaccactgtaggagcctttgccgcttttagtttaatgaccattgcagtgggcacggactactggttatattccagaggtgtgtgcaggactaaatctacaagtgataatgaaaccagcaggaagaatgaagaagtaatgacccattcggggctgtggaggacctgctgcctagaaggggctttccgaggcgtgtgcaagaaaatcgatcacttccctgaagatgctgactacgaacaggacacagccgaatatctcctgcgagctgtgagggcctccagtgtcttccccatcctcagtgtcacgctgctgttcttcggcgggctctgcgtggcagccagtgagttccaccgcagcagacacaacgtcattctcagcgcgggcatcttttttgtctctgcagggttaagcaacatcattggcatcatagtttatatatcagccaacgccggagaccccgggcagcgtgactccaaaaaaagttactcctatggttggtccttttatttcggagccttctctttcatcatcgcagaaattgtaggagtggttgccgtgcacatctatattgaaaaacatcagcagttacgagccaaatcccactcggagttcctgaagaaatctacttttgcccgcctcccaccctacaggtatcgattccggaggcggtcaagttctcgctccaccgagcccagatcccgagacctgtcccccatcagcaaaggcttccacaccatcccttccactgacatctcgatgttcaccctctcccgggacccctcaaagatcaccatggggaccctcctcaactccgaccgggaccacgcttttctacagttccacaattccacacccaaagagttcaaagagtcactgcataataatccggccaacaggcgcaccacgcccgtctgaactgacctctgacctctgccccacgcccagcacagccttgggggaagtgtacagagatgtctctgaggttgcatggcatggtccttgtgatggtattactttttacaaagaatgaaaccaaatggactcagccctctcccacattttcccctcaccctccaagtcctaacccctccatcctctctaacttttcaagccaatcccttaatgtcattcctctctctgtgtatctgtgccagatgttttcctttcttccttctttactggaaggacctccacattcttccctccttggaagaggactttactaaaagtcacaggtggtggccaggggggatttccgaatctccatcaggcgcgctcatagttgtccccattgtctacccacacaaatcctcaggaaaccaaccaccgcccaggtggccctgagggaggcattcacctttatgtgttagaaaaacatgaccagaaatcaaagatgtcagagccccgaagcagctaatgtaataagcactcatgttattaaaggttttgccttgtcgtaaccaaccgagccgggggtgttttgtttcttgtgggtgtttcctacacaaactcactcccctgcctccaaactggctcatgtccatcttggaagctgaactttgctcatccacacttgagccactaggaaggatctccctgcacctttggaagctagtaaggcattcccacaaatgtccaaatcaatgcatccttctacttgaattcctggaggctacctgggggtgggtgagtgaatgctggttttcaagatctaactttggcatgcaatagctctagaaccttgggcaagtcacctaagcctcaagcctcagtctcctcatctgtaaaatggaacatgataatagcactctcctccacagagttatgaggtttaaataaaactgtgtgtaaaa

SEQ ID NO: 113157 - DNA, 3380 bp, Homo sapiens
  Payload ID: 2133
  Gene Symbol: CACNG4
  Gene Name: calcium channel, voltage-dependent, gamma subunit 4
  Uniprot ID: Q9UBN1
  ENST ID: ENST00000262138
  CDS Start-End: 3-986
ccatggtgcgatgcgaccgcgggctgcagatgctgctgaccacggccggagccttcgccgccttctcgctcatggccatcgccatcggcaccgactactggctgtactccagcgcgcacatctgcaacggcaccaacctgaccatggacgacgggcccccgccccgccgcgcccgcggcgacctcacccactctggtctgtggcgggtgtgctgcatcgaagggatctataaagggcactgcttccggatcaatcacttcccagaggacaatgactacgaccacgacagctcggagtacctcctccgcatcgtgcgagcctccagcgtcttccccatcctcagcaccatcctgctcctgctgggtggcctgtgcatcggtgctggcaggatctacagccgcaagaacaacatcgtcctcagtgccggcatcctcttcgtggctgcaggcctcagtaacatcatcggtatcatcgtctacatttccagcaacacaggtgacccgagtgacaagcgggacgaagacaaaaagaaccattacaactacggctggtctttttactttggagctctgtctttcattgtggctgagaccgtgggcgtcctggctgtaaacatttacattgagaaaaataaagagttgaggtttaagaccaaacgggaattccttaaggcgtcttcctcttctccttatgccaggatgccgagctacaggtaccggcgacggcgctcgaggtccagctcaaggtccaccgaggcctcgccctccagggacgtgtcgcccatgggcctgaagatcacaggggccatccccatgggggagctgtccatgtacacgctgtccagggagcccctcaaggtgaccaccgcagccagctacagccccgaccaggaggccagcttcctgcaggtgcatgactttttccagcaggacctgaaggaaggtttccacgtcagcatgctgaaccgacggacgacccctgtgtgagccgcctgccctttctctccgctccagcctctccccagaacggctctttttgtcacacaggatggcatgtgatcctcaagacgacgaacaatgaactaaagccaaatgcagccctccctggcctccagaggtggcgtgggctggctttgcacgaaggttgtgctgggagaccggacccggggctgcagaagaagctgaaggctgactttgtcccctccccgaaaaagggtgttttgatgcctcagggtctctgaaatctcccgggaagccccagagctttcctgaggctgcctggccttgatcaacttgggaagacaaaattgagccattatctcctcttggaaacgaatcttgccagaaaaacgggatttcagggccttccctccctgcctgggtgtcgggccaccagaaggctctgccggacgccaagaagacggtctctgggctcttgtcagctgcttttgaacctgaggttcctgcgtcgttgagccagaaatcagaccaccgaagctcactcccttcctctccatctctccctctctccaagactctggcagtggcctatgatcctgaagacagctctgcagccaactggtgctttggcctttgcgctgtcccggggccagcttccctcgacctggggaggccgtggcctgtggaggaggcccaggtaaaggctgggggctgttgctggctatcctctttgcttctggaagtttctgcctcactcagaatgggcaggacagacccactgactggacttcagagtctggagggttccatcggtcaggggaatggcggccacgtgacctcttgccgtgccccttgtcatagacccaaggagcaactctgtcccctgagcgttgggggtcccgggggagaggtggacagacacctccctccaactggcatttggcaacaggagcctggacttctgtgcaagaaagggagacctaagggtgaacagtggccaataaaaaccctagagaacaaacatccatttcctaggtggttacaaatcataacttcctgcaaatcaacgccaggagagcaacttaccttcatttctttgtcttaaaaagtagcagcaactggccccacaactcctgtcattgtaagttattctgccaccacctaacaggacggagtggagtgagtttggataaacggaccgagctgggcttctcttcctccctacagaggggagatctcagcactttgtccggagctgaggaagtggtttctgtgttttacagtttttccagccattcttttcttccccctcctgaagcaagcaaagagcgtggaggcgtgtgcaggcttggaagaagaactctccagaacatggaacttaaccctcttttgtataaaacatgtgctttctaaagaaaaattgtttcttattttttgagactccttgatccaccctggaacagtcgcctgtagtcctggtagctgttgtgcttggaaataacgagcgcatccttgcctcagctacctgctcacagcccatgggtggactcggccccctggggttcagacccaggtccgttcggcctagtgatgatgtcatcgtccatcccatcttcctttgcccccaggaaaggacgcatccaccggtagcggccccagctgactgtcgccgtgtgctggggatctgaaatgaggcctgccagggcccctgtgtgctgtgctccagagccttcgctcccatcagggttggcatcatctgatggcatgtccaagtgtgcccagcagcggatgctgaagcaccagagctcaaggccttcacctgctctaggccagccctgtcaccacctccactgccatgaccaggccgaaggcagggaacgccctccccagtcccgctgtccagcaaggccccgagacttttcttctgtgatttccaaaagcaaggcagccgtgctgttctagttcctctccatccgccacctcccctcccgctgccccagaagtttctatcattccatggagaaagctgtgttccaatgaatcctacctcttgcccagtcccaggcagagtaagcagggcccacctagggaccaagaaagagtaggaagaaggggacgagccgggagcaaaaccacctcagacacccgggccttctcagccttctccccgcggccagctgggtctccggggaccctgggccctgggccgcccattcctggccctcccgctgcatctcagacctgacacccaacggggggatgtggtggcctgtgcccaccttctctccctcctcccgacccgccccctcgcccccacccctgtgtgtttcgccagttaagcacctgtgactccagtacctactactggttttgggttggttgttctgtcttttttttaattaaataaaaacatttttaaaa

SEQ ID NO: 113158 - DNA, 926 bp, Homo sapiens
  Payload ID: 2134
  Gene Symbol: CACNG5
  Gene Name: calcium channel, voltage-dependent, gamma subunit 5
  Uniprot ID: Q9UF02
  ENST ID: ENST00000307139
  CDS Start-End: 61-888
agagcgcagtccgtgctggtgggagcgtggcgactagttgcacagcaacggtccaggaagatgagtgcctgcgggaggaaggccctgaccctgctgagcagtgtctttgctgtctgtggcttgggcctcctgggtatcgcggtcagcaccgactactggctgtacctggaggagggtgtgattgtgccccagaaccagagcaccgagatcaagatgtccctgcactcaggcctctggcgggtctgcttccttgcaggtgaggagcgggggcgttgcttcaccatagaatatgtgatgcccatgaacacccagctgacatccgagtccacggtcaatgttctaaagatgatccgctcagccacaccattccctctggtcagcctcttcttcatgttcattgggtttatcctgaacaacatcggacacatccgtccccaccggacgatactggcctttgtctctggcatcttctttatcctctcaggcctctctctcgtggtgggcctggtgctctacatctccagcatcaacgatgagatgctcaacaggaccaaggatgcagagacctacttcaactacaagtatgggtggtcgtttgccttcgccgccatctccttccttttaacggagagtgccggggtgatgtctgtgtacctgtttatgaagcggtacaccgcggaggacatgtacaggccccaccctggcttctaccgccctcggctgagcaactgctccgattactcaggccagttcctacacccagacgcctgggtcaggggccgcagcccctccgacatctccagcgaggcctccctgcagatgaacagcaactaccccgccttgctcaagtgccccgactatgatcagatgtcctcttcaccctgctgagcctcggccgcccccatccctggactgtgggtggccag

SEQ ID NO: 113159 - DNA, 1311 bp, Homo sapiens
  Payload ID: 2134
  Gene Symbol: CACNG5
  Gene Name: calcium channel, voltage-dependent, gamma subunit 5
  Uniprot ID: Q9UF02
  ENST ID: ENST00000533854
  CDS Start-End: 238-1065
attggcgccgagcggttccggctgactggacggggcgggcgtcccgggcagcctagcgcggtacctcccgccccgcgcgcccagccggcgagggacattggaccagggtcgggggtcgcggccgctccagcgagagccgtgggtactgccacctgctcacccactctccctagccccagagcgcagtccgtgctggtgggagcgtggcgactagttgcacagcaacggtccaggaagatgagtgcctgcgggaggaaggccctgaccctgctgagcagtgtctttgctgtctgtggcttgggcctcctgggtatcgcggtcagcaccgactactggctgtacctggaggagggtgtgattgtgccccagaaccagagcaccgagatcaagatgtccctgcactcaggcctctggcgggtctgcttccttgcaggtgaggagcgggggcgttgcttcaccatagaatatgtgatgcccatgaacacccagctgacatccgagtccacggtcaatgttctaaagatgatccgctcagccacaccattccctctggtcagcctcttcttcatgttcattgggtttatcctgaacaacatcggacacatccgtccccaccggacgatactggcctttgtctctggcatcttctttatcctctcaggcctctctctcgtggtgggcctggtgctctacatctccagcatcaacgatgagatgctcaacaggaccaaggatgcagagacctacttcaactacaagtatgggtggtcgtttgccttcgccgccatctccttccttttaacggagagtgccggggtgatgtctgtgtacctgtttatgaagcggtacaccgcggaggacatgtacaggccccaccctggcttctaccgccctcggctgagcaactgctccgattactcaggccagttcctacacccagacgcctgggtcaggggccgcagcccctccgacatctccagcgaggcctccctgcagatgaacagcaactaccccgccttgctcaagtgccccgactatgatcagatgtcctcttcaccctgctgagcctcggccgcccccatccctggactgtgggtggccagacaacccttcctgttctctccaggtgacccctgagccccaggcctgtggttgacaggcccaggccacccatgcttagctgttgtcacttgaccccagtcctctccctgcttctccagaagggctctaactgccccagcatgggtgtgggagtctggagtctgtgggcaagctgattgtctgggaacatgggagaagccccgcccatgt

SEQ ID NO: 113160 - DNA, 1853 bp, Homo sapiens
  Payload ID: 2135
  Gene Symbol: CACNG6
  Gene Name: calcium channel, voltage-dependent, gamma subunit 6
  Uniprot ID: Q9BXT2
  ENST ID: ENST00000252729
  CDS Start-End: 591-1373
ccaagtcctctgttctcaaactctgagcccaagggaaccccggccacatctcctccaaacacacacaggacctcaggtcccttcctgggtaccccaaactcttagccctagtggggtgctcagatctctcaggaaaaccagtttcccttttgttaaccccccagcggggaccccaaagcagccccttggagctgcagggagcttcagcgggcaccagttctcattcctctggagctcttggggggactccctcctgggaagccgaattctatctctaaacctcagggtgggggccttgtttttcctctgggccccgtcttctttgccaagttcttgagggcaacctagaccctcctctgaaccccagaggcttccccagccctggggatcatttttctcttctgaaccccagaagcaatctcgactttcgcatttgagattccagacaggactcggctctccctctttcatacccaggggaaactgagtccctcacccccttcaagaccccaggccgctcctcgctcccgcccctcgaggcccttcgccggctctgcctcctcccccttcccgaccccaccggccataagatgatgtggtccaacttcttcctgcaagaggagaaccggcggcggggggccgcgggccggcggcgggcgcacgggcagggcaggtcggggctgacgcccgagcgcgaggggaaggtgaagctggcgctgctgctggccgccgtgggcgccacgctggcggtgctgtccgtgggcaccgagttctgggtggagctcaacacctacaaggccaacggcagcgccgtgtgcgaagcggcccacctggggctgtggaaggcgtgcaccaagcggctgtggcaggcggacgtgcccgtggacagggacacctgcggccccgcggagctgcccggagaagcaaactgcacctattttaaattcttcaccacgggggagaatgcacgcatctttcagagaaccacaaagaaagaggtgaatctggcagctgcggtgatagcagtgctgggcctggcagtcatggccttggggtgcctctgtatcatcatggtgctcagtaaaggtgcagagttcctgctccgagttggagccgtctgctttggcctctcaggcctgctgctcttggtgagcctggaggtgttccggcattccgtgagggccctgctgcagagagtcagcccggagcctcccccggccccacgcctcacctacgagtactcctggtccctgggctgcggcgtgggggccggcctgatcctgctgttgggggccggctgctttctgctgctcacactgccttcctggccctgggggtccctctgtcccaagcgggggcaccgggccacctagagccacgcgtgagacttctctaagcaaccaccgagccctttgaccttctccattgtacccccaagatctttttgccccatctcctagagaaactgtgttctccctgctcgggggcccatgtttttttacacgcctgcctcctgtccccttatcctttctccctctgtaaatacgtttttctctgtggctgtatgtgggttgcttgggggtgggatgggaagaggctctttgcaaacgagggtccccagagaagactggcggggacctgatggggtagctggggtgtggggttgggggatgaggtcagggggtcttgggtgggagttgggggccccttcatttcccaggtctggatcgattcacttgccgggagagactttttacaactcatctgcagctccgggtgcggttgggggagatagcgaagggtctggcctcgctgtgatctgatttgggattaaaggtttggaaatttaacaa

SEQ ID NO: 113161 - DNA, 645 bp, Homo sapiens
  Payload ID: 2135
  Gene Symbol: CACNG6
  Gene Name: calcium channel, voltage-dependent, gamma subunit 6
  ENST ID: ENST00000346968
  CDS Start-End: 1-645
atgatgtggtccaacttcttcctgcaagaggagaaccggcggcggggggccgcgggccggcggcgggcgcacgggcagggcaggtcggggctgacgcccgagcgcgaggggaaggtgaagctggcgctgctgctggccgccgtgggcgccacgctggcggtgctgtccgtgggcaccgagttctgggtggagctcaacacctacaaggccaacggcagcgccgtgtgcgaagcggcccacctggggctgtggaaggcgtgcaccaagcggctgtggcaggcggacgtgcccgtggacagggacacctgcggccccgcggagctgcccggagaagcaaactgcacctattttaaattcttcaccacgggggagaatgcacgcatctttcagagaaccacaaagaaaggcctgctgctcttggtgagcctggaggtgttccggcattccgtgagggccctgctgcagagagtcagcccggagcctcccccggccccacgcctcacctacgagtactcctggtccctgggctgcggcgtgggggccggcctgatcctgctgttgggggccggctgctttctgctgctcacactgccttcctggccctgggggtccctctgtcccaagcgggggcaccgggccacctag

SEQ ID NO: 113162 - DNA, 1635 bp, Homo sapiens
  Payload ID: 2135
  Gene Symbol: CACNG6
  Gene Name: calcium channel, voltage-dependent, gamma subunit 6
  ENST ID: ENST00000352529
  CDS Start-End: 591-1160
ccaagtcctctgttctcaaactctgagcccaagggaaccccggccacatctcctccaaacacacacaggacctcaggtcccttcctgggtaccccaaactcttagccctagtggggtgctcagatctctcaggaaaaccagtttcccttttgttaaccccccagcggggaccccaaagcagccccttggagctgcagggagcttcagcgggcaccagttctcattcctctggagctcttggggggactccctcctgggaagccgaattctatctctaaacctcagggtgggggccttgtttttcctctgggccccgtcttctttgccaagttcttgagggcaacctagaccctcctctgaaccccagaggcttccccagccctggggatcatttttctcttctgaaccccagaagcaatctcgactttcgcatttgagattccagacaggactcggctctccctctttcatacccaggggaaactgagtccctcacccccttcaagaccccaggccgctcctcgctcccgcccctcgaggcccttcgccggctctgcctcctcccccttcccgaccccaccggccataagatgatgtggtccaacttcttcctgcaagaggagaaccggcggcggggggccgcgggccggcggcgggcgcacgggcagggcaggtcggggctgacgcccgagcgcgaggggaaggtgaagctggcgctgctgctggccgccgtgggcgccacgctggcggtgctgtccgtgggcaccgagttctgggtggagctcaacacctacaaggccaacggcagcgccgtgtgcgaagcggcccacctggggctgtggaaggcgtgcaccaagcggctgtggcaggcggacgtgcccgtggacagggacacctgcggccccgcggagctgcccggaggcctgctgctcttggtgagcctggaggtgttccggcattccgtgagggccctgctgcagagagtcagcccggagcctcccccggccccacgcctcacctacgagtactcctggtccctgggctgcggcgtgggggccggcctgatcctgctgttgggggccggctgctttctgctgctcacactgccttcctggccctgggggtccctctgtcccaagcgggggcaccgggccacctagagccacgcgtgagacttctctaagcaaccaccgagccctttgaccttctccattgtacccccaagatctttttgccccatctcctagagaaactgtgttctccctgctcgggggcccatgtttttttacacgcctgcctcctgtccccttatcctttctccctctgtaaatacgtttttctctgtggctgtatgtgggttgcttgggggtgggatgggaagaggctctttgcaaacgagggtccccagagaagactggcggggacctgatggggtagctggggtgtggggttgggggatgaggtcagggggtcttgggtgggagttgggggccccttcatttcccaggtctggatcgattcacttgccgggagagactttttacaactcatctgcagctccgggtgcggttgggggagatagcgaagggtctggcctcgctgtgatctgatttgggattaaaggtttggaaattt

SEQ ID NO: 113163 - DNA, 1016 bp, Homo sapiens
  Payload ID: 2136
  Gene Symbol: CACNG7
  Gene Name: calcium channel, voltage-dependent, gamma subunit 7
  Uniprot ID: P62955
  ENST ID: ENST00000222212
  CDS Start-End: 96-923
tgctgcatggggtcaagcactctggtcggtcccatggagctctgcactgtagcttcccttccacaggccccgcagggcgccccctgcctctgaggatgagtcactgcagcagccgcgccctgaccctgctgagcagcgtgtttggtgcgtgtggcctgctcctggtaggcatcgcggtcagcactgactactggctgtacatggaagaaggcacagtgctaccgcagaaccagaccaccgaggtcaagatggccctgcacgccggcctctggcgagtctgcttctttgcaggtcgggagaaaggtcgctgtgtggcctcagaatattttcttgaaccggagatcaatttggtgacggaaaacacggagaatattctgaagacagtgcgcacggccacccccttccccatggtcagcctcttcctcgtgttcacggccttcgtcatcagcaacatcggccacatccgcccgcagaggaccattctggcttttgtctctggcatcttcttcatactatcgggcctctccttggtggtgggcttggttctttacatctccagcatcaacgacgaggtcatgaacaggcccagcagctctgagcagtattttcattatcgctacgggtggtcttttgccttcgccgcttcctccttcctactcaaagagggggccggcgtgatgtccgtgtacctgttcaccaagcgctacgcggaggaggagatgtaccgtccacacccggccttctaccgcccgcgtctcagcgactgctccgactactcgggccagttcctgcagcccgaggcgtggcgccgcggccggagcccctccgacatctccagcgacgtgtccatccaaatgacgcagaactaccctcccgccatcaagtacccggaccacctgcacatctccacctcgccctgctgaggcccgcccctcggagctccccctgcctcctcctcctcctcgtcttaggggggtctccctgcaatgcagcgcccccttccgtcctcgggactc

SEQ ID NO: 113164 - DNA, 631 bp, Homo sapiens
  Payload ID: 2136
  Gene Symbol: CACNG7
  Gene Name: calcium channel, voltage-dependent, gamma subunit 7
  ENST ID: ENST00000391766
  CDS Start-End: 16-612
cccctgcctctgaggatgagtcactgcagcagccgcgccctgaccctgctgagcagcgtgtttggtgcgtgtggcctgctcctggtaggcatcgcggtcagcactgactactggctgtacatggaagaaggcacagtgctaccgcagaaccagaccaccgaggtcaagatggccctgcacgccggcctctggcgagtctgcttctttgcaggtcgggagaaaggtcgctgtgtggcctcagaatattttcttgaaccggagatcaatttggtgacggaaaacacggagaatattctgaagacagtgcgcacggccacccccttccccatggtcagcctcttcctcgtgttcacggccttcgtcatcagcaacatcggccacatccgcccgcagaggaccattctggcttttgtctctggcatcttcttcatactatcgggcctctccttggtggtgggcttggttctttacatctccagcatcaacgacgaggtcatgaacaggcccagcagctctgagcagtattttcattatcgctacgggtggtcttttgccttcgccgcttcctccttcctactcaaagaggtgacgtccgtgggacctagactctagagttctgaatggagagagg

SEQ ID NO: 113165 - DNA, 2688 bp, Homo sapiens
  Payload ID: 2136
  Gene Symbol: CACNG7
  Gene Name: calcium channel, voltage-dependent, gamma subunit 7
  Uniprot ID: P62955
  ENST ID: ENST00000391767
  CDS Start-End: 213-1040
gcggccgcggggggtggggggtgggaggccgggagggggccgggacgccgggctccggggcgggggcggggggcgcgggcaccggcgaccccggtggcggcggcggcggccgggggaagcctcggggccggtcatgcggctgcggggcccgcggcccggagcgtccgcccagccctgagcgaggccccgcagggcgccccctgcctctgaggatgagtcactgcagcagccgcgccctgaccctgctgagcagcgtgtttggtgcgtgtggcctgctcctggtaggcatcgcggtcagcactgactactggctgtacatggaagaaggcacagtgctaccgcagaaccagaccaccgaggtcaagatggccctgcacgccggcctctggcgagtctgcttctttgcaggtcgggagaaaggtcgctgtgtggcctcagaatattttcttgaaccggagatcaatttggtgacggaaaacacggagaatattctgaagacagtgcgcacggccacccccttccccatggtcagcctcttcctcgtgttcacggccttcgtcatcagcaacatcggccacatccgcccgcagaggaccattctggcttttgtctctggcatcttcttcatactatcgggcctctccttggtggtgggcttggttctttacatctccagcatcaacgacgaggtcatgaacaggcccagcagctctgagcagtattttcattatcgctacgggtggtcttttgccttcgccgcttcctccttcctactcaaagagggggccggcgtgatgtccgtgtacctgttcaccaagcgctacgcggaggaggagatgtaccgtccacacccggccttctaccgcccgcgtctcagcgactgctccgactactcgggccagttcctgcagcccgaggcgtggcgccgcggccggagcccctccgacatctccagcgacgtgtccatccaaatgacgcagaactaccctcccgccatcaagtacccggaccacctgcacatctccacctcgccctgctgaggcccgcccctcggagctccccctgcctcctcctcctcctcgtcttaggggggtctccctgcaatgcagcgcccccttccgtcctcgggactcctcgctcccacccggaggaggctgcgccagctttaggccccgccctcctcccaatggctccgcccacagactcccttatttcaatggccgcgccctcttttcccgacctctccttttcattggtccctctcactcccaaatgactcctccccttcgttggcccgcccctttcctctggcccctcctctccaagaaaattagctcctccctcgttctccacctgctctgagctgggagcagccagaggcggtgcaagcgcccagctccccagagctccccaacctcggacctcaccgcaggggcgctgggctggagagcaggttcgggcagccgtcgggaataccgaccatcctcttctcccttctaacctgggcttcctttttccctgcctaatctcacctcctgacctgctgggtcctccggtgcagtgggagggccggcttgctccacccgcagccccggggtggcgtagggaagggggctggaagccacgggtacggttaacctggcccttccctccccatctcccctacttccctggaaggtcccattctttctcaccggctgggctcttttctgcttcctgaaggttacctgccttttagggggctcttgtctaaaggatcttcttgctttctcagctatccttggcttctttttcgtcttcctcctcctttaactctttctctcctttcctcccttcacccgttcgtcccaagcccttgggtgcatcccgccctaggcgcacaccagacggccagaatggggaccctagggtggagggaattcccccacgccatctccgcacctgtgcccgcctctcccccctcgaggccccgtcgagggagggaggggcagtagcgggggtcgacaccccccccaaacctctaagtcttccattttctggctctcctcctcattgacgtccctcttcccccctcagaaccccaactctggcctctttcaagggcccgtccgccccgttggacagattttggggggagaggaggtcaccaggaactcgcccacccccccttattagggaaagaggggcgaggtagcacagtgctgtacacggaaccagaatggcccccggggtggggggaggggggcaggggagggacgggggcttttagtttgcatcttaggtgggaggggggaggggggacccgccgcagttaacctgactttacgcagcgatttttaacgaggctggggggaggggggcactggggtggggacagggtggggtggggggcctggctctgttatttaccgtgtatcatatgtaaatatcgacagaaacttcaataaactttatttcaaacacgtctccgcctgcccggagggaagggattggatagagggggcttagtctgggtctctgcttctagggttgcaggcctaaagtactgcagaatgacgttagatgggtcgttgttaaatgacttaatcatcatcattatcaacggcagcgctttatacttcagtccgtgtaaagcatgcaggaccgtaaatgatactggtcaggatcaataaacgctttctcctggta

SEQ ID NO: 113166 - DNA, 8747 bp, Homo sapiens
  Payload ID: 2137
  Gene Symbol: CACNG8
  Gene Name: calcium channel, voltage-dependent, gamma subunit 8
  Uniprot ID: Q8WXS5
  ENST ID: ENST00000270458
  CDS Start-End: 104-1381
ccccgcttctgcctgcgctgtgaacccccccccagccgccggcacggccccgcccccgctgccccggtggtggcccacggccccccggctgcccgtggtcaaactggagtcgctgaagcgctggaacgaagagcggggcctctggtgcgagaagggggtgcaggtgctgctgacgacggtgggcgccttcgccgccttcggcctcatgaccatcgccatcagcactgactactggctctacacgcgcgccctcatctgcaacaccaccaacctcacggccggcggcgacgacgggaccccccaccgcgggggcggcggcgcctcggagaagaaggaccccggcggcctcacgcactcgggcctctggaggatctgctgcctggaagggttgaaaagaggcgtctgcgtgaagatcaatcatttcccggaggacacggactacgaccacgacagcgcggagtatctactccgagttgtccgggcctccagcatcttccccatccttagcgccatcctgctgctgctcgggggtgtgtgcgtggcggcctcccgcgtctacaagtccaagaggaacatcattctgggcgcagggatcctgttcgtggcagcaggcctgagcaacatcatcggcgtgatcgtgtacatctccgccaacgcgggcgagccgggcccgaagcgggacgaggagaagaaaaaccactactcgtacggctggtccttctacttcggcgggctgtcgttcatcctggccgaggtgataggcgtgctggccgtcaacatctacatcgagcgcagccgcgaggcgcactgccagtctcgctcggacctgctcaaggccggcgggggcgcgggcggcagtggcgggagcggcccctcggccatcctccgtctgcccagttaccgcttccgctaccgccgccgctcccgctctagctcccgctccagcgagccgtcgccgtcgcgggacgcgtctcccggcggccccgggggcccgggctttgcctccacggacatctccatgtacacgctcagccgcgacccctccaagggcagcgtggccgcggggctggcgggggccggcggcggcggcggcggcgccgtgggggcgttcggcggcgcggccgggggcgccgggggcggcggcggaggcggcggcggggcgggtgccgagcgggaccgcgggggggcgtccggcttcctcacgctgcacaacgccttccccaaggaggcgggcggcggcgtcacggtcacggtcaccgggccgcccgccccgcccgcgcccgcgccacccgcgccctctgcgcccgcccccgggaccctggccaaggaggccgccgcctccaacaccaacacgctcaacaggaaaaccacgcctgtgtaggggcgcggcgggggagccgaggggcgtgtccggggcgcgtgcgcgggcgcgcgtgcatcgaggctgccggggtcgggggcgcccccgctttcccccgtgagcgcgctggagactgctgggcccgccccacgcccaccctccccgcccccctccccctccgaagcagggaccccgagggagggggcaggggagggagggggccgctgtgagggagcgtcgtgttttatttttttgggggatctatggggaggggggagggccatggtgttttttgcagtttcgagatgttttctttttcatgttttgctgtgtgcatggggggcggggcggggggaggggagggagggactcccagcccagcccaactcctggagaggggcccataatacacgaatacatagttacacccacaaactatatatatgccctatataaagagacacagcgaagggatgcagaaaggcagaaagaagggttggacgcgggcattcattcatttttttcattcattattccacaagggcttattaagcacctactgtgtaccaggcactggtacataagaaggcattggagcaggggacacgaacgaggcacagaaagggccttctcattcattcattcattaccggcaatttatttgtgcgccttaaaaagctaggcattgtgctccgtgctcagcgtgcaggaggcaggaaaacagccaggggccccgacgtctcatagagtaaacatcttgtgcatgagacaggcattaatcgatcatgtacatacacaataaattacagttaggctataggagaaacgagatgctatgaaatgctccatcaggggagcctaacccagttgtgaggaagagatttcagtggacagtgaaaggatgagaagaagccagcagggcggagctggggcaggagtgtggcaggcagagcagcacgtgcaaaggccccggggcaggaaggagcttgcagcgagggctgaagggtagtgaggcaggtgagcggggatcaaggtgaggccggagacacagacagggccagattgtgcaggggctcgtaggtcaggagttcagattttattctaggagtggtgagggccgtggaacgggtttaagcaggacgctaacgtgaatggtgtacaaagggaagacaggaactcggaggcaagagtaggaggcagagatgtgctgaaatacagcatcaaacatgggcacgggcccttggagctcacactcttgtgggaggaagcacgtaattacacagatgctgaagcatagtcatggtgtctggtgtgcaggagaaagccgtggggcttagagactcatgtgtctgtcactcgttcattcagccactcacccattgccatttttggccatctgctaaggtaccaggaagtgtgttaggatccagatccccaggggtgaaacagactctagccctgctctcaagcagtttattgtcatcaaacaccgccatccaggcagggcaatcggtgctggaacccggaccaccgtgggtaccgtggcacacggtggacagagtgaccaactgccaggagtgagcagcacttggggtaggcttcctggagaatatgatgcccattctgggtcttgaagaaatgagtgggcatcttctggttgatgaaaggcatgagaaaggcttgtggggccaaagaacaacttgggtgaaaacgggaggaagtgaacgagcatgatgtattggggtcagtgctaacagttctgggatgctgatgtacaaggtggggctgggagatgaggccgggaaagtagccacaagctagagtgtaaaggtaccagggtggccgggcgcggtggctcatgcctgtaatcccagcgctttgggaggctgaggctggagtatcacttgagcccaggagtttgagaccagcctggataacatggcgaaaccctgtctctacaaaacattaaaaaaaattagccgggcgtggtggagcacacctgtggacacagctactcaggaggctgagggaggaggaccatttgactccaagagttcgaggctgcagtgagctaggatcgcggcactacactccagcctgagcaacagactgagatcctgtctcagaaaaaaagagaaaaaggtgcctgagttccaggcagagggactgaggctcttctaaggatggtgagagaggatgacagctgcgcgggggcaagggctgtgcggtgattggaggggatgggtttgaagttcactgagaaggcagaggggacagcgcccagtaggcttcccttccatatttgctcagcaagtgtttcctgaggcctcccccgaagccttgtgctgggcggtgctgggagtggagaggtgattttgatcttgccctgctctcaaggggctcccagtctggcgggaaaacaggcacagacgcagcttgaggaggacgtggcagcggtggtgccatgctgccaggggctctgcgtgcccttctcttgacggaagggtacagatcagagctgggtgttcagaatttctctccgaggcctgtgtggaaggaccaggaagagagagactgaaggtccctaggaagaattctgccaaggcggtttcaggaagagatgctgggaaatgtaggaaaaggaatacaaatcagtgagacggagaagcgctgagtgagagagacggatacgtggagagaagagggatgccggagcgggtgttaaaagagacaaatctggccgggtgctgtggctcctaatcccagcactttgggagactgaggcaggcagattgagctcaggagttccagaccagccaacatattgaaatcttgtctctaccaaaaatacaaaaattagccgggtgtggtggtgcacgcctgtagtcccggctactcaggaggctgaggtgaaaggatctcgcttgggcctgggagggtgaggctgcagtgacccgtgatggcaccactgcgctccagcctgggcgaaagagcgagactctgtctcaaaaaaaaaaaaaaaattgagagacagcaaatatttgctggaagagggagagggaactggttaggggagaatggattctagagtctgaaggccaaacagaacgagagagagagagagagagagagaaagaatgaggttgagggtaggcaggaggaagagcaagatggggagggagggggagagcaggagagaccaaactagtagagtcacagacagagaaaaagtcaaagacaggaaggtgatacagaggagagagaagaggaagaggagagactgacaggtgcacaaatcagagaagtcccagagatagcagaaacacacacagagacagagatagagagggagaggtaagccggagacagactcagagattcgcacaaaaagcaacgtggagactcagaagcaagcgcagcgtcaaggaatgctccatttctggtgtgttgttttcccagtattcaagaaatatttattgagtgccaacctgttctagacccaatctcggccaggggatgtggtggcaaatagacggacaagggcctgctctcctgaaacacactggagagataaacaataaataatatcatttcagtaaccaaaaagtgctttaaaaattaagctgaaggccgggcgcagtggctcatgcctgtaatcccagcactttgggaggccgaggctggtggatcacttgaggtcaggagttcgagaccagcctggtcaacatggtgaaacttcatctctaccaataaataaataaagtagctgggtgtgctggtgtgcctgtagtcccagctacttgggaggctgagaaagaaggatcacttgaacccaggaggcagaggttgcagtgagctgagatcgcgccactgcactccagcctgggcgacagtgagtggtaacagaatgacagagcaaggatgactttagatgaggtccttggagtagaccttgtggcagaggtcacagagatgtggattgtgagtaggaaagagaggtgagaaagtctgggggccaggcattccacccaccagaggcagccccaaagcccagaaaagtagcaggtcttcgaggaggcctgtgcggtgagcagatccaccataggacagaggcacagggtaggggctgatcagttagggccttggatccttgggaagaaatctgaattttattctagatctgatgggaagtgcttggagggttttgagcacaggcatgccatgatcatatttttattttcttatttatatttattttgaaaaagagtcttgctctgtctcaggctggagtccagtgggctgatctcggctcactgccaacctccgcctcccaagttcaagtgattctcctgcctcagcctcctgagtagctgggattacaggcatgtgccaccacgcctggctaatttttttgtatttttagtaaagacgggatttcaccgtgttggccaggccaatctgaaattcctggcttcaaatgatccacctgcctcggcctcccaaaatgctgggattacaggagtgagccactgcgcccggcctcatatttttatttaaacaagaacagcagaattacattgctgtgctgagcatacgtagacttcaggagtcaaaggggaaggaaggaggtagcgggctgttgccttcctctggttgctggaggcctggaccaaggtggagttagtgggatggaggaagtggaagaaggcatgggattttggaggctagagcctgcattggtggtgaactggatgtcatagaggagggaaggaaaaggaaccaggaagagaagaactctctgaattgggcacgcacatctctgatgggcaccgatgaggattgttaccaggaacgaggagactgggatcaggaaagtggctttgggagggaggaaccaaggcttctcttttggatgtgtcaagatagatctgccttcgagaaatccgagttgtggtatcaaatagccagttggatatgtgagactggagtttgggggaaagagaggccgtggctcaaaaacgtaagttttggaaacgtcaacataaagccacaggattgggtgacgtggcctagcaggggggtggggacagagaagcgaccctggccagagccttggggacatctacatctgggggagaaggggatgtagcaaaacgagcttaggagtgatctcgaggtaggctgaaaccaggagggttacagagggcaaatgcacctttgtgtttcaagaaggagaggagacagccagctgtgccaagggctgctgagacttggacaaggatgcagagagcagagtgaccattaggtctgatgacatggacagggttggtgatcttgataagataagatgtcagttcagtgcagtggtggggacagaagccctgctggagtggaggggagagagaatttggggggaagacagaaggaaagggaattcaggcaagtgtgtgtgtgtgtgtgtgtgtgtgtgtgtgtgtaactgacacaaaggccaggtgcgatggctcacgtgtgtaatcccagcactttgggaggccgaagtgggtggatcacttgaggtcaggagttcgagaccagcctggccaatatggtgaaaccccgtctctactaaaaatacagaaattagacaggtgcggtggtgcacacctgtaatcccagctacttgagaggctgaagcaggagaatctcttgggcccaggaggcagaggttgcagtgagccaagatcacaccactgcactctagcctgggtgacagagcaagactctgtctcaaaaaagaaaaaaggtaaaaaaaaaaaaaaatgaccctgaaaggaagtagggagacatgcagatagggagatgggaggcagaaaattgcatcctgcaattagctgtcacagcaggcaggagcaagagagatggggaagcccagggccaggaggggaagatgaattcagggggcagggaagagaggatgctgtcagctaggctctggcagatcccctagccagggatgctctgcccagctcctgtctcttgctgctgtcagcgccgggcacactctgggattccccctgtagaccctgtcaagacctattgaggtgaaggggaagaacacgttttcatcattcattttcagaaataaacattcactcagttcttggaaatactttctggccaggcttgggggctcatgcctgtaatcccagcactctgggaggccaagacaggaggattgcttgaggcttggcgtttgagaccagcctgggcaatatagtaagaccccgtctctacaaaaatgaaaaatgagctgtggcgtggtggctcacgcctgtagtcctagatactcgggaggctgaggcgggaggattgcttgagtccaggagtttaaggttgcagtgagctatgattgcaccattgcacttcaggctgggccacagagcaagaccctgtctcagaaaacagaaagaaagaaagtcaaagaaataaagtcaaagacaagaaggtgatacagagaagacagaaaaggaggaggagagagactgacaggtacacaaatcagagaagtcccagagataacaaaaacacaaccacagagatagggagacgtaagccggagaaagacccagagattcgcatagaaagcaacgtggagactcagaagcaagcacagcatcaaggaatgatcaataaaaagaaaaaaaaatatttcctgaggacttccaagtacaaggccctgcaatctcaggccacttctgtcccatctctgccttcagagggggggacaggtagtccagacaattagaatacagagggggctgtgttctgacggggccacgcgggcattgaggaaacgcagcaggcccctcccctagctggggcggggatgtctgtgtgccatcatctcactccatctggtcattcctttgcccattcatccatccattcattcaagtcaccccatgcacattttccaagactgcctgtgacctggccctgtgccgggtagagctgaggatgccaaggtgaattcctcctgtgcctggccccggccccagtctgctggaagaaccagacacagacaatcacactgcggggaaacacgtgctccatcggaaaagtccagagcagggggtgggcagagaggcccagcgtgcaccagagcctcgctcaggtcagcgccaggcctgcctggagcagccaactgtgggagaagaaggagttggtgaaaggtgggtcccacctgggccgtccacagaagggctgaggggtagggggtgaggggttgaagatcaggccctgccgccatgccacacggctgtcctctgtccctgctcctgggggagctgaaactgcatggaaggtcccccaggggtgccccgtctaataaactcgatgaagagga

SEQ ID NO: 113167 - DNA, 6655 bp, Homo sapiens
  Payload ID: 2138
  Gene Symbol: CACNA1C
  Gene Name: calcium channel, voltage-dependent, L type, alpha 1C subunit
  Uniprot ID: Q13936
  ENST ID: ENST00000347598
  CDS Start-End: 1-6561
atggtcaatgagaatacgaggatgtacattccagaggaaaaccaccaaggttccaactatgggagcccacgccccgcccatgccaacatgaatgccaatgcggcagcggggctggcccctgagcacatccccaccccgggggctgccctgtcgtggcaggcggccatcgacgcagcccggcaggctaagctgatgggcagcgctggcaatgcgaccatctccacagtcagctccacgcagcggaagcggcagcaatatgggaaacccaagaagcagggcagcaccacggccacacgcccgccccgagccctgctctgcctgaccctgaagaaccccatccggagggcctgcatcagcattgtcgaatggaaaccatttgaaataattattttactgactatttttgccaattgtgtggccttagcgatctatattccctttccagaagatgattccaacgccaccaattccaacctggaacgagtggaatatctctttctcataatttttacggtggaagcgtttttaaaagtaatcgcctatggactcctctttcaccccaatgcctacctccgcaacggctggaacctactagattttataattgtggttgtggggctttttagtgcaattttagaacaagcaaccaaagcagatggggcaaacgctctcggagggaaaggggccggatttgatgtgaaggcgctgagggccttccgcgtgctgcgccccctgcggctggtgtccggagtcccaagtctccaggtggtcctgaattccatcatcaaggccatggtccccctgctgcacatcgccctgcttgtgctgtttgtcatcatcatctacgccatcatcggcttggagctcttcatggggaagatgcacaagacctgctacaaccaggagggcatagcagatgttccagcagaagatgacccttccccttgtgcgctggaaacgggccacgggcggcagtgccagaacggcacggtgtgcaagcccggctgggatggtcccaagcacggcatcaccaactttgacaactttgccttcgccatgctcacggtgttccagtgcatcaccatggagggctggacggacgtgctgtactgggtcaatgatgccgtaggaagggactggccctggatctattttgttacactaatcatcatagggtcattttttgtacttaacttggttctcggtgtgcttagcggagagttttccaaagagagggagaaggccaaggcccggggagatttccagaagctgcgggagaagcagcagctagaagaggatctcaaaggctacctggattggatcactcaggccgaagacatcgatcctgagaatgaggacgaaggcatggatgaggagaagccccgaaacatgagcatgcccaccagtgagaccgagtccgtcaacaccgaaaacgtggctggaggtgacatcgagggagaaaactgcggggccaggctggcccaccggatctccaagtcaaagttcagccgctactggcgccggtggaatcggttctgcagaaggaagtgccgcgccgcagtcaagtctaatgtcttctactggctggtgattttcctggtgttcctcaacacgctcaccattgcctctgagcactacaaccagcccaactggctcacagaagtccaagacacggcaaacaaggccctgctggccctgttcacggcagagatgctcctgaagatgtacagcctgggcctgcaggcctacttcgtgtccctcttcaaccgctttgactgcttcgtcgtgtgtggcggcatcctggagaccatcctggtggagaccaagatcatgtccccactgggcatctccgtgctcagatgcgtccggctgctgaggattttcaagatcacgaggtactggaactccttgagcaacctggtggcatccttgctgaactctgtgcgctccatcgcctccctgctccttctcctcttcctcttcatcatcatcttctccctcctggggatgcagctctttggaggaaagttcaactttgatgagatgcagacccggaggagcacattcgataacttcccccagtccctcctcactgtgtttcagatcctgaccggggaggactggaattcggtgatgtatgatgggatcatggcttatggcggcccctcttttccagggatgttagtctgtatttacttcatcatcctcttcatctgtggaaactatatcctactgaatgtgttcttggccattgctgtggacaacctggctgatgctgagagcctcacatctgcccaaaaggaggaggaagaggagaaggagagaaagaagctggccaggactgccagcccagagaagaaacaagagttggtggagaagccggcagtgggggaatccaaggaggagaagattgagctgaaatccatcacggctgacggagagtctccacccgccaccaagatcaacatggatgacctccagcccaatgaaaatgaggataagagcccctaccccaacccagaaactacaggagaagaggatgaggaggagccagagatgcctgtcggccctcgcccacgaccactctctgagcttcaccttaaggaaaaggcagtgcccatgccagaagccagcgcgtttttcatcttcagctctaacaacaggtttcgcctccagtgccaccgcattgtcaatgacacgatcttcaccaacctgatcctcttcttcattctgctcagcagcatttccctggctgctgaggacccggtccagcacacctccttcaggaaccatattctgttttattttgatattgtttttaccaccattttcaccattgaaattgctctgaagatcctaggcaatgcagactatgtcttcactagtatctttacattagaaattatccttaagatgactgcttatggggctttcttgcacaagggttctttctgccggaactacttcaacatcctggacctgctggtggtcagcgtgtccctcatctcctttggcatccagtccagtgcaatcaatgtcgtgaagatcttgcgagtcctgcgagtactcaggcccctgagggccatcaacagggccaaggggctaaagcatgtggttcagtgtgtgtttgtcgccatccggaccatcgggaacatcgtgattgtcaccaccctgctgcagttcatgtttgcctgcatcggggtccagctcttcaagggaaagctgtacacctgttcagacagttccaagcagacagaggcggaatgcaagggcaactacatcacgtacaaagacggggaggttgaccaccccatcatccaaccccgcagctgggagaacagcaagtttgactttgacaatgttctggcagccatgatggccctcttcaccgtctccaccttcgaagggtggccagagctgctgtaccgctccatcgactcccacacggaagacaagggccccatctacaactaccgtgtggagatctccatcttcttcatcatctacatcatcatcatcgccttcttcatgatgaacatcttcgtgggcttcgtcatcgtcacctttcaggagcagggggagcaggagtacaagaactgtgagctggacaagaaccagcgacagtgcgtggaatacgccctcaaggcccggcccctgcggaggtacatccccaagaaccagcaccagtacaaagtgtggtacgtggtcaactccacctacttcgagtacctgatgttcgtcctcatcctgctcaacaccatctgcctggccatgcagcactacggccagagctgcctgttcaaaatcgccatgaacatcctcaacatgctcttcactggcctcttcaccgtggagatgatcctgaagctcattgccttcaaacccaagggttactttagtgatccctggaatgtttttgacttcctcatcgtaattggcagcataattgacgtcattctcagtgagactaatcactatttctgtgatgcatggaatacatttgacgccttgattgttgtgggtagcattgttgatatagcaatcaccgaggtaaacccagctgaacatacccaatgctctccctctatgaacgcagaggaaaactcccgcatctccatcaccttcttccgcctgttccgggtcatgcgtctggtgaagctgctgagccgtggggagggcatccggacgctgctgtggaccttcatcaagtccttccaggccctgccctatgtggccctcctgatcgtgatgctgttcttcatctacgcggtgatcgggatgcaggtgtttgggaaaattgccctgaatgataccacagagatcaaccggaacaacaactttcagaccttcccccaggccgtgctgctcctcttcaggtgtgccaccggggaggcctggcaggacatcatgctggcctgcatgccaggcaagaagtgtgccccagagtccgagcccagcaacagcacggagggtgaaacaccctgtggtagcagctttgctgtcttctacttcatcagcttctacatgctctgtgccttcctgatcatcaacctctttgtagctgtcatcatggacaactttgactacctgacaagggactggtccatccttggtccccaccacctggatgagtttaaaagaatctgggcagagtatgaccctgaagccaagggtcgtatcaaacacctggatgtggtgaccctcctccggcggattcagccgccactaggttttgggaagctgtgccctcaccgcgtggcttgcaaacgcctggtctccatgaacatgcctctgaacagcgacgggacagtcatgttcaatgccaccctgtttgccctggtcaggacggccctgaggatcaaaacagaagggaacctagaacaagccaatgaggagctgcgggcgatcatcaagaagatctggaagcggaccagcatgaagctgctggaccaggtggtgccccctgcaggtgatgatgaggtcaccgttggcaagttctacgccacgttcctgatccaggagtacttccggaagttcaagaagcgcaaagagcagggccttgtgggcaagccctcccagaggaacgcgctgtctctgcaggctggcttgcgcacactgcatgacatcgggcctgagatccgacgggccatctctggagatctcaccgctgaggaggagctggacaaggccatgaaggaggctgtgtccgctgcttctgaagatgacatcttcaggagggccggtggcctgttcggcaaccacgtcagctactaccaaagcgacggccggagcgccttcccccagaccttcaccactcagcgcccgctgcacatcaacaaggcgggcagcagccagggcgacactgagtcgccatcccacgagaagctggtggactccaccttcaccccgagcagctactcgtccaccggctccaacgccaacatcaacaacgccaacaacaccgccctgggtcgcctccctcgccccgccggctaccccagcacggtcagcactgtggagggccacgggccccccttgtcccctgccatccgggtgcaggaggtggcgtggaagctcagctccaacaggtgccactcccgggagagccaggcagccatggcgggtcaggaggagacgtctcaggatgagacctatgaagtgaagatgaaccatgacacggaggcctgcagtgagcccagcctgctctccacagagatgctctcctaccaggatgacgaaaatcggcaactgacgctcccagaggaggacaagagggacatccggcaatctccgaagaggggtttcctccgctctgcctcactaggtcgaagggcctccttccacctggaatgtctgaagcgacagaaggaccgagggggagacatctctcagaagacagtcctgcccttgcatctggttcatcatcaggcattggcagtggcaggcctgagccccctcctccagagaagccattcccctgcctcattccctaggccttttgccaccccaccagccacacctggcagccgaggctggcccccacagcccgtccccaccctgcggcttgagggggtcgagtccagtgagaaactcaacagcagcttcccatccatccactgcggctcctgggctgagaccacccccggtggcgggggcagcagcgccgcccggagagtccggcccgtctccctcatggtgcccagccaggctggggccccagggaggcagttccacggcagtgccagcagcctggtggaagcggtcttgatttcagaaggactggggcagtttgctcaagatcccaagttcatcgaggtcaccacccaggagctggccgacgcctgcgacatgaccatagaggagatggagagcgcggccgacaacatcctcagcgggggcgccccacagagccccaatggcgccctcttaccctttgtgaactgcagggacgcggggcaggaccgagccgggggcgaagaggacgcgggctgtgtgcgcgcgcggggtcgaccgagtgaggaggagctccaggacagcagggtctacgtcagcagcctgtagtgggcgctgccagatgcgggcttttttttatttgtttcaatgttcctaatgggttcgtttcagaagtgcctcactgttctcgtgacctggagtt

SEQ ID NO: 113168 - DNA, 6616 bp, Homo sapiens
  Payload ID: 2138
  Gene Symbol: CACNA1C
  Gene Name: calcium channel, voltage-dependent, L type, alpha 1C subunit
  ENST ID: ENST00000327702
  CDS Start-End: 1-6522
atggtcaatgagaatacgaggatgtacattccagaggaaaaccaccaaggttccaactatgggagcccacgccccgcccatgccaacatgaatgccaatgcggcagcggggctggcccctgagcacatccccaccccgggggctgccctgtcgtggcaggcggccatcgacgcagcccggcaggctaagctgatgggcagcgctggcaatgcgaccatctccacagtcagctccacgcagcggaagcggcagcaatatgggaaacccaagaagcagggcagcaccacggccacacgcccgccccgagccctgctctgcctgaccctgaagaaccccatccggagggcctgcatcagcattgtcgaatggaaaccatttgaaataattattttactgactatttttgccaattgtgtggccttagcgatctatattccctttccagaagatgattccaacgccaccaattccaacctggaacgagtggaatatctctttctcataatttttacggtggaagcgtttttaaaagtaatcgcctatggactcctctttcaccccaatgcctacctccgcaacggctggaacctactagattttataattgtggttgtggggctttttagtgcaattttagaacaagcaaccaaagcagatggggcaaacgctctcggagggaaaggggccggatttgatgtgaaggcgctgagggccttccgcgtgctgcgccccctgcggctggtgtccggagtcccaagtctccaggtggtcctgaattccatcatcaaggccatggtccccctgctgcacatcgccctgcttgtgctgtttgtcatcatcatctacgccatcatcggcttggagctcttcatggggaagatgcacaagacctgctacaaccaggagggcatagcagatgttccagcagaagatgacccttccccttgtgcgctggaaacgggccacgggcggcagtgccagaacggcacggtgtgcaagcccggctgggatggtcccaagcacggcatcaccaactttgacaactttgccttcgccatgctcacggtgttccagtgcatcaccatggagggctggacggacgtgctgtactgggtcaatgatgccgtaggaagggactggccctggatctattttgttacactaatcatcatagggtcattttttgtacttaacttggttctcggtgtgcttagcggagagttttccaaagagagggagaaggccaaggcccggggagatttccagaagctgcgggagaagcagcagctagaagaggatctcaaaggctacctggattggatcactcaggccgaagacatcgatcctgagaatgaggacgaaggcatggatgaggagaagccccgaaacatgagcatgcccaccagtgagaccgagtccgtcaacaccgaaaacgtggctggaggtgacatcgagggagaaaactgcggggccaggctggcccaccggatctccaagtcaaagttcagccgctactggcgccggtggaatcggttctgcagaaggaagtgccgcgccgcagtcaagtctaatgtcttctactggctggtgattttcctggtgttcctcaacacgctcaccattgcctctgagcactacaaccagcccaactggctcacagaagtccaagacacggcaaacaaggccctgctggccctgttcacggcagagatgctcctgaagatgtacagcctgggcctgcaggcctacttcgtgtccctcttcaaccgctttgactgcttcgtcgtgtgtggcggcatcctggagaccatcctggtggagaccaagatcatgtccccactgggcatctccgtgctcagatgcgtccggctgctgaggattttcaagatcacgaggtactggaactccttgagcaacctggtggcatccttgctgaactctgtgcgctccatcgcctccctgctccttctcctcttcctcttcatcatcatcttctccctcctggggatgcagctctttggaggaaagttcaactttgatgagatgcagacccggaggagcacattcgataacttcccccagtccctcctcactgtgtttcagatcctgaccggggaggactggaattcggtgatgtatgatgggatcatggcttatggcggcccctcttttccagggatgttagtctgtatttacttcatcatcctcttcatctgtggaaactatatcctactgaatgtgttcttggccattgctgtggacaacctggctgatgctgagagcctcacatctgcccaaaaggaggaggaagaggagaaggagagaaagaagctggccaggactgccagcccagagaagaaacaagagttggtggagaagccggcagtgggggaatccaaggaggagaagattgagctgaaatccatcacggctgacggagagtctccacccgccaccaagatcaacatggatgacctccagcccaatgaaaatgaggataagagcccctaccccaacccagaaactacaggagaagaggatgaggaggagccagagatgcctgtcggccctcgcccacgaccactctctgagcttcaccttaaggaaaaggcagtgcccatgccagaagccagcgcgtttttcatcttcagctctaacaacaggtttcgcctccagtgccaccgcattgtcaatgacacgatcttcaccaacctgatcctcttcttcattctgctcagcagcatttccctggctgctgaggacccggtccagcacacctccttcaggaaccatatcctaggcaatgcagactatgtcttcactagtatctttacattagaaattatccttaagatgactgcttatggggctttcttgcacaagggttctttctgccggaactacttcaacatcctggacctgctggtggtcagcgtgtccctcatctcctttggcatccagtccagtgcaatcaatgtcgtgaagatcttgcgagtcctgcgagtactcaggcccctgagggccatcaacagggccaaggggctaaagcatgtggttcagtgtgtgtttgtcgccatccggaccatcgggaacatcgtgattgtcaccaccctgctgcagttcatgtttgcctgcatcggggtccagctcttcaagggaaagctgtacacctgttcagacagttccaagcagacagaggcggaatgcaagggcaactacatcacgtacaaagacggggaggttgaccaccccatcatccaaccccgcagctgggagaacagcaagtttgactttgacaatgttctggcagccatgatggccctcttcaccgtctccaccttcgaagggtggccagagctgctgtaccgctccatcgactcccacacggaagacaagggccccatctacaactaccgtgtggagatctccatcttcttcatcatctacatcatcatcatcgccttcttcatgatgaacatcttcgtgggcttcgtcatcgtcacctttcaggagcagggggagcaggagtacaagaactgtgagctggacaagaaccagcgacagtgcgtggaatacgccctcaaggcccggcccctgcggaggtacatccccaagaaccagcaccagtacaaagtgtggtacgtggtcaactccacctacttcgagtacctgatgttcgtcctcatcctgctcaacaccatctgcctggccatgcagcactacggccagagctgcctgttcaaaatcgccatgaacatcctcaacatgctcttcactggcctcttcaccgtggagatgatcctgaagctcattgccttcaaacccaagcactatttctgtgatgcatggaatacatttgacgccttgattgttgtgggtagcattgttgatatagcaatcaccgaggtaaacccagctgaacatacccaatgctctccctctatgaacgcagaggaaaactcccgcatctccatcaccttcttccgcctgttccgggtcatgcgtctggtgaagctgctgagccgtggggagggcatccggacgctgctgtggaccttcatcaagtccttccaggccctgccctatgtggccctcctgatcgtgatgctgttcttcatctacgcggtgatcgggatgcaggtgtttgggaaaattgccctgaatgataccacagagatcaaccggaacaacaactttcagaccttcccccaggccgtgctgctcctcttcaggtgtgccaccggggaggcctggcaggacatcatgctggcctgcatgccaggcaagaagtgtgccccagagtccgagcccagcaacagcacggagggtgaaacaccctgtggtagcagctttgctgtcttctacttcatcagcttctacatgctctgtgccttcctgatcatcaacctctttgtagctgtcatcatggacaactttgactacctgacaagggactggtccatccttggtccccaccacctggatgagtttaaaagaatctgggcagagtatgaccctgaagccaagggtcgtatcaaacacctggatgtggtgaccctcctccggcggattcagccgccactaggttttgggaagctgtgccctcaccgcgtggcttgcaaacgcctggtctccatgaacatgcctctgaacagcgacgggacagtcatgttcaatgccaccctgtttgccctggtcaggacggccctgaggatcaaaacagaagggaacctagaacaagccaatgaggagctgcgggcgatcatcaagaagatctggaagcggaccagcatgaagctgctggaccaggtggtgccccctgcaggtgatgatgaggtcaccgttggcaagttctacgccacgttcctgatccaggagtacttccggaagttcaagaagcgcaaagagcagggccttgtgggcaagccctcccagaggaacgcgctgtctctgcaggctggcttgcgcacactgcatgacatcgggcctgagatccgacgggccatctctggagatctcaccgctgaggaggagctggacaaggccatgaaggaggctgtgtccgctgcttctgaagatgacatcttcaggagggccggtggcctgttcggcaaccacgtcagctactaccaaagcgacggccggagcgccttcccccagaccttcaccactcagcgcccgctgcacatcaacaaggcgggcagcagccagggcgacactgagtcgccatcccacgagaagctggtggactccaccttcaccccgagcagctactcgtccaccggctccaacgccaacatcaacaacgccaacaacaccgccctgggtcgcctccctcgccccgccggctaccccagcacggtcagcactgtggagggccacgggccccccttgtcccctgccatccgggtgcaggaggtggcgtggaagctcagctccaacagggaaaggcacgttccgatgtgtgaggatctggagctcaggagggattcaggctcagcagggactcaggctcactgccttctgctcaggagagcaaacccctctaggtgccactcccgggagagccaggcagccatggcgggtcaggaggagacgtctcaggatgagacctatgaagtgaagatgaaccatgacacggaggcctgcagtgagcccagcctgctctccacagagatgctctcctaccaggatgacgaaaatcggcaactgacgctcccagaggaggacaagagggacatccggcaatctccgaagaggggtttcctccgctctgcctcactaggtcgaagggcctccttccacctggaatgtctgaagcgacagaaggaccgagggggagacatctctcagaagacagtcctgcccttgcatctggttcatcatcaggcattggcagtggcaggcctgagccccctcctccagagaagccattcccctgcctcattccctaggccttttgccaccccaccagccacacctggcagccgaggctggcccccacagcccgtccccaccctgcggcttgagggggtcgagtccagtgagaaactcaacagcagcttcccatccatccactgcggctcctgggctgagaccacccccggtggcgggggcagcagcgccgcccggagagtccggcccgtctccctcatggtgcccagccaggctggggccccagggaggcagttccacggcagtgccagcagcctggtggaagcggtcttgatttcagaaggactggggcagtttgctcaagatcccaagttcatcgaggtcaccacccaggagctggccgacgcctgcgacatgaccatagaggagatggagagcgcggccgacaacatcctcagcgggggcgccccacagagccccaatggcgccctcttaccctttgtgaactgcagggacgcggggcaggaccgagccgggggcgaagaggacgcgggctgtgtgcgcgcgcggggtcgaccgagtgaggaggagctccaggacagcagggtctacgtcagcagcctgtagtgggcgctgccagatgcgggcttttttttatttgtttcaatgttcctaatgggttcgtttcagaagtgcctcactgttctcgtgacctggagtt

SEQ ID NO: 113169 - DNA, 6968 bp, Homo sapiens
  Payload ID: 2138
  Gene Symbol: CACNA1C
  Gene Name: calcium channel, voltage-dependent, L type, alpha 1C subunit
  ENST ID: ENST00000335762
  CDS Start-End: 266-6757
ggaaggggcccggatgtactgaggatgcgttacagtttcactcgaggaggcagtagtggaaaggagcagtttttggggtttgatgccataatgggaatcaggtaatcgtcggcggggaagaagaaacgctgcagaccacggcttcctcgaatcttgcgcgaaagccgccggcctcggaggagggattaatccagacccgccggggggtgttttcacatttcttcctcttcgtggctgctcctcctattaaaaccatttttggtccatggtcaatgagaatacgaggatgtacattccagaggaaaaccaccaaggttccaactatgggagcccacgccccgcccatgccaacatgaatgccaatgcggcagcggggctggcccctgagcacatccccaccccgggggctgccctgtcgtggcaggcggccatcgacgcagcccggcaggctaagctgatgggcagcgctggcaatgcgaccatctccacagtcagctccacgcagcggaagcggcagcaatatgggaaacccaagaagcagggcagcaccacggccacacgcccgccccgagccctgctctgcctgaccctgaagaaccccatccggagggcctgcatcagcattgtcgaatggaaaccatttgaaataattattttactgactatttttgccaattgtgtggccttagcgatctatattccctttccagaagatgattccaacgccaccaattccaacctggaacgagtggaatatctctttctcataatttttacggtggaagcgtttttaaaagtaatcgcctatggactcctctttcaccccaatgcctacctccgcaacggctggaacctactagattttataattgtggttgtggggctttttagtgcaattttagaacaagcaaccaaagcagatggggcaaacgctctcggagggaaaggggccggatttgatgtgaaggcgctgagggccttccgcgtgctgcgccccctgcggctggtgtccggagtcccaagtctccaggtggtcctgaattccatcatcaaggccatggtccccctgctgcacatcgccctgcttgtgctgtttgtcatcatcatctacgccatcatcggcttggagctcttcatggggaagatgcacaagacctgctacaaccaggagggcatagcagatgttccagcagaagatgacccttccccttgtgcgctggaaacgggccacgggcggcagtgccagaacggcacggtgtgcaagcccggctgggatggtcccaagcacggcatcaccaactttgacaactttgccttcgccatgctcacggtgttccagtgcatcaccatggagggctggacggacgtgctgtactgggtcaatgatgccgtaggaagggactggccctggatctattttgttacactaatcatcatagggtcattttttgtacttaacttggttctcggtgtgcttagcggagagttttccaaagagagggagaaggccaaggcccggggagatttccagaagctgcgggagaagcagcagctagaagaggatctcaaaggctacctggattggatcactcaggccgaagacatcgatcctgagaatgaggacgaaggcatggatgaggagaagccccgaaacagaggcactccggcgggcatgcttgatcagaagaaagggaagtttgcttggtttagtcactccacagaaacccatgtgagcatgcccaccagtgagaccgagtccgtcaacaccgaaaacgtggctggaggtgacatcgagggagaaaactgcggggccaggctggcccaccggatctccaagtcaaagttcagccgctactggcgccggtggaatcggttctgcagaaggaagtgccgcgccgcagtcaagtctaatgtcttctactggctggtgattttcctggtgttcctcaacacgctcaccattgcctctgagcactacaaccagcccaactggctcacagaagtccaagacacggcaaacaaggccctgctggccctgttcacggcagagatgctcctgaagatgtacagcctgggcctgcaggcctacttcgtgtccctcttcaaccgctttgactgcttcgtcgtgtgtggcggcatcctggagaccatcctggtggagaccaagatcatgtccccactgggcatctccgtgctcagatgcgtccggctgctgaggattttcaagatcacgaggtactggaactccttgagcaacctggtggcatccttgctgaactctgtgcgctccatcgcctccctgctccttctcctcttcctcttcatcatcatcttctccctcctggggatgcagctctttggaggaaagttcaactttgatgagatgcagacccggaggagcacattcgataacttcccccagtccctcctcactgtgtttcagatcctgaccggggaggactggaattcggtgatgtatgatgggatcatggcttatggcggcccctcttttccagggatgttagtctgtatttacttcatcatcctcttcatctgtggaaactatatcctactgaatgtgttcttggccattgctgtggacaacctggctgatgctgagagcctcacatctgcccaaaaggaggaggaagaggagaaggagagaaagaagctggccaggactgccagcccagagaagaaacaagagttggtggagaagccggcagtgggggaatccaaggaggagaagattgagctgaaatccatcacggctgacggagagtctccacccgccaccaagatcaacatggatgacctccagcccaatgaaaatgaggataagagcccctaccccaacccagaaactacaggagaagaggatgaggaggagccagagatgcctgtcggccctcgcccacgaccactctctgagcttcaccttaaggaaaaggcagtgcccatgccagaagccagcgcgtttttcatcttcagctctaacaacaggtttcgcctccagtgccaccgcattgtcaatgacacgatcttcaccaacctgatcctcttcttcattctgctcagcagcatttccctggctgctgaggacccggtccagcacacctccttcaggaaccatattctgttttattttgatattgtttttaccaccattttcaccattgaaattgctctgaagatgactgcttatggggctttcttgcacaagggttctttctgccggaactacttcaacatcctggacctgctggtggtcagcgtgtccctcatctcctttggcatccagtccagtgcaatcaatgtcgtgaagatcttgcgagtcctgcgagtactcaggcccctgagggccatcaacagggccaaggggctaaagcatgtggttcagtgtgtgtttgtcgccatccggaccatcgggaacatcgtgattgtcaccaccctgctgcagttcatgtttgcctgcatcggggtccagctcttcaagggaaagctgtacacctgttcagacagttccaagcagacagaggcggaatgcaagggcaactacatcacgtacaaagacggggaggttgaccaccccatcatccaaccccgcagctgggagaacagcaagtttgactttgacaatgttctggcagccatgatggccctcttcaccgtctccaccttcgaagggtggccagagctgctgtaccgctccatcgactcccacacggaagacaagggccccatctacaactaccgtgtggagatctccatcttcttcatcatctacatcatcatcatcgccttcttcatgatgaacatcttcgtgggcttcgtcatcgtcacctttcaggagcagggggagcaggagtacaagaactgtgagctggacaagaaccagcgacagtgcgtggaatacgccctcaaggcccggcccctgcggaggtacatccccaagaaccagcaccagtacaaagtgtggtacgtggtcaactccacctacttcgagtacctgatgttcgtcctcatcctgctcaacaccatctgcctggccatgcagcactacggccagagctgcctgttcaaaatcgccatgaacatcctcaacatgctcttcactggcctcttcaccgtggagatgatcctgaagctcattgccttcaaacccaagcactatttctgtgatgcatggaatacatttgacgccttgattgttgtgggtagcattgttgatatagcaatcaccgaggtaaacccagctgaacatacccaatgctctccctctatgaacgcagaggaaaactcccgcatctccatcaccttcttccgcctgttccgggtcatgcgtctggtgaagctgctgagccgtggggagggcatccggacgctgctgtggaccttcatcaagtccttccaggccctgccctatgtggccctcctgatcgtgatgctgttcttcatctacgcggtgatcgggatgcaggtgtttgggaaaattgccctgaatgataccacagagatcaaccggaacaacaactttcagaccttcccccaggccgtgctgctcctcttcaggtgtgccaccggggaggcctggcaggacatcatgctggcctgcatgccaggcaagaagtgtgccccagagtccgagcccagcaacagcacggagggtgaaacaccctgtggtagcagctttgctgtcttctacttcatcagcttctacatgctctgtgccttcctgatcatcaacctctttgtagctgtcatcatggacaactttgactacctgacaagggactggtccatccttggtccccaccacctggatgagtttaaaagaatctgggcagagtatgaccctgaagccaagggtcgtatcaaacacctggatgtggtgaccctcctccggcggattcagccgccactaggttttgggaagctgtgccctcaccgcgtggcttgcaaacgcctggtctccatgaacatgcctctgaacagcgacgggacagtcatgttcaatgccaccctgtttgccctggtcaggacggccctgaggatcaaaacagaagggaacctagaacaagccaatgaggagctgcgggcgatcatcaagaagatctggaagcggaccagcatgaagctgctggaccaggtggtgccccctgcaggtgatgatgaggtcaccgttggcaagttctacgccacgttcctgatccaggagtacttccggaagttcaagaagcgcaaagagcagggccttgtgggcaagccctcccagaggaacgcgctgtctctgcaggctggcttgcgcacactgcatgacatcgggcctgagatccgacgggccatctctggagatctcaccgctgaggaggagctggacaaggccatgaaggaggctgtgtccgctgcttctgaagatgacatcttcaggagggccggtggcctgttcggcaaccacgtcagctactaccaaagcgacggccggagcgccttcccccagaccttcaccactcagcgcccgctgcacatcaacaaggcgggcagcagccagggcgacactgagtcgccatcccacgagaagctggtggactccaccttcaccccgagcagctactcgtccaccggctccaacgccaacatcaacaacgccaacaacaccgccctgggtcgcctccctcgccccgccggctaccccagcacggtcagcactgtggagggccacgggccccccttgtcccctgccatccgggtgcaggaggtggcgtggaagctcagctccaacaggtgccactcccgggagagccaggcagccatggcgggtcaggaggagacgtctcaggatgagacctatgaagtgaagatgaaccatgacacggaggcctgcagtgagcccagcctgctctccacagagatgctctcctaccaggatgacgaaaatcggcaactgacgctcccagaggaggacaagagggacatccggcaatctccgaagaggggtttcctccgctctgcctcactaggtcgaagggcctccttccacctggaatgtctgaagcgacagaaggaccgagggggagacatctctcagaagacagtcctgcccttgcatctggttcatcatcaggcattggcagtggcaggcctgagccccctcctccagagaagccattcccctgcctcattccctaggccttttgccaccccaccagccacacctggcagccgaggctggcccccacagcccgtccccaccctgcggcttgagggggtcgagtccagtgagaaactcaacagcagcttcccatccatccactgcggctcctgggctgagaccacccccggtggcgggggcagcagcgccgcccggagagtccggcccgtctccctcatggtgcccagccaggctggggccccagggaggcagttccacggcagtgccagcagcctggtggaagcggtcttgatttcagaaggactggggcagtttgctcaagatcccaagttcatcgaggtcaccacccaggagctggccgacgcctgcgacatgaccatagaggagatggagagcgcggccgacaacatcctcagcgggggcgccccacagagccccaatggcgccctcttaccctttgtgaactgcagggacgcggggcaggaccgagccgggggcgaagaggacgcgggctgtgtgcgcgcgcggggtcgaccgagtgaggaggagctccaggacagcagggtctacgtcagcagcctgtagtgggcgctgccagatgcgggcttttttttatttgtttcaatgttcctaatgggttcgtttcagaagtgcctcactgttctcgtgacctggagttaaccggaacagcgtcttcattcatttctgttgggaccagacgcggagcctgggtgcgcgagccgccctccgggaggaaggcgcccggctgcgtctgcagaggcggggagaggaggcg

SEQ ID NO: 113170 - DNA, 6634 bp, Homo sapiens
  Payload ID: 2138
  Gene Symbol: CACNA1C
  Gene Name: calcium channel, voltage-dependent, L type, alpha 1C subunit
  Uniprot ID: Q13936
  ENST ID: ENST00000344100
  CDS Start-End: 1-6540
atggtcaatgagaatacgaggatgtacattccagaggaaaaccaccaaggttccaactatgggagcccacgccccgcccatgccaacatgaatgccaatgcggcagcggggctggcccctgagcacatccccaccccgggggctgccctgtcgtggcaggcggccatcgacgcagcccggcaggctaagctgatgggcagcgctggcaatgcgaccatctccacagtcagctccacgcagcggaagcggcagcaatatgggaaacccaagaagcagggcagcaccacggccacacgcccgccccgagccctgctctgcctgaccctgaagaaccccatccggagggcctgcatcagcattgtcgaatggaaaccatttgaaataattattttactgactatttttgccaattgtgtggccttagcgatctatattccctttccagaagatgattccaacgccaccaattccaacctggaacgagtggaatatctctttctcataatttttacggtggaagcgtttttaaaagtaatcgcctatggactcctctttcaccccaatgcctacctccgcaacggctggaacctactagattttataattgtggttgtggggctttttagtgcaattttagaacaagcaaccaaagcagatggggcaaacgctctcggagggaaaggggccggatttgatgtgaaggcgctgagggccttccgcgtgctgcgccccctgcggctggtgtccggagtcccaagtctccaggtggtcctgaattccatcatcaaggccatggtccccctgctgcacatcgccctgcttgtgctgtttgtcatcatcatctacgccatcatcggcttggagctcttcatggggaagatgcacaagacctgctacaaccaggagggcatagcagatgttccagcagaagatgacccttccccttgtgcgctggaaacgggccacgggcggcagtgccagaacggcacggtgtgcaagcccggctgggatggtcccaagcacggcatcaccaactttgacaactttgccttcgccatgctcacggtgttccagtgcatcaccatggagggctggacggacgtgctgtactgggtcaatgatgccgtaggaagggactggccctggatctattttgttacactaatcatcatagggtcattttttgtacttaacttggttctcggtgtgcttagcggagagttttccaaagagagggagaaggccaaggcccggggagatttccagaagctgcgggagaagcagcagctagaagaggatctcaaaggctacctggattggatcactcaggccgaagacatcgatcctgagaatgaggacgaaggcatggatgaggagaagccccgaaacatgagcatgcccaccagtgagaccgagtccgtcaacaccgaaaacgtggctggaggtgacatcgagggagaaaactgcggggccaggctggcccaccggatctccaagtcaaagttcagccgctactggcgccggtggaatcggttctgcagaaggaagtgccgcgccgcagtcaagtctaatgtcttctactggctggtgattttcctggtgttcctcaacacgctcaccattgcctctgagcactacaaccagcccaactggctcacagaagtccaagacacggcaaacaaggccctgctggccctgttcacggcagagatgctcctgaagatgtacagcctgggcctgcaggcctacttcgtgtccctcttcaaccgctttgactgcttcgtcgtgtgtggcggcatcctggagaccatcctggtggagaccaagatcatgtccccactgggcatctccgtgctcagatgcgtccggctgctgaggattttcaagatcacgaggtactggaactccttgagcaacctggtggcatccttgctgaactctgtgcgctccatcgcctccctgctccttctcctcttcctcttcatcatcatcttctccctcctggggatgcagctctttggaggaaagttcaactttgatgagatgcagacccggaggagcacattcgataacttcccccagtccctcctcactgtgtttcagatcctgaccggggaggactggaattcggtgatgtatgatgggatcatggcttatggcggcccctcttttccagggatgttagtctgtatttacttcatcatcctcttcatctgtggaaactatatcctactgaatgtgttcttggccattgctgtggacaacctggctgatgctgagagcctcacatctgcccaaaaggaggaggaagaggagaaggagagaaagaagctggccaggactgccagcccagagaagaaacaagagttggtggagaagccggcagtgggggaatccaaggaggagaagattgagctgaaatccatcacggctgacggagagtctccacccgccaccaagatcaacatggatgacctccagcccaatgaaaatgaggataagagcccctaccccaacccagaaactacaggagaagaggatgaggaggagccagagatgcctgtcggccctcgcccacgaccactctctgagcttcaccttaaggaaaaggcagtgcccatgccagaagccagcgcgtttttcatcttcagctctaacaacaggtttcgcctccagtgccaccgcattgtcaatgacacgatcttcaccaacctgatcctcttcttcattctgctcagcagcatttccctggctgctgaggacccggtccagcacacctccttcaggaaccatattctgttttattttgatattgtttttaccaccattttcaccattgaaattgctctgaagatgactgcttatggggctttcttgcacaagggttctttctgccggaactacttcaacatcctggacctgctggtggtcagcgtgtccctcatctcctttggcatccagtccagtgcaatcaatgtcgtgaagatcttgcgagtcctgcgagtactcaggcccctgagggccatcaacagggccaaggggctaaagcatgtggttcagtgtgtgtttgtcgccatccggaccatcgggaacatcgtgattgtcaccaccctgctgcagttcatgtttgcctgcatcggggtccagctcttcaagggaaagctgtacacctgttcagacagttccaagcagacagaggcggaatgcaagggcaactacatcacgtacaaagacggggaggttgaccaccccatcatccaaccccgcagctgggagaacagcaagtttgactttgacaatgttctggcagccatgatggccctcttcaccgtctccaccttcgaagggtggccagagctgctgtaccgctccatcgactcccacacggaagacaagggccccatctacaactaccgtgtggagatctccatcttcttcatcatctacatcatcatcatcgccttcttcatgatgaacatcttcgtgggcttcgtcatcgtcacctttcaggagcagggggagcaggagtacaagaactgtgagctggacaagaaccagcgacagtgcgtggaatacgccctcaaggcccggcccctgcggaggtacatccccaagaaccagcaccagtacaaagtgtggtacgtggtcaactccacctacttcgagtacctgatgttcgtcctcatcctgctcaacaccatctgcctggccatgcagcactacggccagagctgcctgttcaaaatcgccatgaacatcctcaacatgctcttcactggcctcttcaccgtggagatgatcctgaagctcattgccttcaaacccaagcactatttctgtgatgcatggaatacatttgacgccttgattgttgtgggtagcattgttgatatagcaatcaccgaggtaaacccagctgaacatacccaatgctctccctctatggggccctcctgttctcacccccctcttgctgtgctaactgcacctcctgttgccgacgggttccagaacgcagaggaaaactcccgcatctccatcaccttcttccgcctgttccgggtcatgcgtctggtgaagctgctgagccgtggggagggcatccggacgctgctgtggaccttcatcaagtccttccaggccctgccctatgtggccctcctgatcgtgatgctgttcttcatctacgcggtgatcgggatgcaggtgtttgggaaaattgccctgaatgataccacagagatcaaccggaacaacaactttcagaccttcccccaggccgtgctgctcctcttcaggtgtgccaccggggaggcctggcaggacatcatgctggcctgcatgccaggcaagaagtgtgccccagagtccgagcccagcaacagcacggagggtgaaacaccctgtggtagcagctttgctgtcttctacttcatcagcttctacatgctctgtgccttcctgatcatcaacctctttgtagctgtcatcatggacaactttgactacctgacaagggactggtccatccttggtccccaccacctggatgagtttaaaagaatctgggcagagtatgaccctgaagccaagggtcgtatcaaacacctggatgtggtgaccctcctccggcggattcagccgccactaggttttgggaagctgtgccctcaccgcgtggcttgcaaacgcctggtctccatgaacatgcctctgaacagcgacgggacagtcatgttcaatgccaccctgtttgccctggtcaggacggccctgaggatcaaaacagaagagggacccagcccatcagaggcccaccaaggggctgaggatcctttccgccctgcagggaacctagaacaagccaatgaggagctgcgggcgatcatcaagaagatctggaagcggaccagcatgaagctgctggaccaggtggtgccccctgcaggtgatgatgaggtcaccgttggcaagttctacgccacgttcctgatccaggagtacttccggaagttcaagaagcgcaaagagcagggccttgtgggcaagccctcccagaggaacgcgctgtctctgcaggctggcttgcgcacactgcatgacatcgggcctgagatccgacgggccatctctggagatctcaccgctgaggaggagctggacaaggccatgaaggaggctgtgtccgctgcttctgaagatgacatcttcaggagggccggtggcctgttcggcaaccacgtcagctactaccaaagcgacggccggagcgccttcccccagaccttcaccactcagcgcccgctgcacatcaacaaggcgggcagcagccagggcgacactgagtcgccatcccacgagaagctggtggactccaccttcaccccgagcagctactcgtccaccggctccaacgccaacatcaacaacgccaacaacaccgccctgggtcgcctccctcgccccgccggctaccccagcacggtcagcactgtggagggccacgggccccccttgtcccctgccatccgggtgcaggaggtggcgtggaagctcagctccaacaggtgccactcccgggagagccaggcagccatggcgggtcaggaggagacgtctcaggatgagacctatgaagtgaagatgaaccatgacacggaggcctgcagtgagcccagcctgctctccacagagatgctctcctaccaggatgacgaaaatcggcaactgacgctcccagaggaggacaagagggacatccggcaatctccgaagaggggtttcctccgctctgcctcactaggtcgaagggcctccttccacctggaatgtctgaagcgacagaaggaccgagggggagacatctctcagaagacagtcctgcccttgcatctggttcatcatcaggcattggcagtggcaggcctgagccccctcctccagagaagccattcccctgcctcattccctaggccttttgccaccccaccagccacacctggcagccgaggctggcccccacagcccgtccccaccctgcggcttgagggggtcgagtccagtgagaaactcaacagcagcttcccatccatccactgcggctcctgggctgagaccacccccggtggcgggggcagcagcgccgcccggagagtccggcccgtctccctcatggtgcccagccaggctggggccccagggaggcagttccacggcagtgccagcagcctggtggaagcggtcttgatttcagaaggactggggcagtttgctcaagatcccaagttcatcgaggtcaccacccaggagctggccgacgcctgcgacatgaccatagaggagatggagagcgcggccgacaacatcctcagcgggggcgccccacagagccccaatggcgccctcttaccctttgtgaactgcagggacgcggggcaggaccgagccgggggcgaagaggacgcgggctgtgtgcgcgcgcggggtcgaccgagtgaggaggagctccaggacagcagggtctacgtcagcagcctgtagtgggcgctgccagatgcgggcttttttttatttgtttcaatgttcctaatgggttcgtttcagaagtgcctcactgttctcgtgacctggagtt

SEQ ID NO: 113171 - DNA, 6535 bp, Homo sapiens
  Payload ID: 2138
  Gene Symbol: CACNA1C
  Gene Name: calcium channel, voltage-dependent, L type, alpha 1C subunit
  Uniprot ID: Q13936
  ENST ID: ENST00000399591
  CDS Start-End: 1-6441
atggtcaatgagaatacgaggatgtacattccagaggaaaaccaccaaggttccaactatgggagcccacgccccgcccatgccaacatgaatgccaatgcggcagcggggctggcccctgagcacatccccaccccgggggctgccctgtcgtggcaggcggccatcgacgcagcccggcaggctaagctgatgggcagcgctggcaatgcgaccatctccacagtcagctccacgcagcggaagcggcagcaatatgggaaacccaagaagcagggcagcaccacggccacacgcccgccccgagccctgctctgcctgaccctgaagaaccccatccggagggcctgcatcagcattgtcgaatggaaaccatttgaaataattattttactgactatttttgccaattgtgtggccttagcgatctatattccctttccagaagatgattccaacgccaccaattccaacctggaacgagtggaatatctctttctcataatttttacggtggaagcgtttttaaaagtaatcgcctatggactcctctttcaccccaatgcctacctccgcaacggctggaacctactagattttataattgtggttgtggggctttttagtgcaattttagaacaagcaaccaaagcagatggggcaaacgctctcggagggaaaggggccggatttgatgtgaaggcgctgagggccttccgcgtgctgcgccccctgcggctggtgtccggagtcccaagtctccaggtggtcctgaattccatcatcaaggccatggtccccctgctgcacatcgccctgcttgtgctgtttgtcatcatcatctacgccatcatcggcttggagctcttcatggggaagatgcacaagacctgctacaaccaggagggcatagcagatgttccagcagaagatgacccttccccttgtgcgctggaaacgggccacgggcggcagtgccagaacggcacggtgtgcaagcccggctgggatggtcccaagcacggcatcaccaactttgacaactttgccttcgccatgctcacggtgttccagtgcatcaccatggagggctggacggacgtgctgtactgggtcaatgatgccgtaggaagggactggccctggatctattttgttacactaatcatcatagggtcattttttgtacttaacttggttctcggtgtgcttagcggagagttttccaaagagagggagaaggccaaggcccggggagatttccagaagctgcgggagaagcagcagctagaagaggatctcaaaggctacctggattggatcactcaggccgaagacatcgatcctgagaatgaggacgaaggcatggatgaggagaagccccgaaacatgagcatgcccaccagtgagaccgagtccgtcaacaccgaaaacgtggctggaggtgacatcgagggagaaaactgcggggccaggctggcccaccggatctccaagtcaaagttcagccgctactggcgccggtggaatcggttctgcagaaggaagtgccgcgccgcagtcaagtctaatgtcttctactggctggtgattttcctggtgttcctcaacacgctcaccattgcctctgagcactacaaccagcccaactggctcacagaagtccaagacacggcaaacaaggccctgctggccctgttcacggcagagatgctcctgaagatgtacagcctgggcctgcaggcctacttcgtgtccctcttcaaccgctttgactgcttcgtcgtgtgtggcggcatcctggagaccatcctggtggagaccaagatcatgtccccactgggcatctccgtgctcagatgcgtccggctgctgaggattttcaagatcacgaggtactggaactccttgagcaacctggtggcatccttgctgaactctgtgcgctccatcgcctccctgctccttctcctcttcctcttcatcatcatcttctccctcctggggatgcagctctttggaggaaagttcaactttgatgagatgcagacccggaggagcacattcgataacttcccccagtccctcctcactgtgtttcagatcctgaccggggaggactggaattcggtgatgtatgatgggatcatggcttatggcggcccctcttttccagggatgttagtctgtatttacttcatcatcctcttcatctgtggaaactatatcctactgaatgtgttcttggccattgctgtggacaacctggctgatgctgagagcctcacatctgcccaaaaggaggaggaagaggagaaggagagaaagaagctggccaggactgccagcccagagaagaaacaagagttggtggagaagccggcagtgggggaatccaaggaggagaagattgagctgaaatccatcacggctgacggagagtctccacccgccaccaagatcaacatggatgacctccagcccaatgaaaatgaggataagagcccctaccccaacccagaaactacaggagaagaggatgaggaggagccagagatgcctgtcggccctcgcccacgaccactctctgagcttcaccttaaggaaaaggcagtgcccatgccagaagccagcgcgtttttcatcttcagctctaacaacaggtttcgcctccagtgccaccgcattgtcaatgacacgatcttcaccaacctgatcctcttcttcattctgctcagcagcatttccctggctgctgaggacccggtccagcacacctccttcaggaaccatatcctaggcaatgcagactatgtcttcactagtatctttacattagaaattatccttaagatgactgcttatggggctttcttgcacaagggttctttctgccggaactacttcaacatcctggacctgctggtggtcagcgtgtccctcatctcctttggcatccagtccagtgcaatcaatgtcgtgaagatcttgcgagtcctgcgagtactcaggcccctgagggccatcaacagggccaaggggctaaagcatgtggttcagtgtgtgtttgtcgccatccggaccatcgggaacatcgtgattgtcaccaccctgctgcagttcatgtttgcctgcatcggggtccagctcttcaagggaaagctgtacacctgttcagacagttccaagcagacagaggcggaatgcaagggcaactacatcacgtacaaagacggggaggttgaccaccccatcatccaaccccgcagctgggagaacagcaagtttgactttgacaatgttctggcagccatgatggccctcttcaccgtctccaccttcgaagggtggccagagctgctgtaccgctccatcgactcccacacggaagacaagggccccatctacaactaccgtgtggagatctccatcttcttcatcatctacatcatcatcatcgccttcttcatgatgaacatcttcgtgggcttcgtcatcgtcacctttcaggagcagggggagcaggagtacaagaactgtgagctggacaagaaccagcgacagtgcgtggaatacgccctcaaggcccggcccctgcggaggtacatccccaagaaccagcaccagtacaaagtgtggtacgtggtcaactccacctacttcgagtacctgatgttcgtcctcatcctgctcaacaccatctgcctggccatgcagcactacggccagagctgcctgttcaaaatcgccatgaacatcctcaacatgctcttcactggcctcttcaccgtggagatgatcctgaagctcattgccttcaaacccaagcactatttctgtgatgcatggaatacatttgacgccttgattgttgtgggtagcattgttgatatagcaatcaccgaggtaaacaacgcagaggaaaactcccgcatctccatcaccttcttccgcctgttccgggtcatgcgtctggtgaagctgctgagccgtggggagggcatccggacgctgctgtggaccttcatcaagtccttccaggccctgccctatgtggccctcctgatcgtgatgctgttcttcatctacgcggtgatcgggatgcaggtgtttgggaaaattgccctgaatgataccacagagatcaaccggaacaacaactttcagaccttcccccaggccgtgctgctcctcttcaggtgtgccaccggggaggcctggcaggacatcatgctggcctgcatgccaggcaagaagtgtgccccagagtccgagcccagcaacagcacggagggtgaaacaccctgtggtagcagctttgctgtcttctacttcatcagcttctacatgctctgtgccttcctgatcatcaacctctttgtagctgtcatcatggacaactttgactacctgacaagggactggtccatccttggtccccaccacctggatgagtttaaaagaatctgggcagagtatgaccctgaagccaagggtcgtatcaaacacctggatgtggtgaccctcctccggcggattcagccgccactaggttttgggaagctgtgccctcaccgcgtggcttgcaaacgcctggtctccatgaacatgcctctgaacagcgacgggacagtcatgttcaatgccaccctgtttgccctggtcaggacggccctgaggatcaaaacagaagagggacccagcccatcagaggcccaccaaggggctgaggatcctttccgccctgcagggaacctagaacaagccaatgaggagctgcgggcgatcatcaagaagatctggaagcggaccagcatgaagctgctggaccaggtggtgccccctgcaggtgatgatgaggtcaccgttggcaagttctacgccacgttcctgatccaggagtacttccggaagttcaagaagcgcaaagagcagggccttgtgggcaagccctcccagaggaacgcgctgtctctgcaggctggcttgcgcacactgcatgacatcgggcctgagatccgacgggccatctctggagatctcaccgctgaggaggagctggacaaggccatgaaggaggctgtgtccgctgcttctgaagatgacatcttcaggagggccggtggcctgttcggcaaccacgtcagctactaccaaagcgacggccggagcgccttcccccagaccttcaccactcagcgcccgctgcacatcaacaaggcgggcagcagccagggcgacactgagtcgccatcccacgagaagctggtggactccaccttcaccccgagcagctactcgtccaccggctccaacgccaacatcaacaacgccaacaacaccgccctgggtcgcctccctcgccccgccggctaccccagcacggtcagcactgtggagggccacgggccccccttgtcccctgccatccgggtgcaggaggtggcgtggaagctcagctccaacaggtgccactcccgggagagccaggcagccatggcgggtcaggaggagacgtctcaggatgagacctatgaagtgaagatgaaccatgacacggaggcctgcagtgagcccagcctgctctccacagagatgctctcctaccaggatgacgaaaatcggcaactgacgctcccagaggaggacaagagggacatccggcaatctccgaagaggggtttcctccgctctgcctcactaggtcgaagggcctccttccacctggaatgtctgaagcgacagaaggaccgagggggagacatctctcagaagacagtcctgcccttgcatctggttcatcatcaggcattggcagtggcaggcctgagccccctcctccagagaagccattcccctgcctcattccctaggccttttgccaccccaccagccacacctggcagccgaggctggcccccacagcccgtccccaccctgcggcttgagggggtcgagtccagtgagaaactcaacagcagcttcccatccatccactgcggctcctgggctgagaccacccccggtggcgggggcagcagcgccgcccggagagtccggcccgtctccctcatggtgcccagccaggctggggccccagggaggcagttccacggcagtgccagcagcctggtggaagcggtcttgatttcagaaggactggggcagtttgctcaagatcccaagttcatcgaggtcaccacccaggagctggccgacgcctgcgacatgaccatagaggagatggagagcgcggccgacaacatcctcagcgggggcgccccacagagccccaatggcgccctcttaccctttgtgaactgcagggacgcggggcaggaccgagccgggggcgaagaggacgcgggctgtgtgcgcgcgcggggtcgaccgagtgaggaggagctccaggacagcagggtctacgtcagcagcctgtagtgggcgctgccagatgcgggcttttttttatttgtttcaatgttcctaatgggttcgtttcagaagtgcctcactgttctcgtgacctggagtt

SEQ ID NO: 113172 - DNA, 6535 bp, Homo sapiens
  Payload ID: 2138
  Gene Symbol: CACNA1C
  Gene Name: calcium channel, voltage-dependent, L type, alpha 1C subunit
  Uniprot ID: Q13936
  ENST ID: ENST00000399595
  CDS Start-End: 1-6441
atggtcaatgagaatacgaggatgtacattccagaggaaaaccaccaaggttccaactatgggagcccacgccccgcccatgccaacatgaatgccaatgcggcagcggggctggcccctgagcacatccccaccccgggggctgccctgtcgtggcaggcggccatcgacgcagcccggcaggctaagctgatgggcagcgctggcaatgcgaccatctccacagtcagctccacgcagcggaagcggcagcaatatgggaaacccaagaagcagggcagcaccacggccacacgcccgccccgagccctgctctgcctgaccctgaagaaccccatccggagggcctgcatcagcattgtcgaatggaaaccatttgaaataattattttactgactatttttgccaattgtgtggccttagcgatctatattccctttccagaagatgattccaacgccaccaattccaacctggaacgagtggaatatctctttctcataatttttacggtggaagcgtttttaaaagtaatcgcctatggactcctctttcaccccaatgcctacctccgcaacggctggaacctactagattttataattgtggttgtggggctttttagtgcaattttagaacaagcaaccaaagcagatggggcaaacgctctcggagggaaaggggccggatttgatgtgaaggcgctgagggccttccgcgtgctgcgccccctgcggctggtgtccggagtcccaagtctccaggtggtcctgaattccatcatcaaggccatggtccccctgctgcacatcgccctgcttgtgctgtttgtcatcatcatctacgccatcatcggcttggagctcttcatggggaagatgcacaagacctgctacaaccaggagggcatagcagatgttccagcagaagatgacccttccccttgtgcgctggaaacgggccacgggcggcagtgccagaacggcacggtgtgcaagcccggctgggatggtcccaagcacggcatcaccaactttgacaactttgccttcgccatgctcacggtgttccagtgcatcaccatggagggctggacggacgtgctgtactgggtcaatgatgccgtaggaagggactggccctggatctattttgttacactaatcatcatagggtcattttttgtacttaacttggttctcggtgtgcttagcggagagttttccaaagagagggagaaggccaaggcccggggagatttccagaagctgcgggagaagcagcagctagaagaggatctcaaaggctacctggattggatcactcaggccgaagacatcgatcctgagaatgaggacgaaggcatggatgaggagaagccccgaaacatgagcatgcccaccagtgagaccgagtccgtcaacaccgaaaacgtggctggaggtgacatcgagggagaaaactgcggggccaggctggcccaccggatctccaagtcaaagttcagccgctactggcgccggtggaatcggttctgcagaaggaagtgccgcgccgcagtcaagtctaatgtcttctactggctggtgattttcctggtgttcctcaacacgctcaccattgcctctgagcactacaaccagcccaactggctcacagaagtccaagacacggcaaacaaggccctgctggccctgttcacggcagagatgctcctgaagatgtacagcctgggcctgcaggcctacttcgtgtccctcttcaaccgctttgactgcttcgtcgtgtgtggcggcatcctggagaccatcctggtggagaccaagatcatgtccccactgggcatctccgtgctcagatgcgtccggctgctgaggattttcaagatcacgaggtactggaactccttgagcaacctggtggcatccttgctgaactctgtgcgctccatcgcctccctgctccttctcctcttcctcttcatcatcatcttctccctcctggggatgcagctctttggaggaaagttcaactttgatgagatgcagacccggaggagcacattcgataacttcccccagtccctcctcactgtgtttcagatcctgaccggggaggactggaattcggtgatgtatgatgggatcatggcttatggcggcccctcttttccagggatgttagtctgtatttacttcatcatcctcttcatctgtggaaactatatcctactgaatgtgttcttggccattgctgtggacaacctggctgatgctgagagcctcacatctgcccaaaaggaggaggaagaggagaaggagagaaagaagctggccaggactgccagcccagagaagaaacaagagttggtggagaagccggcagtgggggaatccaaggaggagaagattgagctgaaatccatcacggctgacggagagtctccacccgccaccaagatcaacatggatgacctccagcccaatgaaaatgaggataagagcccctaccccaacccagaaactacaggagaagaggatgaggaggagccagagatgcctgtcggccctcgcccacgaccactctctgagcttcaccttaaggaaaaggcagtgcccatgccagaagccagcgcgtttttcatcttcagctctaacaacaggtttcgcctccagtgccaccgcattgtcaatgacacgatcttcaccaacctgatcctcttcttcattctgctcagcagcatttccctggctgctgaggacccggtccagcacacctccttcaggaaccatattctgttttattttgatattgtttttaccaccattttcaccattgaaattgctctgaagatgactgcttatggggctttcttgcacaagggttctttctgccggaactacttcaacatcctggacctgctggtggtcagcgtgtccctcatctcctttggcatccagtccagtgcaatcaatgtcgtgaagatcttgcgagtcctgcgagtactcaggcccctgagggccatcaacagggccaaggggctaaagcatgtggttcagtgtgtgtttgtcgccatccggaccatcgggaacatcgtgattgtcaccaccctgctgcagttcatgtttgcctgcatcggggtccagctcttcaagggaaagctgtacacctgttcagacagttccaagcagacagaggcggaatgcaagggcaactacatcacgtacaaagacggggaggttgaccaccccatcatccaaccccgcagctgggagaacagcaagtttgactttgacaatgttctggcagccatgatggccctcttcaccgtctccaccttcgaagggtggccagagctgctgtaccgctccatcgactcccacacggaagacaagggccccatctacaactaccgtgtggagatctccatcttcttcatcatctacatcatcatcatcgccttcttcatgatgaacatcttcgtgggcttcgtcatcgtcacctttcaggagcagggggagcaggagtacaagaactgtgagctggacaagaaccagcgacagtgcgtggaatacgccctcaaggcccggcccctgcggaggtacatccccaagaaccagcaccagtacaaagtgtggtacgtggtcaactccacctacttcgagtacctgatgttcgtcctcatcctgctcaacaccatctgcctggccatgcagcactacggccagagctgcctgttcaaaatcgccatgaacatcctcaacatgctcttcactggcctcttcaccgtggagatgatcctgaagctcattgccttcaaacccaagcactatttctgtgatgcatggaatacatttgacgccttgattgttgtgggtagcattgttgatatagcaatcaccgaggtaaacaacgcagaggaaaactcccgcatctccatcaccttcttccgcctgttccgggtcatgcgtctggtgaagctgctgagccgtggggagggcatccggacgctgctgtggaccttcatcaagtccttccaggccctgccctatgtggccctcctgatcgtgatgctgttcttcatctacgcggtgatcgggatgcaggtgtttgggaaaattgccctgaatgataccacagagatcaaccggaacaacaactttcagaccttcccccaggccgtgctgctcctcttcaggtgtgccaccggggaggcctggcaggacatcatgctggcctgcatgccaggcaagaagtgtgccccagagtccgagcccagcaacagcacggagggtgaaacaccctgtggtagcagctttgctgtcttctacttcatcagcttctacatgctctgtgccttcctgatcatcaacctctttgtagctgtcatcatggacaactttgactacctgacaagggactggtccatccttggtccccaccacctggatgagtttaaaagaatctgggcagagtatgaccctgaagccaagggtcgtatcaaacacctggatgtggtgaccctcctccggcggattcagccgccactaggttttgggaagctgtgccctcaccgcgtggcttgcaaacgcctggtctccatgaacatgcctctgaacagcgacgggacagtcatgttcaatgccaccctgtttgccctggtcaggacggccctgaggatcaaaacagaagagggacccagcccatcagaggcccaccaaggggctgaggatcctttccgccctgcagggaacctagaacaagccaatgaggagctgcgggcgatcatcaagaagatctggaagcggaccagcatgaagctgctggaccaggtggtgccccctgcaggtgatgatgaggtcaccgttggcaagttctacgccacgttcctgatccaggagtacttccggaagttcaagaagcgcaaagagcagggccttgtgggcaagccctcccagaggaacgcgctgtctctgcaggctggcttgcgcacactgcatgacatcgggcctgagatccgacgggccatctctggagatctcaccgctgaggaggagctggacaaggccatgaaggaggctgtgtccgctgcttctgaagatgacatcttcaggagggccggtggcctgttcggcaaccacgtcagctactaccaaagcgacggccggagcgccttcccccagaccttcaccactcagcgcccgctgcacatcaacaaggcgggcagcagccagggcgacactgagtcgccatcccacgagaagctggtggactccaccttcaccccgagcagctactcgtccaccggctccaacgccaacatcaacaacgccaacaacaccgccctgggtcgcctccctcgccccgccggctaccccagcacggtcagcactgtggagggccacgggccccccttgtcccctgccatccgggtgcaggaggtggcgtggaagctcagctccaacaggtgccactcccgggagagccaggcagccatggcgggtcaggaggagacgtctcaggatgagacctatgaagtgaagatgaaccatgacacggaggcctgcagtgagcccagcctgctctccacagagatgctctcctaccaggatgacgaaaatcggcaactgacgctcccagaggaggacaagagggacatccggcaatctccgaagaggggtttcctccgctctgcctcactaggtcgaagggcctccttccacctggaatgtctgaagcgacagaaggaccgagggggagacatctctcagaagacagtcctgcccttgcatctggttcatcatcaggcattggcagtggcaggcctgagccccctcctccagagaagccattcccctgcctcattccctaggccttttgccaccccaccagccacacctggcagccgaggctggcccccacagcccgtccccaccctgcggcttgagggggtcgagtccagtgagaaactcaacagcagcttcccatccatccactgcggctcctgggctgagaccacccccggtggcgggggcagcagcgccgcccggagagtccggcccgtctccctcatggtgcccagccaggctggggccccagggaggcagttccacggcagtgccagcagcctggtggaagcggtcttgatttcagaaggactggggcagtttgctcaagatcccaagttcatcgaggtcaccacccaggagctggccgacgcctgcgacatgaccatagaggagatggagagcgcggccgacaacatcctcagcgggggcgccccacagagccccaatggcgccctcttaccctttgtgaactgcagggacgcggggcaggaccgagccgggggcgaagaggacgcgggctgtgtgcgcgcgcggggtcgaccgagtgaggaggagctccaggacagcagggtctacgtcagcagcctgtagtgggcgctgccagatgcgggcttttttttatttgtttcaatgttcctaatgggttcgtttcagaagtgcctcactgttctcgtgacctggagtt

SEQ ID NO: 113173 - DNA, 6511 bp, Homo sapiens
  Payload ID: 2138
  Gene Symbol: CACNA1C
  Gene Name: calcium channel, voltage-dependent, L type, alpha 1C subunit
  Uniprot ID: Q13936
  ENST ID: ENST00000399597
  CDS Start-End: 1-6417
atggtcaatgagaatacgaggatgtacattccagaggaaaaccaccaaggttccaactatgggagcccacgccccgcccatgccaacatgaatgccaatgcggcagcggggctggcccctgagcacatccccaccccgggggctgccctgtcgtggcaggcggccatcgacgcagcccggcaggctaagctgatgggcagcgctggcaatgcgaccatctccacagtcagctccacgcagcggaagcggcagcaatatgggaaacccaagaagcagggcagcaccacggccacacgcccgccccgagccctgctctgcctgaccctgaagaaccccatccggagggcctgcatcagcattgtcgaatggaaaccatttgaaataattattttactgactatttttgccaattgtgtggccttagcgatctatattccctttccagaagatgattccaacgccaccaattccaacctggaacgagtggaatatctctttctcataatttttacggtggaagcgtttttaaaagtaatcgcctatggactcctctttcaccccaatgcctacctccgcaacggctggaacctactagattttataattgtggttgtggggctttttagtgcaattttagaacaagcaaccaaagcagatggggcaaacgctctcggagggaaaggggccggatttgatgtgaaggcgctgagggccttccgcgtgctgcgccccctgcggctggtgtccggagtcccaagtctccaggtggtcctgaattccatcatcaaggccatggtccccctgctgcacatcgccctgcttgtgctgtttgtcatcatcatctacgccatcatcggcttggagctcttcatggggaagatgcacaagacctgctacaaccaggagggcatagcagatgttccagcagaagatgacccttccccttgtgcgctggaaacgggccacgggcggcagtgccagaacggcacggtgtgcaagcccggctgggatggtcccaagcacggcatcaccaactttgacaactttgccttcgccatgctcacggtgttccagtgcatcaccatggagggctggacggacgtgctgtactgggtcaatgatgccgtaggaagggactggccctggatctattttgttacactaatcatcatagggtcattttttgtacttaacttggttctcggtgtgcttagcggagagttttccaaagagagggagaaggccaaggcccggggagatttccagaagctgcgggagaagcagcagctagaagaggatctcaaaggctacctggattggatcactcaggccgaagacatcgatcctgagaatgaggacgaaggcatggatgaggagaagccccgaaacatgagcatgcccaccagtgagaccgagtccgtcaacaccgaaaacgtggctggaggtgacatcgagggagaaaactgcggggccaggctggcccaccggatctccaagtcaaagttcagccgctactggcgccggtggaatcggttctgcagaaggaagtgccgcgccgcagtcaagtctaatgtcttctactggctggtgattttcctggtgttcctcaacacgctcaccattgcctctgagcactacaaccagcccaactggctcacagaagtccaagacacggcaaacaaggccctgctggccctgttcacggcagagatgctcctgaagatgtacagcctgggcctgcaggcctacttcgtgtccctcttcaaccgctttgactgcttcgtcgtgtgtggcggcatcctggagaccatcctggtggagaccaagatcatgtccccactgggcatctccgtgctcagatgcgtccggctgctgaggattttcaagatcacgaggtactggaactccttgagcaacctggtggcatccttgctgaactctgtgcgctccatcgcctccctgctccttctcctcttcctcttcatcatcatcttctccctcctggggatgcagctctttggaggaaagttcaactttgatgagatgcagacccggaggagcacattcgataacttcccccagtccctcctcactgtgtttcagatcctgaccggggaggactggaattcggtgatgtatgatgggatcatggcttatggcggcccctcttttccagggatgttagtctgtatttacttcatcatcctcttcatctgtggaaactatatcctactgaatgtgttcttggccattgctgtggacaacctggctgatgctgagagcctcacatctgcccaaaaggaggaggaagaggagaaggagagaaagaagctggccaggactgccagcccagagaagaaacaagagttggtggagaagccggcagtgggggaatccaaggaggagaagattgagctgaaatccatcacggctgacggagagtctccacccgccaccaagatcaacatggatgacctccagcccaatgaaaatgaggataagagcccctaccccaacccagaaactacaggagaagaggatgaggaggagccagagatgcctgtcggccctcgcccacgaccactctctgagcttcaccttaaggaaaaggcagtgcccatgccagaagccagcgcgtttttcatcttcagctctaacaacaggtttcgcctccagtgccaccgcattgtcaatgacacgatcttcaccaacctgatcctcttcttcattctgctcagcagcatttccctggctgctgaggacccggtccagcacacctccttcaggaaccatattctgttttattttgatattgtttttaccaccattttcaccattgaaattgctctgaagatgactgcttatggggctttcttgcacaagggttctttctgccggaactacttcaacatcctggacctgctggtggtcagcgtgtccctcatctcctttggcatccagtccagtgcaatcaatgtcgtgaagatcttgcgagtcctgcgagtactcaggcccctgagggccatcaacagggccaaggggctaaagcatgtggttcagtgtgtgtttgtcgccatccggaccatcgggaacatcgtgattgtcaccaccctgctgcagttcatgtttgcctgcatcggggtccagctcttcaagggaaagctgtacacctgttcagacagttccaagcagacagaggcggaatgcaagggcaactacatcacgtacaaagacggggaggttgaccaccccatcatccaaccccgcagctgggagaacagcaagtttgactttgacaatgttctggcagccatgatggccctcttcaccgtctccaccttcgaagggtggccagagctgctgtaccgctccatcgactcccacacggaagacaagggccccatctacaactaccgtgtggagatctccatcttcttcatcatctacatcatcatcatcgccttcttcatgatgaacatcttcgtgggcttcgtcatcgtcacctttcaggagcagggggagcaggagtacaagaactgtgagctggacaagaaccagcgacagtgcgtggaatacgccctcaaggcccggcccctgcggaggtacatccccaagaaccagcaccagtacaaagtgtggtacgtggtcaactccacctacttcgagtacctgatgttcgtcctcatcctgctcaacaccatctgcctggccatgcagcactacggccagagctgcctgttcaaaatcgccatgaacatcctcaacatgctcttcactggcctcttcaccgtggagatgatcctgaagctcattgccttcaaacccaagggttactttagtgatccctggaatgtttttgacttcctcatcgtaattggcagcataattgacgtcattctcagtgagactaatccagctgaacatacccaatgctctccctctatgaacgcagaggaaaactcccgcatctccatcaccttcttccgcctgttccgggtcatgcgtctggtgaagctgctgagccgtggggagggcatccggacgctgctgtggaccttcatcaagtccttccaggccctgccctatgtggccctcctgatcgtgatgctgttcttcatctacgcggtgatcgggatgcaggtgtttgggaaaattgccctgaatgataccacagagatcaaccggaacaacaactttcagaccttcccccaggccgtgctgctcctcttcaggtgtgccaccggggaggcctggcaggacatcatgctggcctgcatgccaggcaagaagtgtgccccagagtccgagcccagcaacagcacggagggtgaaacaccctgtggtagcagctttgctgtcttctacttcatcagcttctacatgctctgtgccttcctgatcatcaacctctttgtagctgtcatcatggacaactttgactacctgacaagggactggtccatccttggtccccaccacctggatgagtttaaaagaatctgggcagagtatgaccctgaagccaagggtcgtatcaaacacctggatgtggtgaccctcctccggcggattcagccgccactaggttttgggaagctgtgccctcaccgcgtggcttgcaaacgcctggtctccatgaacatgcctctgaacagcgacgggacagtcatgttcaatgccaccctgtttgccctggtcaggacggccctgaggatcaaaacagaagggaacctagaacaagccaatgaggagctgcgggcgatcatcaagaagatctggaagcggaccagcatgaagctgctggaccaggtggtgccccctgcaggtgatgatgaggtcaccgttggcaagttctacgccacgttcctgatccaggagtacttccggaagttcaagaagcgcaaagagcagggccttgtgggcaagccctcccagaggaacgcgctgtctctgcaggctggcttgcgcacactgcatgacatcgggcctgagatccgacgggccatctctggagatctcaccgctgaggaggagctggacaaggccatgaaggaggctgtgtccgctgcttctgaagatgacatcttcaggagggccggtggcctgttcggcaaccacgtcagctactaccaaagcgacggccggagcgccttcccccagaccttcaccactcagcgcccgctgcacatcaacaaggcgggcagcagccagggcgacactgagtcgccatcccacgagaagctggtggactccaccttcaccccgagcagctactcgtccaccggctccaacgccaacatcaacaacgccaacaacaccgccctgggtcgcctccctcgccccgccggctaccccagcacggtcagcactgtggagggccacgggccccccttgtcccctgccatccgggtgcaggaggtggcgtggaagctcagctccaacaggtgccactcccgggagagccaggcagccatggcgggtcaggaggagacgtctcaggatgagacctatgaagtgaagatgaaccatgacacggaggcctgcagtgagcccagcctgctctccacagagatgctctcctaccaggatgacgaaaatcggcaactgacgctcccagaggaggacaagagggacatccggcaatctccgaagaggggtttcctccgctctgcctcactaggtcgaagggcctccttccacctggaatgtctgaagcgacagaaggaccgagggggagacatctctcagaagacagtcctgcccttgcatctggttcatcatcaggcattggcagtggcaggcctgagccccctcctccagagaagccattcccctgcctcattccctaggccttttgccaccccaccagccacacctggcagccgaggctggcccccacagcccgtccccaccctgcggcttgagggggtcgagtccagtgagaaactcaacagcagcttcccatccatccactgcggctcctgggctgagaccacccccggtggcgggggcagcagcgccgcccggagagtccggcccgtctccctcatggtgcccagccaggctggggccccagggaggcagttccacggcagtgccagcagcctggtggaagcggtcttgatttcagaaggactggggcagtttgctcaagatcccaagttcatcgaggtcaccacccaggagctggccgacgcctgcgacatgaccatagaggagatggagagcgcggccgacaacatcctcagcgggggcgccccacagagccccaatggcgccctcttaccctttgtgaactgcagggacgcggggcaggaccgagccgggggcgaagaggacgcgggctgtgtgcgcgcgcggggtcgaccgagtgaggaggagctccaggacagcagggtctacgtcagcagcctgtagtgggcgctgccagatgcgggcttttttttatttgtttcaatgttcctaatgggttcgtttcagaagtgcctcactgttctcgtgacctggagtt

SEQ ID NO: 113174 - DNA, 6511 bp, Homo sapiens
  Payload ID: 2138
  Gene Symbol: CACNA1C
  Gene Name: calcium channel, voltage-dependent, L type, alpha 1C subunit
  Uniprot ID: Q13936
  ENST ID: ENST00000399601
  CDS Start-End: 1-6417
atggtcaatgagaatacgaggatgtacattccagaggaaaaccaccaaggttccaactatgggagcccacgccccgcccatgccaacatgaatgccaatgcggcagcggggctggcccctgagcacatccccaccccgggggctgccctgtcgtggcaggcggccatcgacgcagcccggcaggctaagctgatgggcagcgctggcaatgcgaccatctccacagtcagctccacgcagcggaagcggcagcaatatgggaaacccaagaagcagggcagcaccacggccacacgcccgccccgagccctgctctgcctgaccctgaagaaccccatccggagggcctgcatcagcattgtcgaatggaaaccatttgaaataattattttactgactatttttgccaattgtgtggccttagcgatctatattccctttccagaagatgattccaacgccaccaattccaacctggaacgagtggaatatctctttctcataatttttacggtggaagcgtttttaaaagtaatcgcctatggactcctctttcaccccaatgcctacctccgcaacggctggaacctactagattttataattgtggttgtggggctttttagtgcaattttagaacaagcaaccaaagcagatggggcaaacgctctcggagggaaaggggccggatttgatgtgaaggcgctgagggccttccgcgtgctgcgccccctgcggctggtgtccggagtcccaagtctccaggtggtcctgaattccatcatcaaggccatggtccccctgctgcacatcgccctgcttgtgctgtttgtcatcatcatctacgccatcatcggcttggagctcttcatggggaagatgcacaagacctgctacaaccaggagggcatagcagatgttccagcagaagatgacccttccccttgtgcgctggaaacgggccacgggcggcagtgccagaacggcacggtgtgcaagcccggctgggatggtcccaagcacggcatcaccaactttgacaactttgccttcgccatgctcacggtgttccagtgcatcaccatggagggctggacggacgtgctgtactgggtcaatgatgccgtaggaagggactggccctggatctattttgttacactaatcatcatagggtcattttttgtacttaacttggttctcggtgtgcttagcggagagttttccaaagagagggagaaggccaaggcccggggagatttccagaagctgcgggagaagcagcagctagaagaggatctcaaaggctacctggattggatcactcaggccgaagacatcgatcctgagaatgaggacgaaggcatggatgaggagaagccccgaaacatgagcatgcccaccagtgagaccgagtccgtcaacaccgaaaacgtggctggaggtgacatcgagggagaaaactgcggggccaggctggcccaccggatctccaagtcaaagttcagccgctactggcgccggtggaatcggttctgcagaaggaagtgccgcgccgcagtcaagtctaatgtcttctactggctggtgattttcctggtgttcctcaacacgctcaccattgcctctgagcactacaaccagcccaactggctcacagaagtccaagacacggcaaacaaggccctgctggccctgttcacggcagagatgctcctgaagatgtacagcctgggcctgcaggcctacttcgtgtccctcttcaaccgctttgactgcttcgtcgtgtgtggcggcatcctggagaccatcctggtggagaccaagatcatgtccccactgggcatctccgtgctcagatgcgtccggctgctgaggattttcaagatcacgaggtactggaactccttgagcaacctggtggcatccttgctgaactctgtgcgctccatcgcctccctgctccttctcctcttcctcttcatcatcatcttctccctcctggggatgcagctctttggaggaaagttcaactttgatgagatgcagacccggaggagcacattcgataacttcccccagtccctcctcactgtgtttcagatcctgaccggggaggactggaattcggtgatgtatgatgggatcatggcttatggcggcccctcttttccagggatgttagtctgtatttacttcatcatcctcttcatctgtggaaactatatcctactgaatgtgttcttggccattgctgtggacaacctggctgatgctgagagcctcacatctgcccaaaaggaggaggaagaggagaaggagagaaagaagctggccaggactgccagcccagagaagaaacaagagttggtggagaagccggcagtgggggaatccaaggaggagaagattgagctgaaatccatcacggctgacggagagtctccacccgccaccaagatcaacatggatgacctccagcccaatgaaaatgaggataagagcccctaccccaacccagaaactacaggagaagaggatgaggaggagccagagatgcctgtcggccctcgcccacgaccactctctgagcttcaccttaaggaaaaggcagtgcccatgccagaagccagcgcgtttttcatcttcagctctaacaacaggtttcgcctccagtgccaccgcattgtcaatgacacgatcttcaccaacctgatcctcttcttcattctgctcagcagcatttccctggctgctgaggacccggtccagcacacctccttcaggaaccatatcctaggcaatgcagactatgtcttcactagtatctttacattagaaattatccttaagatgactgcttatggggctttcttgcacaagggttctttctgccggaactacttcaacatcctggacctgctggtggtcagcgtgtccctcatctcctttggcatccagtccagtgcaatcaatgtcgtgaagatcttgcgagtcctgcgagtactcaggcccctgagggccatcaacagggccaaggggctaaagcatgtggttcagtgtgtgtttgtcgccatccggaccatcgggaacatcgtgattgtcaccaccctgctgcagttcatgtttgcctgcatcggggtccagctcttcaagggaaagctgtacacctgttcagacagttccaagcagacagaggcggaatgcaagggcaactacatcacgtacaaagacggggaggttgaccaccccatcatccaaccccgcagctgggagaacagcaagtttgactttgacaatgttctggcagccatgatggccctcttcaccgtctccaccttcgaagggtggccagagctgctgtaccgctccatcgactcccacacggaagacaagggccccatctacaactaccgtgtggagatctccatcttcttcatcatctacatcatcatcatcgccttcttcatgatgaacatcttcgtgggcttcgtcatcgtcacctttcaggagcagggggagcaggagtacaagaactgtgagctggacaagaaccagcgacagtgcgtggaatacgccctcaaggcccggcccctgcggaggtacatccccaagaaccagcaccagtacaaagtgtggtacgtggtcaactccacctacttcgagtacctgatgttcgtcctcatcctgctcaacaccatctgcctggccatgcagcactacggccagagctgcctgttcaaaatcgccatgaacatcctcaacatgctcttcactggcctcttcaccgtggagatgatcctgaagctcattgccttcaaacccaagcactatttctgtgatgcatggaatacatttgacgccttgattgttgtgggtagcattgttgatatagcaatcaccgaggtaaacccagctgaacatacccaatgctctccctctatgaacgcagaggaaaactcccgcatctccatcaccttcttccgcctgttccgggtcatgcgtctggtgaagctgctgagccgtggggagggcatccggacgctgctgtggaccttcatcaagtccttccaggccctgccctatgtggccctcctgatcgtgatgctgttcttcatctacgcggtgatcgggatgcaggtgtttgggaaaattgccctgaatgataccacagagatcaaccggaacaacaactttcagaccttcccccaggccgtgctgctcctcttcaggtgtgccaccggggaggcctggcaggacatcatgctggcctgcatgccaggcaagaagtgtgccccagagtccgagcccagcaacagcacggagggtgaaacaccctgtggtagcagctttgctgtcttctacttcatcagcttctacatgctctgtgccttcctgatcatcaacctctttgtagctgtcatcatggacaactttgactacctgacaagggactggtccatccttggtccccaccacctggatgagtttaaaagaatctgggcagagtatgaccctgaagccaagggtcgtatcaaacacctggatgtggtgaccctcctccggcggattcagccgccactaggttttgggaagctgtgccctcaccgcgtggcttgcaaacgcctggtctccatgaacatgcctctgaacagcgacgggacagtcatgttcaatgccaccctgtttgccctggtcaggacggccctgaggatcaaaacagaagggaacctagaacaagccaatgaggagctgcgggcgatcatcaagaagatctggaagcggaccagcatgaagctgctggaccaggtggtgccccctgcaggtgatgatgaggtcaccgttggcaagttctacgccacgttcctgatccaggagtacttccggaagttcaagaagcgcaaagagcagggccttgtgggcaagccctcccagaggaacgcgctgtctctgcaggctggcttgcgcacactgcatgacatcgggcctgagatccgacgggccatctctggagatctcaccgctgaggaggagctggacaaggccatgaaggaggctgtgtccgctgcttctgaagatgacatcttcaggagggccggtggcctgttcggcaaccacgtcagctactaccaaagcgacggccggagcgccttcccccagaccttcaccactcagcgcccgctgcacatcaacaaggcgggcagcagccagggcgacactgagtcgccatcccacgagaagctggtggactccaccttcaccccgagcagctactcgtccaccggctccaacgccaacatcaacaacgccaacaacaccgccctgggtcgcctccctcgccccgccggctaccccagcacggtcagcactgtggagggccacgggccccccttgtcccctgccatccgggtgcaggaggtggcgtggaagctcagctccaacaggtgccactcccgggagagccaggcagccatggcgggtcaggaggagacgtctcaggatgagacctatgaagtgaagatgaaccatgacacggaggcctgcagtgagcccagcctgctctccacagagatgctctcctaccaggatgacgaaaatcggcaactgacgctcccagaggaggacaagagggacatccggcaatctccgaagaggggtttcctccgctctgcctcactaggtcgaagggcctccttccacctggaatgtctgaagcgacagaaggaccgagggggagacatctctcagaagacagtcctgcccttgcatctggttcatcatcaggcattggcagtggcaggcctgagccccctcctccagagaagccattcccctgcctcattccctaggccttttgccaccccaccagccacacctggcagccgaggctggcccccacagcccgtccccaccctgcggcttgagggggtcgagtccagtgagaaactcaacagcagcttcccatccatccactgcggctcctgggctgagaccacccccggtggcgggggcagcagcgccgcccggagagtccggcccgtctccctcatggtgcccagccaggctggggccccagggaggcagttccacggcagtgccagcagcctggtggaagcggtcttgatttcagaaggactggggcagtttgctcaagatcccaagttcatcgaggtcaccacccaggagctggccgacgcctgcgacatgaccatagaggagatggagagcgcggccgacaacatcctcagcgggggcgccccacagagccccaatggcgccctcttaccctttgtgaactgcagggacgcggggcaggaccgagccgggggcgaagaggacgcgggctgtgtgcgcgcgcggggtcgaccgagtgaggaggagctccaggacagcagggtctacgtcagcagcctgtagtgggcgctgccagatgcgggcttttttttatttgtttcaatgttcctaatgggttcgtttcagaagtgcctcactgttctcgtgacctggagtt

SEQ ID NO: 113175 - DNA, 7377 bp, Homo sapiens
  Payload ID: 2138
  Gene Symbol: CACNA1C
  Gene Name: calcium channel, voltage-dependent, L type, alpha 1C subunit
  Uniprot ID: Q13936
  ENST ID: ENST00000399603
  CDS Start-End: 1-6417
atggtcaatgagaatacgaggatgtacattccagaggaaaaccaccaaggttccaactatgggagcccacgccccgcccatgccaacatgaatgccaatgcggcagcggggctggcccctgagcacatccccaccccgggggctgccctgtcgtggcaggcggccatcgacgcagcccggcaggctaagctgatgggcagcgctggcaatgcgaccatctccacagtcagctccacgcagcggaagcggcagcaatatgggaaacccaagaagcagggcagcaccacggccacacgcccgccccgagccctgctctgcctgaccctgaagaaccccatccggagggcctgcatcagcattgtcgaatggaaaccatttgaaataattattttactgactatttttgccaattgtgtggccttagcgatctatattccctttccagaagatgattccaacgccaccaattccaacctggaacgagtggaatatctctttctcataatttttacggtggaagcgtttttaaaagtaatcgcctatggactcctctttcaccccaatgcctacctccgcaacggctggaacctactagattttataattgtggttgtggggctttttagtgcaattttagaacaagcaaccaaagcagatggggcaaacgctctcggagggaaaggggccggatttgatgtgaaggcgctgagggccttccgcgtgctgcgccccctgcggctggtgtccggagtcccaagtctccaggtggtcctgaattccatcatcaaggccatggtccccctgctgcacatcgccctgcttgtgctgtttgtcatcatcatctacgccatcatcggcttggagctcttcatggggaagatgcacaagacctgctacaaccaggagggcatagcagatgttccagcagaagatgacccttccccttgtgcgctggaaacgggccacgggcggcagtgccagaacggcacggtgtgcaagcccggctgggatggtcccaagcacggcatcaccaactttgacaactttgccttcgccatgctcacggtgttccagtgcatcaccatggagggctggacggacgtgctgtactggatgcaggacgctatgggctatgagttaccctgggtgtattttgtcagtctggtcatctttggatcctttttcgttctaaatctggttctcggtgtgttgagcggagagttttccaaagagagggagaaggccaaggcccggggagatttccagaagctgcgggagaagcagcagctagaagaggatctcaaaggctacctggattggatcactcaggccgaagacatcgatcctgagaatgaggacgaaggcatggatgaggagaagccccgaaacatgagcatgcccaccagtgagaccgagtccgtcaacaccgaaaacgtggctggaggtgacatcgagggagaaaactgcggggccaggctggcccaccggatctccaagtcaaagttcagccgctactggcgccggtggaatcggttctgcagaaggaagtgccgcgccgcagtcaagtctaatgtcttctactggctggtgattttcctggtgttcctcaacacgctcaccattgcctctgagcactacaaccagcccaactggctcacagaagtccaagacacggcaaacaaggccctgctggccctgttcacggcagagatgctcctgaagatgtacagcctgggcctgcaggcctacttcgtgtccctcttcaaccgctttgactgcttcgtcgtgtgtggcggcatcctggagaccatcctggtggagaccaagatcatgtccccactgggcatctccgtgctcagatgcgtccggctgctgaggattttcaagatcacgaggtactggaactccttgagcaacctggtggcatccttgctgaactctgtgcgctccatcgcctccctgctccttctcctcttcctcttcatcatcatcttctccctcctggggatgcagctctttggaggaaagttcaactttgatgagatgcagacccggaggagcacattcgataacttcccccagtccctcctcactgtgtttcagatcctgaccggggaggactggaattcggtgatgtatgatgggatcatggcttatggcggcccctcttttccagggatgttagtctgtatttacttcatcatcctcttcatctgtggaaactatatcctactgaatgtgttcttggccattgctgtggacaacctggctgatgctgagagcctcacatctgcccaaaaggaggaggaagaggagaaggagagaaagaagctggccaggactgccagcccagagaagaaacaagagttggtggagaagccggcagtgggggaatccaaggaggagaagattgagctgaaatccatcacggctgacggagagtctccacccgccaccaagatcaacatggatgacctccagcccaatgaaaatgaggataagagcccctaccccaacccagaaactacaggagaagaggatgaggaggagccagagatgcctgtcggccctcgcccacgaccactctctgagcttcaccttaaggaaaaggcagtgcccatgccagaagccagcgcgtttttcatcttcagctctaacaacaggtttcgcctccagtgccaccgcattgtcaatgacacgatcttcaccaacctgatcctcttcttcattctgctcagcagcatttccctggctgctgaggacccggtccagcacacctccttcaggaaccatattctgttttattttgatattgtttttaccaccattttcaccattgaaattgctctgaagatgactgcttatggggctttcttgcacaagggttctttctgccggaactacttcaacatcctggacctgctggtggtcagcgtgtccctcatctcctttggcatccagtccagtgcaatcaatgtcgtgaagatcttgcgagtcctgcgagtactcaggcccctgagggccatcaacagggccaaggggctaaagcatgtggttcagtgtgtgtttgtcgccatccggaccatcgggaacatcgtgattgtcaccaccctgctgcagttcatgtttgcctgcatcggggtccagctcttcaagggaaagctgtacacctgttcagacagttccaagcagacagaggcggaatgcaagggcaactacatcacgtacaaagacggggaggttgaccaccccatcatccaaccccgcagctgggagaacagcaagtttgactttgacaatgttctggcagccatgatggccctcttcaccgtctccaccttcgaagggtggccagagctgctgtaccgctccatcgactcccacacggaagacaagggccccatctacaactaccgtgtggagatctccatcttcttcatcatctacatcatcatcatcgccttcttcatgatgaacatcttcgtgggcttcgtcatcgtcacctttcaggagcagggggagcaggagtacaagaactgtgagctggacaagaaccagcgacagtgcgtggaatacgccctcaaggcccggcccctgcggaggtacatccccaagaaccagcaccagtacaaagtgtggtacgtggtcaactccacctacttcgagtacctgatgttcgtcctcatcctgctcaacaccatctgcctggccatgcagcactacggccagagctgcctgttcaaaatcgccatgaacatcctcaacatgctcttcactggcctcttcaccgtggagatgatcctgaagctcattgccttcaaacccaagggttactttagtgatccctggaatgtttttgacttcctcatcgtaattggcagcataattgacgtcattctcagtgagactaatccagctgaacatacccaatgctctccctctatgaacgcagaggaaaactcccgcatctccatcaccttcttccgcctgttccgggtcatgcgtctggtgaagctgctgagccgtggggagggcatccggacgctgctgtggaccttcatcaagtccttccaggccctgccctatgtggccctcctgatcgtgatgctgttcttcatctacgcggtgatcgggatgcaggtgtttgggaaaattgccctgaatgataccacagagatcaaccggaacaacaactttcagaccttcccccaggccgtgctgctcctcttcaggtgtgccaccggggaggcctggcaggacatcatgctggcctgcatgccaggcaagaagtgtgccccagagtccgagcccagcaacagcacggagggtgaaacaccctgtggtagcagctttgctgtcttctacttcatcagcttctacatgctctgtgccttcctgatcatcaacctctttgtagctgtcatcatggacaactttgactacctgacaagggactggtccatccttggtccccaccacctggatgagtttaaaagaatctgggcagagtatgaccctgaagccaagggtcgtatcaaacacctggatgtggtgaccctcctccggcggattcagccgccactaggttttgggaagctgtgccctcaccgcgtggcttgcaaacgcctggtctccatgaacatgcctctgaacagcgacgggacagtcatgttcaatgccaccctgtttgccctggtcaggacggccctgaggatcaaaacagaagggaacctagaacaagccaatgaggagctgcgggcgatcatcaagaagatctggaagcggaccagcatgaagctgctggaccaggtggtgccccctgcaggtgatgatgaggtcaccgttggcaagttctacgccacgttcctgatccaggagtacttccggaagttcaagaagcgcaaagagcagggccttgtgggcaagccctcccagaggaacgcgctgtctctgcaggctggcttgcgcacactgcatgacatcgggcctgagatccgacgggccatctctggagatctcaccgctgaggaggagctggacaaggccatgaaggaggctgtgtccgctgcttctgaagatgacatcttcaggagggccggtggcctgttcggcaaccacgtcagctactaccaaagcgacggccggagcgccttcccccagaccttcaccactcagcgcccgctgcacatcaacaaggcgggcagcagccagggcgacactgagtcgccatcccacgagaagctggtggactccaccttcaccccgagcagctactcgtccaccggctccaacgccaacatcaacaacgccaacaacaccgccctgggtcgcctccctcgccccgccggctaccccagcacggtcagcactgtggagggccacgggccccccttgtcccctgccatccgggtgcaggaggtggcgtggaagctcagctccaacaggtgccactcccgggagagccaggcagccatggcgggtcaggaggagacgtctcaggatgagacctatgaagtgaagatgaaccatgacacggaggcctgcagtgagcccagcctgctctccacagagatgctctcctaccaggatgacgaaaatcggcaactgacgctcccagaggaggacaagagggacatccggcaatctccgaagaggggtttcctccgctctgcctcactaggtcgaagggcctccttccacctggaatgtctgaagcgacagaaggaccgagggggagacatctctcagaagacagtcctgcccttgcatctggttcatcatcaggcattggcagtggcaggcctgagccccctcctccagagaagccattcccctgcctcattccctaggccttttgccaccccaccagccacacctggcagccgaggctggcccccacagcccgtccccaccctgcggcttgagggggtcgagtccagtgagaaactcaacagcagcttcccatccatccactgcggctcctgggctgagaccacccccggtggcgggggcagcagcgccgcccggagagtccggcccgtctccctcatggtgcccagccaggctggggccccagggaggcagttccacggcagtgccagcagcctggtggaagcggtcttgatttcagaaggactggggcagtttgctcaagatcccaagttcatcgaggtcaccacccaggagctggccgacgcctgcgacatgaccatagaggagatggagagcgcggccgacaacatcctcagcgggggcgccccacagagccccaatggcgccctcttaccctttgtgaactgcagggacgcggggcaggaccgagccgggggcgaagaggacgcgggctgtgtgcgcgcgcggggtcgaccgagtgaggaggagctccaggacagcagggtctacgtcagcagcctgtagtgggcgctgccagatgcgggcttttttttatttgtttcaatgttcctaatgggttcgtttcagaagtgcctcactgttctcgtgacctggagttaaccggaacagcgtcttcattcatttctgttgggaccagacgcggagcctgggtgcgcgagccgccctccgggaggaaggcgcccggctgcgtctgcagaggcggggagaggaggcggcgagggtcccggggcgcgaggaaggcgcctgccctctcccagctcgcaggccccgggcccggccgcgcctccgcggggagagcaccccggcttcccgcgcgccctcaccaaaaggaccctacagcaaacgggtgtctttcgactctgcttgtagaaaccatttgcacatattctgtacgagcctcgctgtctccctagagccagggccctgcggatttggagaagggagcggggcaggacttccaggaggaccccaacccggcccggagagggaggaggaggcctccaggggcgcggagctctggggatgggcgtcgggccggcagtggtgcggctcactccgtccctgcccacctgcgacgggatcccccgaccggcacgggccacgccgagctcccggccagccgccggcccgcaggcagcgcgagggaggagctgcgccgccggctccgcccaaccaggtggtgctgagcttccgctgagcgctcttttgttttgtggtttgacacttttcttgacagcatgttgcagtttcttttcggttttggttttttttaaatgttttattttgctttcccagcgggaggggaggaagaagagtgtttacaaagtcctgtagccccctcacctttctgttttcacttttgccaatgtacatcgggtttggttttcttgtattatttaaacggttgtggtttcctttttccacggaggttcaatagaagccgctgcaggagagttttaccaa

SEQ ID NO: 113176 - DNA, 6571 bp, Homo sapiens
  Payload ID: 2138
  Gene Symbol: CACNA1C
  Gene Name: calcium channel, voltage-dependent, L type, alpha 1C subunit
  Uniprot ID: Q13936
  ENST ID: ENST00000399606
  CDS Start-End: 1-6477
atggtcaatgagaatacgaggatgtacattccagaggaaaaccaccaaggttccaactatgggagcccacgccccgcccatgccaacatgaatgccaatgcggcagcggggctggcccctgagcacatccccaccccgggggctgccctgtcgtggcaggcggccatcgacgcagcccggcaggctaagctgatgggcagcgctggcaatgcgaccatctccacagtcagctccacgcagcggaagcggcagcaatatgggaaacccaagaagcagggcagcaccacggccacacgcccgccccgagccctgctctgcctgaccctgaagaaccccatccggagggcctgcatcagcattgtcgaatggaaaccatttgaaataattattttactgactatttttgccaattgtgtggccttagcgatctatattccctttccagaagatgattccaacgccaccaattccaacctggaacgagtggaatatctctttctcataatttttacggtggaagcgtttttaaaagtaatcgcctatggactcctctttcaccccaatgcctacctccgcaacggctggaacctactagattttataattgtggttgtggggctttttagtgcaattttagaacaagcaaccaaagcagatggggcaaacgctctcggagggaaaggggccggatttgatgtgaaggcgctgagggccttccgcgtgctgcgccccctgcggctggtgtccggagtcccaagtctccaggtggtcctgaattccatcatcaaggccatggtccccctgctgcacatcgccctgcttgtgctgtttgtcatcatcatctacgccatcatcggcttggagctcttcatggggaagatgcacaagacctgctacaaccaggagggcatagcagatgttccagcagaagatgacccttccccttgtgcgctggaaacgggccacgggcggcagtgccagaacggcacggtgtgcaagcccggctgggatggtcccaagcacggcatcaccaactttgacaactttgccttcgccatgctcacggtgttccagtgcatcaccatggagggctggacggacgtgctgtactgggtcaatgatgccgtaggaagggactggccctggatctattttgttacactaatcatcatagggtcattttttgtacttaacttggttctcggtgtgcttagcggagagttttccaaagagagggagaaggccaaggcccggggagatttccagaagctgcgggagaagcagcagctagaagaggatctcaaaggctacctggattggatcactcaggccgaagacatcgatcctgagaatgaggacgaaggcatggatgaggagaagccccgaaacatgagcatgcccaccagtgagaccgagtccgtcaacaccgaaaacgtggctggaggtgacatcgagggagaaaactgcggggccaggctggcccaccggatctccaagtcaaagttcagccgctactggcgccggtggaatcggttctgcagaaggaagtgccgcgccgcagtcaagtctaatgtcttctactggctggtgattttcctggtgttcctcaacacgctcaccattgcctctgagcactacaaccagcccaactggctcacagaagtccaagacacggcaaacaaggccctgctggccctgttcacggcagagatgctcctgaagatgtacagcctgggcctgcaggcctacttcgtgtccctcttcaaccgctttgactgcttcgtcgtgtgtggcggcatcctggagaccatcctggtggagaccaagatcatgtccccactgggcatctccgtgctcagatgcgtccggctgctgaggattttcaagatcacgaggtactggaactccttgagcaacctggtggcatccttgctgaactctgtgcgctccatcgcctccctgctccttctcctcttcctcttcatcatcatcttctccctcctggggatgcagctctttggaggaaagttcaactttgatgagatgcagacccggaggagcacattcgataacttcccccagtccctcctcactgtgtttcagatcctgaccggggaggactggaattcggtgatgtatgatgggatcatggcttatggcggcccctcttttccagggatgttagtctgtatttacttcatcatcctcttcatctgtggaaactatatcctactgaatgtgttcttggccattgctgtggacaacctggctgatgctgagagcctcacatctgcccaaaaggaggaggaagaggagaaggagagaaagaagctggccaggactgccagcccagagaagaaacaagagttggtggagaagccggcagtgggggaatccaaggaggagaagattgagctgaaatccatcacggctgacggagagtctccacccgccaccaagatcaacatggatgacctccagcccaatgaaaatgaggataagagcccctaccccaacccagaaactacaggagaagaggatgaggaggagccagagatgcctgtcggccctcgcccacgaccactctctgagcttcaccttaaggaaaaggcagtgcccatgccagaagccagcgcgtttttcatcttcagctctaacaacaggtttcgcctccagtgccaccgcattgtcaatgacacgatcttcaccaacctgatcctcttcttcattctgctcagcagcatttccctggctgctgaggacccggtccagcacacctccttcaggaaccatattctgttttattttgatattgtttttaccaccattttcaccattgaaattgctctgaagatcctaggcaatgcagactatgtcttcactagtatctttacattagaaattatccttaagatgactgcttatggggctttcttgcacaagggttctttctgccggaactacttcaacatcctggacctgctggtggtcagcgtgtccctcatctcctttggcatccagtccagtgcaatcaatgtcgtgaagatcttgcgagtcctgcgagtactcaggcccctgagggccatcaacagggccaaggggctaaagcatgtggttcagtgtgtgtttgtcgccatccggaccatcgggaacatcgtgattgtcaccaccctgctgcagttcatgtttgcctgcatcggggtccagctcttcaagggaaagctgtacacctgttcagacagttccaagcagacagaggcggaatgcaagggcaactacatcacgtacaaagacggggaggttgaccaccccatcatccaaccccgcagctgggagaacagcaagtttgactttgacaatgttctggcagccatgatggccctcttcaccgtctccaccttcgaagggtggccagagctgctgtaccgctccatcgactcccacacggaagacaagggccccatctacaactaccgtgtggagatctccatcttcttcatcatctacatcatcatcatcgccttcttcatgatgaacatcttcgtgggcttcgtcatcgtcacctttcaggagcagggggagcaggagtacaagaactgtgagctggacaagaaccagcgacagtgcgtggaatacgccctcaaggcccggcccctgcggaggtacatccccaagaaccagcaccagtacaaagtgtggtacgtggtcaactccacctacttcgagtacctgatgttcgtcctcatcctgctcaacaccatctgcctggccatgcagcactacggccagagctgcctgttcaaaatcgccatgaacatcctcaacatgctcttcactggcctcttcaccgtggagatgatcctgaagctcattgccttcaaacccaagcactatttctgtgatgcatggaatacatttgacgccttgattgttgtgggtagcattgttgatatagcaatcaccgaggtaaacccagctgaacatacccaatgctctccctctatgaacgcagaggaaaactcccgcatctccatcaccttcttccgcctgttccgggtcatgcgtctggtgaagctgctgagccgtggggagggcatccggacgctgctgtggaccttcatcaagtccttccaggccctgccctatgtggccctcctgatcgtgatgctgttcttcatctacgcggtgatcgggatgcaggtgtttgggaaaattgccctgaatgataccacagagatcaaccggaacaacaactttcagaccttcccccaggccgtgctgctcctcttcaggtgtgccaccggggaggcctggcaggacatcatgctggcctgcatgccaggcaagaagtgtgccccagagtccgagcccagcaacagcacggagggtgaaacaccctgtggtagcagctttgctgtcttctacttcatcagcttctacatgctctgtgccttcctgatcatcaacctctttgtagctgtcatcatggacaactttgactacctgacaagggactggtccatccttggtccccaccacctggatgagtttaaaagaatctgggcagagtatgaccctgaagccaagggtcgtatcaaacacctggatgtggtgaccctcctccggcggattcagccgccactaggttttgggaagctgtgccctcaccgcgtggcttgcaaacgcctggtctccatgaacatgcctctgaacagcgacgggacagtcatgttcaatgccaccctgtttgccctggtcaggacggccctgaggatcaaaacagaagggaacctagaacaagccaatgaggagctgcgggcgatcatcaagaagatctggaagcggaccagcatgaagctgctggaccaggtggtgccccctgcaggtgatgatgaggtcaccgttggcaagttctacgccacgttcctgatccaggagtacttccggaagttcaagaagcgcaaagagcagggccttgtgggcaagccctcccagaggaacgcgctgtctctgcaggctggcttgcgcacactgcatgacatcgggcctgagatccgacgggccatctctggagatctcaccgctgaggaggagctggacaaggccatgaaggaggctgtgtccgctgcttctgaagatgacatcttcaggagggccggtggcctgttcggcaaccacgtcagctactaccaaagcgacggccggagcgccttcccccagaccttcaccactcagcgcccgctgcacatcaacaaggcgggcagcagccagggcgacactgagtcgccatcccacgagaagctggtggactccaccttcaccccgagcagctactcgtccaccggctccaacgccaacatcaacaacgccaacaacaccgccctgggtcgcctccctcgccccgccggctaccccagcacggtcagcactgtggagggccacgggccccccttgtcccctgccatccgggtgcaggaggtggcgtggaagctcagctccaacaggtgccactcccgggagagccaggcagccatggcgggtcaggaggagacgtctcaggatgagacctatgaagtgaagatgaaccatgacacggaggcctgcagtgagcccagcctgctctccacagagatgctctcctaccaggatgacgaaaatcggcaactgacgctcccagaggaggacaagagggacatccggcaatctccgaagaggggtttcctccgctctgcctcactaggtcgaagggcctccttccacctggaatgtctgaagcgacagaaggaccgagggggagacatctctcagaagacagtcctgcccttgcatctggttcatcatcaggcattggcagtggcaggcctgagccccctcctccagagaagccattcccctgcctcattccctaggccttttgccaccccaccagccacacctggcagccgaggctggcccccacagcccgtccccaccctgcggcttgagggggtcgagtccagtgagaaactcaacagcagcttcccatccatccactgcggctcctgggctgagaccacccccggtggcgggggcagcagcgccgcccggagagtccggcccgtctccctcatggtgcccagccaggctggggccccagggaggcagttccacggcagtgccagcagcctggtggaagcggtcttgatttcagaaggactggggcagtttgctcaagatcccaagttcatcgaggtcaccacccaggagctggccgacgcctgcgacatgaccatagaggagatggagagcgcggccgacaacatcctcagcgggggcgccccacagagccccaatggcgccctcttaccctttgtgaactgcagggacgcggggcaggaccgagccgggggcgaagaggacgcgggctgtgtgcgcgcgcggggtcgaccgagtgaggaggagctccaggacagcagggtctacgtcagcagcctgtagtgggcgctgccagatgcgggcttttttttatttgtttcaatgttcctaatgggttcgtttcagaagtgcctcactgttctcgtgacctggagtt

SEQ ID NO: 113177 - DNA, 7482 bp, Homo sapiens
  Payload ID: 2138
  Gene Symbol: CACNA1C
  Gene Name: calcium channel, voltage-dependent, L type, alpha 1C subunit
  ENST ID: ENST00000399617
  CDS Start-End: 1-6522
atggtcaatgagaatacgaggatgtacattccagaggaaaaccaccaaggttccaactatgggagcccacgccccgcccatgccaacatgaatgccaatgcggcagcggggctggcccctgagcacatccccaccccgggggctgccctgtcgtggcaggcggccatcgacgcagcccggcaggctaagctgatgggcagcgctggcaatgcgaccatctccacagtcagctccacgcagcggaagcggcagcaatatgggaaacccaagaagcagggcagcaccacggccacacgcccgccccgagccctgctctgcctgaccctgaagaaccccatccggagggcctgcatcagcattgtcgaatggaaaccatttgaaataattattttactgactatttttgccaattgtgtggccttagcgatctatattccctttccagaagatgattccaacgccaccaattccaacctggaacgagtggaatatctctttctcataatttttacggtggaagcgtttttaaaagtaatcgcctatggactcctctttcaccccaatgcctacctccgcaacggctggaacctactagattttataattgtggttgtggggctttttagtgcaattttagaacaagcaaccaaagcagatggggcaaacgctctcggagggaaaggggccggatttgatgtgaaggcgctgagggccttccgcgtgctgcgccccctgcggctggtgtccggagtcccaagtctccaggtggtcctgaattccatcatcaaggccatggtccccctgctgcacatcgccctgcttgtgctgtttgtcatcatcatctacgccatcatcggcttggagctcttcatggggaagatgcacaagacctgctacaaccaggagggcatagcagatgttccagcagaagatgacccttccccttgtgcgctggaaacgggccacgggcggcagtgccagaacggcacggtgtgcaagcccggctgggatggtcccaagcacggcatcaccaactttgacaactttgccttcgccatgctcacggtgttccagtgcatcaccatggagggctggacggacgtgctgtactggatgcaggacgctatgggctatgagttaccctgggtgtattttgtcagtctggtcatctttggatcctttttcgttctaaatctggttctcggtgtgttgagcggagagttttccaaagagagggagaaggccaaggcccggggagatttccagaagctgcgggagaagcagcagctagaagaggatctcaaaggctacctggattggatcactcaggccgaagacatcgatcctgagaatgaggacgaaggcatggatgaggagaagccccgaaacatgagcatgcccaccagtgagaccgagtccgtcaacaccgaaaacgtggctggaggtgacatcgagggagaaaactgcggggccaggctggcccaccggatctccaagtcaaagttcagccgctactggcgccggtggaatcggttctgcagaaggaagtgccgcgccgcagtcaagtctaatgtcttctactggctggtgattttcctggtgttcctcaacacgctcaccattgcctctgagcactacaaccagcccaactggctcacagaagtccaagacacggcaaacaaggccctgctggccctgttcacggcagagatgctcctgaagatgtacagcctgggcctgcaggcctacttcgtgtccctcttcaaccgctttgactgcttcgtcgtgtgtggcggcatcctggagaccatcctggtggagaccaagatcatgtccccactgggcatctccgtgctcagatgcgtccggctgctgaggattttcaagatcacgaggtactggaactccttgagcaacctggtggcatccttgctgaactctgtgcgctccatcgcctccctgctccttctcctcttcctcttcatcatcatcttctccctcctggggatgcagctctttggaggaaagttcaactttgatgagatgcagacccggaggagcacattcgataacttcccccagtccctcctcactgtgtttcagatcctgaccggggaggactggaattcggtgatgtatgatgggatcatggcttatggcggcccctcttttccagggatgttagtctgtatttacttcatcatcctcttcatctgtggaaactatatcctactgaatgtgttcttggccattgctgtggacaacctggctgatgctgagagcctcacatctgcccaaaaggaggaggaagaggagaaggagagaaagaagctggccaggactgccagcccagagaagaaacaagagttggtggagaagccggcagtgggggaatccaaggaggagaagattgagctgaaatccatcacggctgacggagagtctccacccgccaccaagatcaacatggatgacctccagcccaatgaaaatgaggataagagcccctaccccaacccagaaactacaggagaagaggatgaggaggagccagagatgcctgtcggccctcgcccacgaccactctctgagcttcaccttaaggaaaaggcagtgcccatgccagaagccagcgcgtttttcatcttcagctctaacaacaggtttcgcctccagtgccaccgcattgtcaatgacacgatcttcaccaacctgatcctcttcttcattctgctcagcagcatttccctggctgctgaggacccggtccagcacacctccttcaggaaccatattctgttttattttgatattgtttttaccaccattttcaccattgaaattgctctgaagatgactgcttatggggctttcttgcacaagggttctttctgccggaactacttcaacatcctggacctgctggtggtcagcgtgtccctcatctcctttggcatccagtccagtgcaatcaatgtcgtgaagatcttgcgagtcctgcgagtactcaggcccctgagggccatcaacagggccaaggggctaaagcatgtggttcagtgtgtgtttgtcgccatccggaccatcgggaacatcgtgattgtcaccaccctgctgcagttcatgtttgcctgcatcggggtccagctcttcaagggaaagctgtacacctgttcagacagttccaagcagacagaggcggaatgcaagggcaactacatcacgtacaaagacggggaggttgaccaccccatcatccaaccccgcagctgggagaacagcaagtttgactttgacaatgttctggcagccatgatggccctcttcaccgtctccaccttcgaagggtggccagagctgctgtaccgctccatcgactcccacacggaagacaagggccccatctacaactaccgtgtggagatctccatcttcttcatcatctacatcatcatcatcgccttcttcatgatgaacatcttcgtgggcttcgtcatcgtcacctttcaggagcagggggagcaggagtacaagaactgtgagctggacaagaaccagcgacagtgcgtggaatacgccctcaaggcccggcccctgcggaggtacatccccaagaaccagcaccagtacaaagtgtggtacgtggtcaactccacctacttcgagtacctgatgttcgtcctcatcctgctcaacaccatctgcctggccatgcagcactacggccagagctgcctgttcaaaatcgccatgaacatcctcaacatgctcttcactggcctcttcaccgtggagatgatcctgaagctcattgccttcaaacccaagggttactttagtgatccctggaatgtttttgacttcctcatcgtaattggcagcataattgacgtcattctcagtgagactaatccagctgaacatacccaatgctctccctctatgaacgcagaggaaaactcccgcatctccatcaccttcttccgcctgttccgggtcatgcgtctggtgaagctgctgagccgtggggagggcatccggacgctgctgtggaccttcatcaagtccttccaggccctgccctatgtggccctcctgatcgtgatgctgttcttcatctacgcggtgatcgggatgcaggtgtttgggaaaattgccctgaatgataccacagagatcaaccggaacaacaactttcagaccttcccccaggccgtgctgctcctcttcaggtgtgccaccggggaggcctggcaggacatcatgctggcctgcatgccaggcaagaagtgtgccccagagtccgagcccagcaacagcacggagggtgaaacaccctgtggtagcagctttgctgtcttctacttcatcagcttctacatgctctgtgccttcctgatcatcaacctctttgtagctgtcatcatggacaactttgactacctgacaagggactggtccatccttggtccccaccacctggatgagtttaaaagaatctgggcagagtatgaccctgaagccaagggtcgtatcaaacacctggatgtggtgaccctcctccggcggattcagccgccactaggttttgggaagctgtgccctcaccgcgtggcttgcaaacgcctggtctccatgaacatgcctctgaacagcgacgggacagtcatgttcaatgccaccctgtttgccctggtcaggacggccctgaggatcaaaacagaagggaacctagaacaagccaatgaggagctgcgggcgatcatcaagaagatctggaagcggaccagcatgaagctgctggaccaggtggtgccccctgcaggtgatgatgaggtcaccgttggcaagttctacgccacgttcctgatccaggagtacttccggaagttcaagaagcgcaaagagcagggccttgtgggcaagccctcccagaggaacgcgctgtctctgcaggctggcttgcgcacactgcatgacatcgggcctgagatccgacgggccatctctggagatctcaccgctgaggaggagctggacaaggccatgaaggaggctgtgtccgctgcttctgaagatgacatcttcaggagggccggtggcctgttcggcaaccacgtcagctactaccaaagcgacggccggagcgccttcccccagaccttcaccactcagcgcccgctgcacatcaacaaggcgggcagcagccagggcgacactgagtcgccatcccacgagaagctggtggactccaccttcaccccgagcagctactcgtccaccggctccaacgccaacatcaacaacgccaacaacaccgccctgggtcgcctccctcgccccgccggctaccccagcacggtcagcactgtggagggccacgggccccccttgtcccctgccatccgggtgcaggaggtggcgtggaagctcagctccaacagggaaaggcacgttccgatgtgtgaggatctggagctcaggagggattcaggctcagcagggactcaggctcactgccttctgctcaggagagcaaacccctctaggtgccactcccgggagagccaggcagccatggcgggtcaggaggagacgtctcaggatgagacctatgaagtgaagatgaaccatgacacggaggcctgcagtgagcccagcctgctctccacagagatgctctcctaccaggatgacgaaaatcggcaactgacgctcccagaggaggacaagagggacatccggcaatctccgaagaggggtttcctccgctctgcctcactaggtcgaagggcctccttccacctggaatgtctgaagcgacagaaggaccgagggggagacatctctcagaagacagtcctgcccttgcatctggttcatcatcaggcattggcagtggcaggcctgagccccctcctccagagaagccattcccctgcctcattccctaggccttttgccaccccaccagccacacctggcagccgaggctggcccccacagcccgtccccaccctgcggcttgagggggtcgagtccagtgagaaactcaacagcagcttcccatccatccactgcggctcctgggctgagaccacccccggtggcgggggcagcagcgccgcccggagagtccggcccgtctccctcatggtgcccagccaggctggggccccagggaggcagttccacggcagtgccagcagcctggtggaagcggtcttgatttcagaaggactggggcagtttgctcaagatcccaagttcatcgaggtcaccacccaggagctggccgacgcctgcgacatgaccatagaggagatggagagcgcggccgacaacatcctcagcgggggcgccccacagagccccaatggcgccctcttaccctttgtgaactgcagggacgcggggcaggaccgagccgggggcgaagaggacgcgggctgtgtgcgcgcgcggggtcgaccgagtgaggaggagctccaggacagcagggtctacgtcagcagcctgtagtgggcgctgccagatgcgggcttttttttatttgtttcaatgttcctaatgggttcgtttcagaagtgcctcactgttctcgtgacctggagttaaccggaacagcgtcttcattcatttctgttgggaccagacgcggagcctgggtgcgcgagccgccctccgggaggaaggcgcccggctgcgtctgcagaggcggggagaggaggcggcgagggtcccggggcgcgaggaaggcgcctgccctctcccagctcgcaggccccgggcccggccgcgcctccgcggggagagcaccccggcttcccgcgcgccctcaccaaaaggaccctacagcaaacgggtgtctttcgactctgcttgtagaaaccatttgcacatattctgtacgagcctcgctgtctccctagagccagggccctgcggatttggagaagggagcggggcaggacttccaggaggaccccaacccggcccggagagggaggaggaggcctccaggggcgcggagctctggggatgggcgtcgggccggcagtggtgcggctcactccgtccctgcccacctgcgacgggatcccccgaccggcacgggccacgccgagctcccggccagccgccggcccgcaggcagcgcgagggaggagctgcgccgccggctccgcccaaccaggtggtgctgagcttccgctgagcgctcttttgttttgtggtttgacacttttcttgacagcatgttgcagtttcttttcggttttggttttttttaaatgttttattttgctttcccagcgggaggggaggaagaagagtgtttacaaagtcctgtagccccctcacctttctgttttcacttttgccaatgtacatcgggtttggttttcttgtattatttaaacggttgtggtttcctttttccacggaggttcaatagaagccgctgcaggagagttttaccaa

SEQ ID NO: 113178 - DNA, 6568 bp, Homo sapiens
  Payload ID: 2138
  Gene Symbol: CACNA1C
  Gene Name: calcium channel, voltage-dependent, L type, alpha 1C subunit
  Uniprot ID: Q13936
  ENST ID: ENST00000399621
  CDS Start-End: 1-6474
atggtcaatgagaatacgaggatgtacattccagaggaaaaccaccaaggttccaactatgggagcccacgccccgcccatgccaacatgaatgccaatgcggcagcggggctggcccctgagcacatccccaccccgggggctgccctgtcgtggcaggcggccatcgacgcagcccggcaggctaagctgatgggcagcgctggcaatgcgaccatctccacagtcagctccacgcagcggaagcggcagcaatatgggaaacccaagaagcagggcagcaccacggccacacgcccgccccgagccctgctctgcctgaccctgaagaaccccatccggagggcctgcatcagcattgtcgaatggaaaccatttgaaataattattttactgactatttttgccaattgtgtggccttagcgatctatattccctttccagaagatgattccaacgccaccaattccaacctggaacgagtggaatatctctttctcataatttttacggtggaagcgtttttaaaagtaatcgcctatggactcctctttcaccccaatgcctacctccgcaacggctggaacctactagattttataattgtggttgtggggctttttagtgcaattttagaacaagcaaccaaagcagatggggcaaacgctctcggagggaaaggggccggatttgatgtgaaggcgctgagggccttccgcgtgctgcgccccctgcggctggtgtccggagtcccaagtctccaggtggtcctgaattccatcatcaaggccatggtccccctgctgcacatcgccctgcttgtgctgtttgtcatcatcatctacgccatcatcggcttggagctcttcatggggaagatgcacaagacctgctacaaccaggagggcatagcagatgttccagcagaagatgacccttccccttgtgcgctggaaacgggccacgggcggcagtgccagaacggcacggtgtgcaagcccggctgggatggtcccaagcacggcatcaccaactttgacaactttgccttcgccatgctcacggtgttccagtgcatcaccatggagggctggacggacgtgctgtactgggtcaatgatgccgtaggaagggactggccctggatctattttgttacactaatcatcatagggtcattttttgtacttaacttggttctcggtgtgcttagcggagagttttccaaagagagggagaaggccaaggcccggggagatttccagaagctgcgggagaagcagcagctagaagaggatctcaaaggctacctggattggatcactcaggccgaagacatcgatcctgagaatgaggacgaaggcatggatgaggagaagccccgaaacatgagcatgcccaccagtgagaccgagtccgtcaacaccgaaaacgtggctggaggtgacatcgagggagaaaactgcggggccaggctggcccaccggatctccaagtcaaagttcagccgctactggcgccggtggaatcggttctgcagaaggaagtgccgcgccgcagtcaagtctaatgtcttctactggctggtgattttcctggtgttcctcaacacgctcaccattgcctctgagcactacaaccagcccaactggctcacagaagtccaagacacggcaaacaaggccctgctggccctgttcacggcagagatgctcctgaagatgtacagcctgggcctgcaggcctacttcgtgtccctcttcaaccgctttgactgcttcgtcgtgtgtggcggcatcctggagaccatcctggtggagaccaagatcatgtccccactgggcatctccgtgctcagatgcgtccggctgctgaggattttcaagatcacgaggtactggaactccttgagcaacctggtggcatccttgctgaactctgtgcgctccatcgcctccctgctccttctcctcttcctcttcatcatcatcttctccctcctggggatgcagctctttggaggaaagttcaactttgatgagatgcagacccggaggagcacattcgataacttcccccagtccctcctcactgtgtttcagatcctgaccggggaggactggaattcggtgatgtatgatgggatcatggcttatggcggcccctcttttccagggatgttagtctgtatttacttcatcatcctcttcatctgtggaaactatatcctactgaatgtgttcttggccattgctgtggacaacctggctgatgctgagagcctcacatctgcccaaaaggaggaggaagaggagaaggagagaaagaagctggccaggactgccagcccagagaagaaacaagagttggtggagaagccggcagtgggggaatccaaggaggagaagattgagctgaaatccatcacggctgacggagagtctccacccgccaccaagatcaacatggatgacctccagcccaatgaaaatgaggataagagcccctaccccaacccagaaactacaggagaagaggatgaggaggagccagagatgcctgtcggccctcgcccacgaccactctctgagcttcaccttaaggaaaaggcagtgcccatgccagaagccagcgcgtttttcatcttcagctctaacaacaggtttcgcctccagtgccaccgcattgtcaatgacacgatcttcaccaacctgatcctcttcttcattctgctcagcagcatttccctggctgctgaggacccggtccagcacacctccttcaggaaccatattctgttttattttgatattgtttttaccaccattttcaccattgaaattgctctgaagatgactgcttatggggctttcttgcacaagggttctttctgccggaactacttcaacatcctggacctgctggtggtcagcgtgtccctcatctcctttggcatccagtccagtgcaatcaatgtcgtgaagatcttgcgagtcctgcgagtactcaggcccctgagggccatcaacagggccaaggggctaaagcatgtggttcagtgtgtgtttgtcgccatccggaccatcgggaacatcgtgattgtcaccaccctgctgcagttcatgtttgcctgcatcggggtccagctcttcaagggaaagctgtacacctgttcagacagttccaagcagacagaggcggaatgcaagggcaactacatcacgtacaaagacggggaggttgaccaccccatcatccaaccccgcagctgggagaacagcaagtttgactttgacaatgttctggcagccatgatggccctcttcaccgtctccaccttcgaagggtggccagagctgctgtaccgctccatcgactcccacacggaagacaagggccccatctacaactaccgtgtggagatctccatcttcttcatcatctacatcatcatcatcgccttcttcatgatgaacatcttcgtgggcttcgtcatcgtcacctttcaggagcagggggagcaggagtacaagaactgtgagctggacaagaaccagcgacagtgcgtggaatacgccctcaaggcccggcccctgcggaggtacatccccaagaaccagcaccagtacaaagtgtggtacgtggtcaactccacctacttcgagtacctgatgttcgtcctcatcctgctcaacaccatctgcctggccatgcagcactacggccagagctgcctgttcaaaatcgccatgaacatcctcaacatgctcttcactggcctcttcaccgtggagatgatcctgaagctcattgccttcaaacccaagcactatttctgtgatgcatggaatacatttgacgccttgattgttgtgggtagcattgttgatatagcaatcaccgaggtaaacccagctgaacatacccaatgctctccctctatgaacgcagaggaaaactcccgcatctccatcaccttcttccgcctgttccgggtcatgcgtctggtgaagctgctgagccgtggggagggcatccggacgctgctgtggaccttcatcaagtccttccaggccctgccctatgtggccctcctgatcgtgatgctgttcttcatctacgcggtgatcgggatgcaggtgtttgggaaaattgccctgaatgataccacagagatcaaccggaacaacaactttcagaccttcccccaggccgtgctgctcctcttcaggtgtgccaccggggaggcctggcaggacatcatgctggcctgcatgccaggcaagaagtgtgccccagagtccgagcccagcaacagcacggagggtgaaacaccctgtggtagcagctttgctgtcttctacttcatcagcttctacatgctctgtgccttcctgatcatcaacctctttgtagctgtcatcatggacaactttgactacctgacaagggactggtccatccttggtccccaccacctggatgagtttaaaagaatctgggcagagtatgaccctgaagccaagggtcgtatcaaacacctggatgtggtgaccctcctccggcggattcagccgccactaggttttgggaagctgtgccctcaccgcgtggcttgcaaacgcctggtctccatgaacatgcctctgaacagcgacgggacagtcatgttcaatgccaccctgtttgccctggtcaggacggccctgaggatcaaaacagaagagggacccagcccatcagaggcccaccaaggggctgaggatcctttccgccctgcagggaacctagaacaagccaatgaggagctgcgggcgatcatcaagaagatctggaagcggaccagcatgaagctgctggaccaggtggtgccccctgcaggtgatgatgaggtcaccgttggcaagttctacgccacgttcctgatccaggagtacttccggaagttcaagaagcgcaaagagcagggccttgtgggcaagccctcccagaggaacgcgctgtctctgcaggctggcttgcgcacactgcatgacatcgggcctgagatccgacgggccatctctggagatctcaccgctgaggaggagctggacaaggccatgaaggaggctgtgtccgctgcttctgaagatgacatcttcaggagggccggtggcctgttcggcaaccacgtcagctactaccaaagcgacggccggagcgccttcccccagaccttcaccactcagcgcccgctgcacatcaacaaggcgggcagcagccagggcgacactgagtcgccatcccacgagaagctggtggactccaccttcaccccgagcagctactcgtccaccggctccaacgccaacatcaacaacgccaacaacaccgccctgggtcgcctccctcgccccgccggctaccccagcacggtcagcactgtggagggccacgggccccccttgtcccctgccatccgggtgcaggaggtggcgtggaagctcagctccaacaggtgccactcccgggagagccaggcagccatggcgggtcaggaggagacgtctcaggatgagacctatgaagtgaagatgaaccatgacacggaggcctgcagtgagcccagcctgctctccacagagatgctctcctaccaggatgacgaaaatcggcaactgacgctcccagaggaggacaagagggacatccggcaatctccgaagaggggtttcctccgctctgcctcactaggtcgaagggcctccttccacctggaatgtctgaagcgacagaaggaccgagggggagacatctctcagaagacagtcctgcccttgcatctggttcatcatcaggcattggcagtggcaggcctgagccccctcctccagagaagccattcccctgcctcattccctaggccttttgccaccccaccagccacacctggcagccgaggctggcccccacagcccgtccccaccctgcggcttgagggggtcgagtccagtgagaaactcaacagcagcttcccatccatccactgcggctcctgggctgagaccacccccggtggcgggggcagcagcgccgcccggagagtccggcccgtctccctcatggtgcccagccaggctggggccccagggaggcagttccacggcagtgccagcagcctggtggaagcggtcttgatttcagaaggactggggcagtttgctcaagatcccaagttcatcgaggtcaccacccaggagctggccgacgcctgcgacatgaccatagaggagatggagagcgcggccgacaacatcctcagcgggggcgccccacagagccccaatggcgccctcttaccctttgtgaactgcagggacgcggggcaggaccgagccgggggcgaagaggacgcgggctgtgtgcgcgcgcggggtcgaccgagtgaggaggagctccaggacagcagggtctacgtcagcagcctgtagtgggcgctgccagatgcgggcttttttttatttgtttcaatgttcctaatgggttcgtttcagaagtgcctcactgttctcgtgacctggagtt

SEQ ID NO: 113179 - DNA, 6562 bp, Homo sapiens
  Payload ID: 2138
  Gene Symbol: CACNA1C
  Gene Name: calcium channel, voltage-dependent, L type, alpha 1C subunit
  Uniprot ID: Q13936
  ENST ID: ENST00000399629
  CDS Start-End: 1-6468
atggtcaatgagaatacgaggatgtacattccagaggaaaaccaccaaggttccaactatgggagcccacgccccgcccatgccaacatgaatgccaatgcggcagcggggctggcccctgagcacatccccaccccgggggctgccctgtcgtggcaggcggccatcgacgcagcccggcaggctaagctgatgggcagcgctggcaatgcgaccatctccacagtcagctccacgcagcggaagcggcagcaatatgggaaacccaagaagcagggcagcaccacggccacacgcccgccccgagccctgctctgcctgaccctgaagaaccccatccggagggcctgcatcagcattgtcgaatggaaaccatttgaaataattattttactgactatttttgccaattgtgtggccttagcgatctatattccctttccagaagatgattccaacgccaccaattccaacctggaacgagtggaatatctctttctcataatttttacggtggaagcgtttttaaaagtaatcgcctatggactcctctttcaccccaatgcctacctccgcaacggctggaacctactagattttataattgtggttgtggggctttttagtgcaattttagaacaagcaaccaaagcagatggggcaaacgctctcggagggaaaggggccggatttgatgtgaaggcgctgagggccttccgcgtgctgcgccccctgcggctggtgtccggagtcccaagtctccaggtggtcctgaattccatcatcaaggccatggtccccctgctgcacatcgccctgcttgtgctgtttgtcatcatcatctacgccatcatcggcttggagctcttcatggggaagatgcacaagacctgctacaaccaggagggcatagcagatgttccagcagaagatgacccttccccttgtgcgctggaaacgggccacgggcggcagtgccagaacggcacggtgtgcaagcccggctgggatggtcccaagcacggcatcaccaactttgacaactttgccttcgccatgctcacggtgttccagtgcatcaccatggagggctggacggacgtgctgtactgggtcaatgatgccgtaggaagggactggccctggatctattttgttacactaatcatcatagggtcattttttgtacttaacttggttctcggtgtgcttagcggagagttttccaaagagagggagaaggccaaggcccggggagatttccagaagctgcgggagaagcagcagctagaagaggatctcaaaggctacctggattggatcactcaggccgaagacatcgatcctgagaatgaggacgaaggcatggatgaggagaagccccgaaacatgagcatgcccaccagtgagaccgagtccgtcaacaccgaaaacgtggctggaggtgacatcgagggagaaaactgcggggccaggctggcccaccggatctccaagtcaaagttcagccgctactggcgccggtggaatcggttctgcagaaggaagtgccgcgccgcagtcaagtctaatgtcttctactggctggtgattttcctggtgttcctcaacacgctcaccattgcctctgagcactacaaccagcccaactggctcacagaagtccaagacacggcaaacaaggccctgctggccctgttcacggcagagatgctcctgaagatgtacagcctgggcctgcaggcctacttcgtgtccctcttcaaccgctttgactgcttcgtcgtgtgtggcggcatcctggagaccatcctggtggagaccaagatcatgtccccactgggcatctccgtgctcagatgcgtccggctgctgaggattttcaagatcacgaggtactggaactccttgagcaacctggtggcatccttgctgaactctgtgcgctccatcgcctccctgctccttctcctcttcctcttcatcatcatcttctccctcctggggatgcagctctttggaggaaagttcaactttgatgagatgcagacccggaggagcacattcgataacttcccccagtccctcctcactgtgtttcagatcctgaccggggaggactggaattcggtgatgtatgatgggatcatggcttatggcggcccctcttttccagggatgttagtctgtatttacttcatcatcctcttcatctgtggaaactatatcctactgaatgtgttcttggccattgctgtggacaacctggctgatgctgagagcctcacatctgcccaaaaggaggaggaagaggagaaggagagaaagaagctggccaggactgccagcccagagaagaaacaagagttggtggagaagccggcagtgggggaatccaaggaggagaagattgagctgaaatccatcacggctgacggagagtctccacccgccaccaagatcaacatggatgacctccagcccaatgaaaatgaggataagagcccctaccccaacccagaaactacaggagaagaggatgaggaggagccagagatgcctgtcggccctcgcccacgaccactctctgagcttcaccttaaggaaaaggcagtgcccatgccagaagccagcgcgtttttcatcttcagctctaacaacaggtttcgcctccagtgccaccgcattgtcaatgacacgatcttcaccaacctgatcctcttcttcattctgctcagcagcatttccctggctgctgaggacccggtccagcacacctccttcaggaaccatatcctaggcaatgcagactatgtcttcactagtatctttacattagaaattatccttaagatgactgcttatggggctttcttgcacaagggttctttctgccggaactacttcaacatcctggacctgctggtggtcagcgtgtccctcatctcctttggcatccagtccagtgcaatcaatgtcgtgaagatcttgcgagtcctgcgagtactcaggcccctgagggccatcaacagggccaaggggctaaagcatgtggttcagtgtgtgtttgtcgccatccggaccatcgggaacatcgtgattgtcaccaccctgctgcagttcatgtttgcctgcatcggggtccagctcttcaagggaaagctgtacacctgttcagacagttccaagcagacagaggcggaatgcaagggcaactacatcacgtacaaagacggggaggttgaccaccccatcatccaaccccgcagctgggagaacagcaagtttgactttgacaatgttctggcagccatgatggccctcttcaccgtctccaccttcgaagggtggccagagctgctgtaccgctccatcgactcccacacggaagacaagggccccatctacaactaccgtgtggagatctccatcttcttcatcatctacatcatcatcatcgccttcttcatgatgaacatcttcgtgggcttcgtcatcgtcacctttcaggagcagggggagcaggagtacaagaactgtgagctggacaagaaccagcgacagtgcgtggaatacgccctcaaggcccggcccctgcggaggtacatccccaagaaccagcaccagtacaaagtgtggtacgtggtcaactccacctacttcgagtacctgatgttcgtcctcatcctgctcaacaccatctgcctggccatgcagcactacggccagagctgcctgttcaaaatcgccatgaacatcctcaacatgctcttcactggcctcttcaccgtggagatgatcctgaagctcattgccttcaaacccaagggttactttagtgatccctggaatgtttttgacttcctcatcgtaattggcagcataattgacgtcattctcagtgagactaatcactatttctgtgatgcatggaatacatttgacgccttgattgttgtgggtagcattgttgatatagcaatcaccgaggtaaacaacgcagaggaaaactcccgcatctccatcaccttcttccgcctgttccgggtcatgcgtctggtgaagctgctgagccgtggggagggcatccggacgctgctgtggaccttcatcaagtccttccaggccctgccctatgtggccctcctgatcgtgatgctgttcttcatctacgcggtgatcgggatgcaggtgtttgggaaaattgccctgaatgataccacagagatcaaccggaacaacaactttcagaccttcccccaggccgtgctgctcctcttcaggtgtgccaccggggaggcctggcaggacatcatgctggcctgcatgccaggcaagaagtgtgccccagagtccgagcccagcaacagcacggagggtgaaacaccctgtggtagcagctttgctgtcttctacttcatcagcttctacatgctctgtgccttcctgatcatcaacctctttgtagctgtcatcatggacaactttgactacctgacaagggactggtccatccttggtccccaccacctggatgagtttaaaagaatctgggcagagtatgaccctgaagccaagggtcgtatcaaacacctggatgtggtgaccctcctccggcggattcagccgccactaggttttgggaagctgtgccctcaccgcgtggcttgcaaacgcctggtctccatgaacatgcctctgaacagcgacgggacagtcatgttcaatgccaccctgtttgccctggtcaggacggccctgaggatcaaaacagaagggaacctagaacaagccaatgaggagctgcgggcgatcatcaagaagatctggaagcggaccagcatgaagctgctggaccaggtggtgccccctgcaggtgatgatgaggtcaccgttggcaagttctacgccacgttcctgatccaggagtacttccggaagttcaagaagcgcaaagagcagggccttgtgggcaagccctcccagaggaacgcgctgtctctgcaggctggcttgcgcacactgcatgacatcgggcctgagatccgacgggccatctctggagatctcaccgctgaggaggagctggacaaggccatgaaggaggctgtgtccgctgcttctgaagatgacatcttcaggagggccggtggcctgttcggcaaccacgtcagctactaccaaagcgacggccggagcgccttcccccagaccttcaccactcagcgcccgctgcacatcaacaaggcgggcagcagccagggcgacactgagtcgccatcccacgagaagctggtggactccaccttcaccccgagcagctactcgtccaccggctccaacgccaacatcaacaacgccaacaacaccgccctgggtcgcctccctcgccccgccggctaccccagcacggtcagcactgtggagggccacgggccccccttgtcccctgccatccgggtgcaggaggtggcgtggaagctcagctccaacaggtgccactcccgggagagccaggcagccatggcgggtcaggaggagacgtctcaggatgagacctatgaagtgaagatgaaccatgacacggaggcctgcagtgagcccagcctgctctccacagagatgctctcctaccaggatgacgaaaatcggcaactgacgctcccagaggaggacaagagggacatccggcaatctccgaagaggggtttcctccgctctgcctcactaggtcgaagggcctccttccacctggaatgtctgaagcgacagaaggaccgagggggagacatctctcagaagacagtcctgcccttgcatctggttcatcatcaggcattggcagtggcaggcctgagccccctcctccagagaagccattcccctgcctcattccctaggccttttgccaccccaccagccacacctggcagccgaggctggcccccacagcccgtccccaccctgcggcttgagggggtcgagtccagtgagaaactcaacagcagcttcccatccatccactgcggctcctgggctgagaccacccccggtggcgggggcagcagcgccgcccggagagtccggcccgtctccctcatggtgcccagccaggctggggccccagggaggcagttccacggcagtgccagcagcctggtggaagcggtcttgatttcagaaggactggggcagtttgctcaagatcccaagttcatcgaggtcaccacccaggagctggccgacgcctgcgacatgaccatagaggagatggagagcgcggccgacaacatcctcagcgggggcgccccacagagccccaatggcgccctcttaccctttgtgaactgcagggacgcggggcaggaccgagccgggggcgaagaggacgcgggctgtgtgcgcgcgcggggtcgaccgagtgaggaggagctccaggacagcagggtctacgtcagcagcctgtagtgggcgctgccagatgcgggcttttttttatttgtttcaatgttcctaatgggttcgtttcagaagtgcctcactgttctcgtgacctggagtt

SEQ ID NO: 113180 - DNA, 7590 bp, Homo sapiens
  Payload ID: 2138
  Gene Symbol: CACNA1C
  Gene Name: calcium channel, voltage-dependent, L type, alpha 1C subunit
  ENST ID: ENST00000399634
  CDS Start-End: 1-6630
atggtcaatgagaatacgaggatgtacattccagaggaaaaccaccaaggttccaactatgggagcccacgccccgcccatgccaacatgaatgccaatgcggcagcggggctggcccctgagcacatccccaccccgggggctgccctgtcgtggcaggcggccatcgacgcagcccggcaggctaagctgatgggcagcgctggcaatgcgaccatctccacagtcagctccacgcagcggaagcggcagcaatatgggaaacccaagaagcagggcagcaccacggccacacgcccgccccgagccctgctctgcctgaccctgaagaaccccatccggagggcctgcatcagcattgtcgaatggaaaccatttgaaataattattttactgactatttttgccaattgtgtggccttagcgatctatattccctttccagaagatgattccaacgccaccaattccaacctggaacgagtggaatatctctttctcataatttttacggtggaagcgtttttaaaagtaatcgcctatggactcctctttcaccccaatgcctacctccgcaacggctggaacctactagattttataattgtggttgtggggctttttagtgcaattttagaacaagcaaccaaagcagatggggcaaacgctctcggagggaaaggggccggatttgatgtgaaggcgctgagggccttccgcgtgctgcgccccctgcggctggtgtccggagtcccaagtctccaggtggtcctgaattccatcatcaaggccatggtccccctgctgcacatcgccctgcttgtgctgtttgtcatcatcatctacgccatcatcggcttggagctcttcatggggaagatgcacaagacctgctacaaccaggagggcatagcagatgttccagcagaagatgacccttccccttgtgcgctggaaacgggccacgggcggcagtgccagaacggcacggtgtgcaagcccggctgggatggtcccaagcacggcatcaccaactttgacaactttgccttcgccatgctcacggtgttccagtgcatcaccatggagggctggacggacgtgctgtactggatgcaggacgctatgggctatgagttaccctgggtgtattttgtcagtctggtcatctttggatcctttttcgttctaaatctggttctcggtgtgttgagcggagagttttccaaagagagggagaaggccaaggcccggggagatttccagaagctgcgggagaagcagcagctagaagaggatctcaaaggctacctggattggatcactcaggccgaagacatcgatcctgagaatgaggacgaaggcatggatgaggagaagccccgaaacatgagcatgcccaccagtgagaccgagtccgtcaacaccgaaaacgtggctggaggtgacatcgagggagaaaactgcggggccaggctggcccaccggatctccaagtcaaagttcagccgctactggcgccggtggaatcggttctgcagaaggaagtgccgcgccgcagtcaagtctaatgtcttctactggctggtgattttcctggtgttcctcaacacgctcaccattgcctctgagcactacaaccagcccaactggctcacagaagtccaagacacggcaaacaaggccctgctggccctgttcacggcagagatgctcctgaagatgtacagcctgggcctgcaggcctacttcgtgtccctcttcaaccgctttgactgcttcgtcgtgtgtggcggcatcctggagaccatcctggtggagaccaagatcatgtccccactgggcatctccgtgctcagatgcgtccggctgctgaggattttcaagatcacgaggtactggaactccttgagcaacctggtggcatccttgctgaactctgtgcgctccatcgcctccctgctccttctcctcttcctcttcatcatcatcttctccctcctggggatgcagctctttggaggaaagttcaactttgatgagatgcagacccggaggagcacattcgataacttcccccagtccctcctcactgtgtttcagatcctgaccggggaggactggaattcggtgatgtatgatgggatcatggcttatggcggcccctcttttccagggatgttagtctgtatttacttcatcatcctcttcatctgtggaaactatatcctactgaatgtgttcttggccattgctgtggacaacctggctgatgctgagagcctcacatctgcccaaaaggaggaggaagaggagaaggagagaaagaagctggccaggactgccagcccagagaagaaacaagagttggtggagaagccggcagtgggggaatccaaggaggagaagattgagctgaaatccatcacggctgacggagagtctccacccgccaccaagatcaacatggatgacctccagcccaatgaaaatgaggataagagcccctaccccaacccagaaactacaggagaagaggatgaggaggagccagagatgcctgtcggccctcgcccacgaccactctctgagcttcaccttaaggaaaaggcagtgcccatgccagaagccagcgcgtttttcatcttcagctctaacaacaggtttcgcctccagtgccaccgcattgtcaatgacacgatcttcaccaacctgatcctcttcttcattctgctcagcagcatttccctggctgctgaggacccggtccagcacacctccttcaggaaccatattctgttttattttgatattgtttttaccaccattttcaccattgaaattgctctgaagatgactgcttatggggctttcttgcacaagggttctttctgccggaactacttcaacatcctggacctgctggtggtcagcgtgtccctcatctcctttggcatccagtccagtgcaatcaatgtcgtgaagatcttgcgagtcctgcgagtactcaggcccctgagggccatcaacagggccaaggggctaaagcatgtggttcagtgtgtgtttgtcgccatccggaccatcgggaacatcgtgattgtcaccaccctgctgcagttcatgtttgcctgcatcggggtccagctcttcaagggaaagctgtacacctgttcagacagttccaagcagacagaggcggaatgcaagggcaactacatcacgtacaaagacggggaggttgaccaccccatcatccaaccccgcagctgggagaacagcaagtttgactttgacaatgttctggcagccatgatggccctcttcaccgtctccaccttcgaagggtggccagagctgctgtaccgctccatcgactcccacacggaagacaagggccccatctacaactaccgtgtggagatctccatcttcttcatcatctacatcatcatcatcgccttcttcatgatgaacatcttcgtgggcttcgtcatcgtcacctttcaggagcagggggagcaggagtacaagaactgtgagctggacaagaaccagcgacagtgcgtggaatacgccctcaaggcccggcccctgcggaggtacatccccaagaaccagcaccagtacaaagtgtggtacgtggtcaactccacctacttcgagtacctgatgttcgtcctcatcctgctcaacaccatctgcctggccatgcagcactacggccagagctgcctgttcaaaatcgccatgaacatcctcaacatgctcttcactggcctcttcaccgtggagatgatcctgaagctcattgccttcaaacccaagcactatttctgtgatgcatggaatacatttgacgccttgattgttgtgggtagcattgttgatatagcaatcaccgaggtaaacccagctgaacatacccaatgctctccctctatgaacgcagaggaaaactcccgcatctccatcaccttcttccgcctgttccgggtcatgcgtctggtgaagctgctgagccgtggggagggcatccggacgctgctgtggaccttcatcaagtccttccaggccctgccctatgtggccctcctgatcgtgatgctgttcttcatctacgcggtgatcgggatgcaggtgtttgggaaaattgccctgaatgataccacagagatcaaccggaacaacaactttcagaccttcccccaggccgtgctgctcctcttcaggtgtgccaccggggaggcctggcaggacatcatgctggcctgcatgccaggcaagaagtgtgccccagagtccgagcccagcaacagcacggagggtgaaacaccctgtggtagcagctttgctgtcttctacttcatcagcttctacatgctctgtgccttcctgatcatcaacctctttgtagctgtcatcatggacaactttgactacctgacaagggactggtccatccttggtccccaccacctggatgagtttaaaagaatctgggcagagtatgaccctgaagccaagggtcgtatcaaacacctggatgtggtgaccctcctccggcggattcagccgccactaggttttgggaagctgtgccctcaccgcgtggcttgcaaacgcctggtctccatgaacatgcctctgaacagcgacgggacagtcatgttcaatgccaccctgtttgccctggtcaggacggccctgaggatcaaaacagaagggaacctagaacaagccaatgaggagctgcgggcgatcatcaagaagatctggaagcggaccagcatgaagctgctggaccaggtggtgccccctgcaggtgatgatgaggtcaccgttggcaagttctacgccacgttcctgatccaggagtacttccggaagttcaagaagcgcaaagagcagggccttgtgggcaagccctcccagaggaacgcgctgtctctgcaggctggcttgcgcacactgcatgacatcgggcctgagatccgacgggccatctctggagatctcaccgctgaggaggagctggacaaggccatgaaggaggctgtgtccgctgcttctgaagatgacatcttcaggagggccggtggcctgttcggcaaccacgtcagctactaccaaagcgacggccggagcgccttcccccagaccttcaccactcagcgcccgctgcacatcaacaaggcgggcagcagccagggcgacactgagtcgccatcccacgagaagctggtggactccaccttcaccccgagcagctactcgtccaccggctccaacgccaacatcaacaacgccaacaacaccgccctgggtcgcctccctcgccccgccggctaccccagcacggtcagcactgtggagggccacgggccccccttgtcccctgccatccgggtgcaggaggtggcgtggaagctcagctccaacaggatgcactgctgtgacatgctggatggtgggaccttccctcccgccctgggcccccgcagggctcctccctgtctgcatcagcagctccagggttccctggcggggctgagagaggacacaccctgcatcgtgcctggccacgcttcactgtgctgctcttccagagtaggagagtggctcccagcaggctgcacagccccccagcatgccaggtgccactcccgggagagccaggcagccatggcgggtcaggaggagacgtctcaggatgagacctatgaagtgaagatgaaccatgacacggaggcctgcagtgagcccagcctgctctccacagagatgctctcctaccaggatgacgaaaatcggcaactgacgctcccagaggaggacaagagggacatccggcaatctccgaagaggggtttcctccgctctgcctcactaggtcgaagggcctccttccacctggaatgtctgaagcgacagaaggaccgagggggagacatctctcagaagacagtcctgcccttgcatctggttcatcatcaggcattggcagtggcaggcctgagccccctcctccagagaagccattcccctgcctcattccctaggccttttgccaccccaccagccacacctggcagccgaggctggcccccacagcccgtccccaccctgcggcttgagggggtcgagtccagtgagaaactcaacagcagcttcccatccatccactgcggctcctgggctgagaccacccccggtggcgggggcagcagcgccgcccggagagtccggcccgtctccctcatggtgcccagccaggctggggccccagggaggcagttccacggcagtgccagcagcctggtggaagcggtcttgatttcagaaggactggggcagtttgctcaagatcccaagttcatcgaggtcaccacccaggagctggccgacgcctgcgacatgaccatagaggagatggagagcgcggccgacaacatcctcagcgggggcgccccacagagccccaatggcgccctcttaccctttgtgaactgcagggacgcggggcaggaccgagccgggggcgaagaggacgcgggctgtgtgcgcgcgcggggtcgaccgagtgaggaggagctccaggacagcagggtctacgtcagcagcctgtagtgggcgctgccagatgcgggcttttttttatttgtttcaatgttcctaatgggttcgtttcagaagtgcctcactgttctcgtgacctggagttaaccggaacagcgtcttcattcatttctgttgggaccagacgcggagcctgggtgcgcgagccgccctccgggaggaaggcgcccggctgcgtctgcagaggcggggagaggaggcggcgagggtcccggggcgcgaggaaggcgcctgccctctcccagctcgcaggccccgggcccggccgcgcctccgcggggagagcaccccggcttcccgcgcgccctcaccaaaaggaccctacagcaaacgggtgtctttcgactctgcttgtagaaaccatttgcacatattctgtacgagcctcgctgtctccctagagccagggccctgcggatttggagaagggagcggggcaggacttccaggaggaccccaacccggcccggagagggaggaggaggcctccaggggcgcggagctctggggatgggcgtcgggccggcagtggtgcggctcactccgtccctgcccacctgcgacgggatcccccgaccggcacgggccacgccgagctcccggccagccgccggcccgcaggcagcgcgagggaggagctgcgccgccggctccgcccaaccaggtggtgctgagcttccgctgagcgctcttttgttttgtggtttgacacttttcttgacagcatgttgcagtttcttttcggttttggttttttttaaatgttttattttgctttcccagcgggaggggaggaagaagagtgtttacaaagtcctgtagccccctcacctttctgttttcacttttgccaatgtacatcgggtttggttttcttgtattatttaaacggttgtggtttcctttttccacggaggttcaatagaagccgctgcaggagagttttaccaa

SEQ ID NO: 113181 - DNA, 6568 bp, Homo sapiens
  Payload ID: 2138
  Gene Symbol: CACNA1C
  Gene Name: calcium channel, voltage-dependent, L type, alpha 1C subunit
  Uniprot ID: Q13936
  ENST ID: ENST00000399637
  CDS Start-End: 1-6474
atggtcaatgagaatacgaggatgtacattccagaggaaaaccaccaaggttccaactatgggagcccacgccccgcccatgccaacatgaatgccaatgcggcagcggggctggcccctgagcacatccccaccccgggggctgccctgtcgtggcaggcggccatcgacgcagcccggcaggctaagctgatgggcagcgctggcaatgcgaccatctccacagtcagctccacgcagcggaagcggcagcaatatgggaaacccaagaagcagggcagcaccacggccacacgcccgccccgagccctgctctgcctgaccctgaagaaccccatccggagggcctgcatcagcattgtcgaatggaaaccatttgaaataattattttactgactatttttgccaattgtgtggccttagcgatctatattccctttccagaagatgattccaacgccaccaattccaacctggaacgagtggaatatctctttctcataatttttacggtggaagcgtttttaaaagtaatcgcctatggactcctctttcaccccaatgcctacctccgcaacggctggaacctactagattttataattgtggttgtggggctttttagtgcaattttagaacaagcaaccaaagcagatggggcaaacgctctcggagggaaaggggccggatttgatgtgaaggcgctgagggccttccgcgtgctgcgccccctgcggctggtgtccggagtcccaagtctccaggtggtcctgaattccatcatcaaggccatggtccccctgctgcacatcgccctgcttgtgctgtttgtcatcatcatctacgccatcatcggcttggagctcttcatggggaagatgcacaagacctgctacaaccaggagggcatagcagatgttccagcagaagatgacccttccccttgtgcgctggaaacgggccacgggcggcagtgccagaacggcacggtgtgcaagcccggctgggatggtcccaagcacggcatcaccaactttgacaactttgccttcgccatgctcacggtgttccagtgcatcaccatggagggctggacggacgtgctgtactgggtcaatgatgccgtaggaagggactggccctggatctattttgttacactaatcatcatagggtcattttttgtacttaacttggttctcggtgtgcttagcggagagttttccaaagagagggagaaggccaaggcccggggagatttccagaagctgcgggagaagcagcagctagaagaggatctcaaaggctacctggattggatcactcaggccgaagacatcgatcctgagaatgaggacgaaggcatggatgaggagaagccccgaaacatgagcatgcccaccagtgagaccgagtccgtcaacaccgaaaacgtggctggaggtgacatcgagggagaaaactgcggggccaggctggcccaccggatctccaagtcaaagttcagccgctactggcgccggtggaatcggttctgcagaaggaagtgccgcgccgcagtcaagtctaatgtcttctactggctggtgattttcctggtgttcctcaacacgctcaccattgcctctgagcactacaaccagcccaactggctcacagaagtccaagacacggcaaacaaggccctgctggccctgttcacggcagagatgctcctgaagatgtacagcctgggcctgcaggcctacttcgtgtccctcttcaaccgctttgactgcttcgtcgtgtgtggcggcatcctggagaccatcctggtggagaccaagatcatgtccccactgggcatctccgtgctcagatgcgtccggctgctgaggattttcaagatcacgaggtactggaactccttgagcaacctggtggcatccttgctgaactctgtgcgctccatcgcctccctgctccttctcctcttcctcttcatcatcatcttctccctcctggggatgcagctctttggaggaaagttcaactttgatgagatgcagacccggaggagcacattcgataacttcccccagtccctcctcactgtgtttcagatcctgaccggggaggactggaattcggtgatgtatgatgggatcatggcttatggcggcccctcttttccagggatgttagtctgtatttacttcatcatcctcttcatctgtggaaactatatcctactgaatgtgttcttggccattgctgtggacaacctggctgatgctgagagcctcacatctgcccaaaaggaggaggaagaggagaaggagagaaagaagctggccaggactgccagcccagagaagaaacaagagttggtggagaagccggcagtgggggaatccaaggaggagaagattgagctgaaatccatcacggctgacggagagtctccacccgccaccaagatcaacatggatgacctccagcccaatgaaaatgaggataagagcccctaccccaacccagaaactacaggagaagaggatgaggaggagccagagatgcctgtcggccctcgcccacgaccactctctgagcttcaccttaaggaaaaggcagtgcccatgccagaagccagcgcgtttttcatcttcagctctaacaacaggtttcgcctccagtgccaccgcattgtcaatgacacgatcttcaccaacctgatcctcttcttcattctgctcagcagcatttccctggctgctgaggacccggtccagcacacctccttcaggaaccatatcctaggcaatgcagactatgtcttcactagtatctttacattagaaattatccttaagatgactgcttatggggctttcttgcacaagggttctttctgccggaactacttcaacatcctggacctgctggtggtcagcgtgtccctcatctcctttggcatccagtccagtgcaatcaatgtcgtgaagatcttgcgagtcctgcgagtactcaggcccctgagggccatcaacagggccaaggggctaaagcatgtggttcagtgtgtgtttgtcgccatccggaccatcgggaacatcgtgattgtcaccaccctgctgcagttcatgtttgcctgcatcggggtccagctcttcaagggaaagctgtacacctgttcagacagttccaagcagacagaggcggaatgcaagggcaactacatcacgtacaaagacggggaggttgaccaccccatcatccaaccccgcagctgggagaacagcaagtttgactttgacaatgttctggcagccatgatggccctcttcaccgtctccaccttcgaagggtggccagagctgctgtaccgctccatcgactcccacacggaagacaagggccccatctacaactaccgtgtggagatctccatcttcttcatcatctacatcatcatcatcgccttcttcatgatgaacatcttcgtgggcttcgtcatcgtcacctttcaggagcagggggagcaggagtacaagaactgtgagctggacaagaaccagcgacagtgcgtggaatacgccctcaaggcccggcccctgcggaggtacatccccaagaaccagcaccagtacaaagtgtggtacgtggtcaactccacctacttcgagtacctgatgttcgtcctcatcctgctcaacaccatctgcctggccatgcagcactacggccagagctgcctgttcaaaatcgccatgaacatcctcaacatgctcttcactggcctcttcaccgtggagatgatcctgaagctcattgccttcaaacccaagcactatttctgtgatgcatggaatacatttgacgccttgattgttgtgggtagcattgttgatatagcaatcaccgaggtaaacccagctgaacatacccaatgctctccctctatgaacgcagaggaaaactcccgcatctccatcaccttcttccgcctgttccgggtcatgcgtctggtgaagctgctgagccgtggggagggcatccggacgctgctgtggaccttcatcaagtccttccaggccctgccctatgtggccctcctgatcgtgatgctgttcttcatctacgcggtgatcgggatgcaggtgtttgggaaaattgccctgaatgataccacagagatcaaccggaacaacaactttcagaccttcccccaggccgtgctgctcctcttcaggtgtgccaccggggaggcctggcaggacatcatgctggcctgcatgccaggcaagaagtgtgccccagagtccgagcccagcaacagcacggagggtgaaacaccctgtggtagcagctttgctgtcttctacttcatcagcttctacatgctctgtgccttcctgatcatcaacctctttgtagctgtcatcatggacaactttgactacctgacaagggactggtccatccttggtccccaccacctggatgagtttaaaagaatctgggcagagtatgaccctgaagccaagggtcgtatcaaacacctggatgtggtgaccctcctccggcggattcagccgccactaggttttgggaagctgtgccctcaccgcgtggcttgcaaacgcctggtctccatgaacatgcctctgaacagcgacgggacagtcatgttcaatgccaccctgtttgccctggtcaggacggccctgaggatcaaaacagaagagggacccagcccatcagaggcccaccaaggggctgaggatcctttccgccctgcagggaacctagaacaagccaatgaggagctgcgggcgatcatcaagaagatctggaagcggaccagcatgaagctgctggaccaggtggtgccccctgcaggtgatgatgaggtcaccgttggcaagttctacgccacgttcctgatccaggagtacttccggaagttcaagaagcgcaaagagcagggccttgtgggcaagccctcccagaggaacgcgctgtctctgcaggctggcttgcgcacactgcatgacatcgggcctgagatccgacgggccatctctggagatctcaccgctgaggaggagctggacaaggccatgaaggaggctgtgtccgctgcttctgaagatgacatcttcaggagggccggtggcctgttcggcaaccacgtcagctactaccaaagcgacggccggagcgccttcccccagaccttcaccactcagcgcccgctgcacatcaacaaggcgggcagcagccagggcgacactgagtcgccatcccacgagaagctggtggactccaccttcaccccgagcagctactcgtccaccggctccaacgccaacatcaacaacgccaacaacaccgccctgggtcgcctccctcgccccgccggctaccccagcacggtcagcactgtggagggccacgggccccccttgtcccctgccatccgggtgcaggaggtggcgtggaagctcagctccaacaggtgccactcccgggagagccaggcagccatggcgggtcaggaggagacgtctcaggatgagacctatgaagtgaagatgaaccatgacacggaggcctgcagtgagcccagcctgctctccacagagatgctctcctaccaggatgacgaaaatcggcaactgacgctcccagaggaggacaagagggacatccggcaatctccgaagaggggtttcctccgctctgcctcactaggtcgaagggcctccttccacctggaatgtctgaagcgacagaaggaccgagggggagacatctctcagaagacagtcctgcccttgcatctggttcatcatcaggcattggcagtggcaggcctgagccccctcctccagagaagccattcccctgcctcattccctaggccttttgccaccccaccagccacacctggcagccgaggctggcccccacagcccgtccccaccctgcggcttgagggggtcgagtccagtgagaaactcaacagcagcttcccatccatccactgcggctcctgggctgagaccacccccggtggcgggggcagcagcgccgcccggagagtccggcccgtctccctcatggtgcccagccaggctggggccccagggaggcagttccacggcagtgccagcagcctggtggaagcggtcttgatttcagaaggactggggcagtttgctcaagatcccaagttcatcgaggtcaccacccaggagctggccgacgcctgcgacatgaccatagaggagatggagagcgcggccgacaacatcctcagcgggggcgccccacagagccccaatggcgccctcttaccctttgtgaactgcagggacgcggggcaggaccgagccgggggcgaagaggacgcgggctgtgtgcgcgcgcggggtcgaccgagtgaggaggagctccaggacagcagggtctacgtcagcagcctgtagtgggcgctgccagatgcgggcttttttttatttgtttcaatgttcctaatgggttcgtttcagaagtgcctcactgttctcgtgacctggagtt

SEQ ID NO: 113182 - DNA, 6595 bp, Homo sapiens
  Payload ID: 2138
  Gene Symbol: CACNA1C
  Gene Name: calcium channel, voltage-dependent, L type, alpha 1C subunit
  Uniprot ID: Q13936
  ENST ID: ENST00000399638
  CDS Start-End: 1-6501
atggtcaatgagaatacgaggatgtacattccagaggaaaaccaccaaggttccaactatgggagcccacgccccgcccatgccaacatgaatgccaatgcggcagcggggctggcccctgagcacatccccaccccgggggctgccctgtcgtggcaggcggccatcgacgcagcccggcaggctaagctgatgggcagcgctggcaatgcgaccatctccacagtcagctccacgcagcggaagcggcagcaatatgggaaacccaagaagcagggcagcaccacggccacacgcccgccccgagccctgctctgcctgaccctgaagaaccccatccggagggcctgcatcagcattgtcgaatggaaaccatttgaaataattattttactgactatttttgccaattgtgtggccttagcgatctatattccctttccagaagatgattccaacgccaccaattccaacctggaacgagtggaatatctctttctcataatttttacggtggaagcgtttttaaaagtaatcgcctatggactcctctttcaccccaatgcctacctccgcaacggctggaacctactagattttataattgtggttgtggggctttttagtgcaattttagaacaagcaaccaaagcagatggggcaaacgctctcggagggaaaggggccggatttgatgtgaaggcgctgagggccttccgcgtgctgcgccccctgcggctggtgtccggagtcccaagtctccaggtggtcctgaattccatcatcaaggccatggtccccctgctgcacatcgccctgcttgtgctgtttgtcatcatcatctacgccatcatcggcttggagctcttcatggggaagatgcacaagacctgctacaaccaggagggcatagcagatgttccagcagaagatgacccttccccttgtgcgctggaaacgggccacgggcggcagtgccagaacggcacggtgtgcaagcccggctgggatggtcccaagcacggcatcaccaactttgacaactttgccttcgccatgctcacggtgttccagtgcatcaccatggagggctggacggacgtgctgtactgggtcaatgatgccgtaggaagggactggccctggatctattttgttacactaatcatcatagggtcattttttgtacttaacttggttctcggtgtgcttagcggagagttttccaaagagagggagaaggccaaggcccggggagatttccagaagctgcgggagaagcagcagctagaagaggatctcaaaggctacctggattggatcactcaggccgaagacatcgatcctgagaatgaggacgaaggcatggatgaggagaagccccgaaacatgagcatgcccaccagtgagaccgagtccgtcaacaccgaaaacgtggctggaggtgacatcgagggagaaaactgcggggccaggctggcccaccggatctccaagtcaaagttcagccgctactggcgccggtggaatcggttctgcagaaggaagtgccgcgccgcagtcaagtctaatgtcttctactggctggtgattttcctggtgttcctcaacacgctcaccattgcctctgagcactacaaccagcccaactggctcacagaagtccaagacacggcaaacaaggccctgctggccctgttcacggcagagatgctcctgaagatgtacagcctgggcctgcaggcctacttcgtgtccctcttcaaccgctttgactgcttcgtcgtgtgtggcggcatcctggagaccatcctggtggagaccaagatcatgtccccactgggcatctccgtgctcagatgcgtccggctgctgaggattttcaagatcacgaggtactggaactccttgagcaacctggtggcatccttgctgaactctgtgcgctccatcgcctccctgctccttctcctcttcctcttcatcatcatcttctccctcctggggatgcagctctttggaggaaagttcaactttgatgagatgcagacccggaggagcacattcgataacttcccccagtccctcctcactgtgtttcagatcctgaccggggaggactggaattcggtgatgtatgatgggatcatggcttatggcggcccctcttttccagggatgttagtctgtatttacttcatcatcctcttcatctgtggaaactatatcctactgaatgtgttcttggccattgctgtggacaacctggctgatgctgagagcctcacatctgcccaaaaggaggaggaagaggagaaggagagaaagaagctggccaggactgccagcccagagaagaaacaagagttggtggagaagccggcagtgggggaatccaaggaggagaagattgagctgaaatccatcacggctgacggagagtctccacccgccaccaagatcaacatggatgacctccagcccaatgaaaatgaggataagagcccctaccccaacccagaaactacaggagaagaggatgaggaggagccagagatgcctgtcggccctcgcccacgaccactctctgagcttcaccttaaggaaaaggcagtgcccatgccagaagccagcgcgtttttcatcttcagctctaacaacaggtttcgcctccagtgccaccgcattgtcaatgacacgatcttcaccaacctgatcctcttcttcattctgctcagcagcatttccctggctgctgaggacccggtccagcacacctccttcaggaaccatattctgttttattttgatattgtttttaccaccattttcaccattgaaattgctctgaagatgactgcttatggggctttcttgcacaagggttctttctgccggaactacttcaacatcctggacctgctggtggtcagcgtgtccctcatctcctttggcatccagtccagtgcaatcaatgtcgtgaagatcttgcgagtcctgcgagtactcaggcccctgagggccatcaacagggccaaggggctaaagcatgtggttcagtgtgtgtttgtcgccatccggaccatcgggaacatcgtgattgtcaccaccctgctgcagttcatgtttgcctgcatcggggtccagctcttcaagggaaagctgtacacctgttcagacagttccaagcagacagaggcggaatgcaagggcaactacatcacgtacaaagacggggaggttgaccaccccatcatccaaccccgcagctgggagaacagcaagtttgactttgacaatgttctggcagccatgatggccctcttcaccgtctccaccttcgaagggtggccagagctgctgtaccgctccatcgactcccacacggaagacaagggccccatctacaactaccgtgtggagatctccatcttcttcatcatctacatcatcatcatcgccttcttcatgatgaacatcttcgtgggcttcgtcatcgtcacctttcaggagcagggggagcaggagtacaagaactgtgagctggacaagaaccagcgacagtgcgtggaatacgccctcaaggcccggcccctgcggaggtacatccccaagaaccagcaccagtacaaagtgtggtacgtggtcaactccacctacttcgagtacctgatgttcgtcctcatcctgctcaacaccatctgcctggccatgcagcactacggccagagctgcctgttcaaaatcgccatgaacatcctcaacatgctcttcactggcctcttcaccgtggagatgatcctgaagctcattgccttcaaacccaagggttactttagtgatccctggaatgtttttgacttcctcatcgtaattggcagcataattgacgtcattctcagtgagactaatcactatttctgtgatgcatggaatacatttgacgccttgattgttgtgggtagcattgttgatatagcaatcaccgaggtaaacccagctgaacatacccaatgctctccctctatgaacgcagaggaaaactcccgcatctccatcaccttcttccgcctgttccgggtcatgcgtctggtgaagctgctgagccgtggggagggcatccggacgctgctgtggaccttcatcaagtccttccaggccctgccctatgtggccctcctgatcgtgatgctgttcttcatctacgcggtgatcgggatgcaggtgtttgggaaaattgccctgaatgataccacagagatcaaccggaacaacaactttcagaccttcccccaggccgtgctgctcctcttcaggtgtgccaccggggaggcctggcaggacatcatgctggcctgcatgccaggcaagaagtgtgccccagagtccgagcccagcaacagcacggagggtgaaacaccctgtggtagcagctttgctgtcttctacttcatcagcttctacatgctctgtgccttcctgatcatcaacctctttgtagctgtcatcatggacaactttgactacctgacaagggactggtccatccttggtccccaccacctggatgagtttaaaagaatctgggcagagtatgaccctgaagccaagggtcgtatcaaacacctggatgtggtgaccctcctccggcggattcagccgccactaggttttgggaagctgtgccctcaccgcgtggcttgcaaacgcctggtctccatgaacatgcctctgaacagcgacgggacagtcatgttcaatgccaccctgtttgccctggtcaggacggccctgaggatcaaaacagaagggaacctagaacaagccaatgaggagctgcgggcgatcatcaagaagatctggaagcggaccagcatgaagctgctggaccaggtggtgccccctgcaggtgatgatgaggtcaccgttggcaagttctacgccacgttcctgatccaggagtacttccggaagttcaagaagcgcaaagagcagggccttgtgggcaagccctcccagaggaacgcgctgtctctgcaggctggcttgcgcacactgcatgacatcgggcctgagatccgacgggccatctctggagatctcaccgctgaggaggagctggacaaggccatgaaggaggctgtgtccgctgcttctgaagatgacatcttcaggagggccggtggcctgttcggcaaccacgtcagctactaccaaagcgacggccggagcgccttcccccagaccttcaccactcagcgcccgctgcacatcaacaaggcgggcagcagccagggcgacactgagtcgccatcccacgagaagctggtggactccaccttcaccccgagcagctactcgtccaccggctccaacgccaacatcaacaacgccaacaacaccgccctgggtcgcctccctcgccccgccggctaccccagcacggtcagcactgtggagggccacgggccccccttgtcccctgccatccgggtgcaggaggtggcgtggaagctcagctccaacaggtgccactcccgggagagccaggcagccatggcgggtcaggaggagacgtctcaggatgagacctatgaagtgaagatgaaccatgacacggaggcctgcagtgagcccagcctgctctccacagagatgctctcctaccaggatgacgaaaatcggcaactgacgctcccagaggaggacaagagggacatccggcaatctccgaagaggggtttcctccgctctgcctcactaggtcgaagggcctccttccacctggaatgtctgaagcgacagaaggaccgagggggagacatctctcagaagacagtcctgcccttgcatctggttcatcatcaggcattggcagtggcaggcctgagccccctcctccagagaagccattcccctgcctcattccctaggccttttgccaccccaccagccacacctggcagccgaggctggcccccacagcccgtccccaccctgcggcttgagggggtcgagtccagtgagaaactcaacagcagcttcccatccatccactgcggctcctgggctgagaccacccccggtggcgggggcagcagcgccgcccggagagtccggcccgtctccctcatggtgcccagccaggctggggccccagggaggcagttccacggcagtgccagcagcctggtggaagcggtcttgatttcagaaggactggggcagtttgctcaagatcccaagttcatcgaggtcaccacccaggagctggccgacgcctgcgacatgaccatagaggagatggagagcgcggccgacaacatcctcagcgggggcgccccacagagccccaatggcgccctcttaccctttgtgaactgcagggacgcggggcaggaccgagccgggggcgaagaggacgcgggctgtgtgcgcgcgcggggtcgaccgagtgaggaggagctccaggacagcagggtctacgtcagcagcctgtagtgggcgctgccagatgcgggcttttttttatttgtttcaatgttcctaatgggttcgtttcagaagtgcctcactgttctcgtgacctggagtt

SEQ ID NO: 113183 - DNA, 6511 bp, Homo sapiens
  Payload ID: 2138
  Gene Symbol: CACNA1C
  Gene Name: calcium channel, voltage-dependent, L type, alpha 1C subunit
  Uniprot ID: Q13936
  ENST ID: ENST00000399641
  CDS Start-End: 1-6417
atggtcaatgagaatacgaggatgtacattccagaggaaaaccaccaaggttccaactatgggagcccacgccccgcccatgccaacatgaatgccaatgcggcagcggggctggcccctgagcacatccccaccccgggggctgccctgtcgtggcaggcggccatcgacgcagcccggcaggctaagctgatgggcagcgctggcaatgcgaccatctccacagtcagctccacgcagcggaagcggcagcaatatgggaaacccaagaagcagggcagcaccacggccacacgcccgccccgagccctgctctgcctgaccctgaagaaccccatccggagggcctgcatcagcattgtcgaatggaaaccatttgaaataattattttactgactatttttgccaattgtgtggccttagcgatctatattccctttccagaagatgattccaacgccaccaattccaacctggaacgagtggaatatctctttctcataatttttacggtggaagcgtttttaaaagtaatcgcctatggactcctctttcaccccaatgcctacctccgcaacggctggaacctactagattttataattgtggttgtggggctttttagtgcaattttagaacaagcaaccaaagcagatggggcaaacgctctcggagggaaaggggccggatttgatgtgaaggcgctgagggccttccgcgtgctgcgccccctgcggctggtgtccggagtcccaagtctccaggtggtcctgaattccatcatcaaggccatggtccccctgctgcacatcgccctgcttgtgctgtttgtcatcatcatctacgccatcatcggcttggagctcttcatggggaagatgcacaagacctgctacaaccaggagggcatagcagatgttccagcagaagatgacccttccccttgtgcgctggaaacgggccacgggcggcagtgccagaacggcacggtgtgcaagcccggctgggatggtcccaagcacggcatcaccaactttgacaactttgccttcgccatgctcacggtgttccagtgcatcaccatggagggctggacggacgtgctgtactggatgcaggacgctatgggctatgagttaccctgggtgtattttgtcagtctggtcatctttggatcctttttcgttctaaatctggttctcggtgtgttgagcggagagttttccaaagagagggagaaggccaaggcccggggagatttccagaagctgcgggagaagcagcagctagaagaggatctcaaaggctacctggattggatcactcaggccgaagacatcgatcctgagaatgaggacgaaggcatggatgaggagaagccccgaaacatgagcatgcccaccagtgagaccgagtccgtcaacaccgaaaacgtggctggaggtgacatcgagggagaaaactgcggggccaggctggcccaccggatctccaagtcaaagttcagccgctactggcgccggtggaatcggttctgcagaaggaagtgccgcgccgcagtcaagtctaatgtcttctactggctggtgattttcctggtgttcctcaacacgctcaccattgcctctgagcactacaaccagcccaactggctcacagaagtccaagacacggcaaacaaggccctgctggccctgttcacggcagagatgctcctgaagatgtacagcctgggcctgcaggcctacttcgtgtccctcttcaaccgctttgactgcttcgtcgtgtgtggcggcatcctggagaccatcctggtggagaccaagatcatgtccccactgggcatctccgtgctcagatgcgtccggctgctgaggattttcaagatcacgaggtactggaactccttgagcaacctggtggcatccttgctgaactctgtgcgctccatcgcctccctgctccttctcctcttcctcttcatcatcatcttctccctcctggggatgcagctctttggaggaaagttcaactttgatgagatgcagacccggaggagcacattcgataacttcccccagtccctcctcactgtgtttcagatcctgaccggggaggactggaattcggtgatgtatgatgggatcatggcttatggcggcccctcttttccagggatgttagtctgtatttacttcatcatcctcttcatctgtggaaactatatcctactgaatgtgttcttggccattgctgtggacaacctggctgatgctgagagcctcacatctgcccaaaaggaggaggaagaggagaaggagagaaagaagctggccaggactgccagcccagagaagaaacaagagttggtggagaagccggcagtgggggaatccaaggaggagaagattgagctgaaatccatcacggctgacggagagtctccacccgccaccaagatcaacatggatgacctccagcccaatgaaaatgaggataagagcccctaccccaacccagaaactacaggagaagaggatgaggaggagccagagatgcctgtcggccctcgcccacgaccactctctgagcttcaccttaaggaaaaggcagtgcccatgccagaagccagcgcgtttttcatcttcagctctaacaacaggtttcgcctccagtgccaccgcattgtcaatgacacgatcttcaccaacctgatcctcttcttcattctgctcagcagcatttccctggctgctgaggacccggtccagcacacctccttcaggaaccatatcctaggcaatgcagactatgtcttcactagtatctttacattagaaattatccttaagatgactgcttatggggctttcttgcacaagggttctttctgccggaactacttcaacatcctggacctgctggtggtcagcgtgtccctcatctcctttggcatccagtccagtgcaatcaatgtcgtgaagatcttgcgagtcctgcgagtactcaggcccctgagggccatcaacagggccaaggggctaaagcatgtggttcagtgtgtgtttgtcgccatccggaccatcgggaacatcgtgattgtcaccaccctgctgcagttcatgtttgcctgcatcggggtccagctcttcaagggaaagctgtacacctgttcagacagttccaagcagacagaggcggaatgcaagggcaactacatcacgtacaaagacggggaggttgaccaccccatcatccaaccccgcagctgggagaacagcaagtttgactttgacaatgttctggcagccatgatggccctcttcaccgtctccaccttcgaagggtggccagagctgctgtaccgctccatcgactcccacacggaagacaagggccccatctacaactaccgtgtggagatctccatcttcttcatcatctacatcatcatcatcgccttcttcatgatgaacatcttcgtgggcttcgtcatcgtcacctttcaggagcagggggagcaggagtacaagaactgtgagctggacaagaaccagcgacagtgcgtggaatacgccctcaaggcccggcccctgcggaggtacatccccaagaaccagcaccagtacaaagtgtggtacgtggtcaactccacctacttcgagtacctgatgttcgtcctcatcctgctcaacaccatctgcctggccatgcagcactacggccagagctgcctgttcaaaatcgccatgaacatcctcaacatgctcttcactggcctcttcaccgtggagatgatcctgaagctcattgccttcaaacccaagcactatttctgtgatgcatggaatacatttgacgccttgattgttgtgggtagcattgttgatatagcaatcaccgaggtaaacccagctgaacatacccaatgctctccctctatgaacgcagaggaaaactcccgcatctccatcaccttcttccgcctgttccgggtcatgcgtctggtgaagctgctgagccgtggggagggcatccggacgctgctgtggaccttcatcaagtccttccaggccctgccctatgtggccctcctgatcgtgatgctgttcttcatctacgcggtgatcgggatgcaggtgtttgggaaaattgccctgaatgataccacagagatcaaccggaacaacaactttcagaccttcccccaggccgtgctgctcctcttcaggtgtgccaccggggaggcctggcaggacatcatgctggcctgcatgccaggcaagaagtgtgccccagagtccgagcccagcaacagcacggagggtgaaacaccctgtggtagcagctttgctgtcttctacttcatcagcttctacatgctctgtgccttcctgatcatcaacctctttgtagctgtcatcatggacaactttgactacctgacaagggactggtccatccttggtccccaccacctggatgagtttaaaagaatctgggcagagtatgaccctgaagccaagggtcgtatcaaacacctggatgtggtgaccctcctccggcggattcagccgccactaggttttgggaagctgtgccctcaccgcgtggcttgcaaacgcctggtctccatgaacatgcctctgaacagcgacgggacagtcatgttcaatgccaccctgtttgccctggtcaggacggccctgaggatcaaaacagaagggaacctagaacaagccaatgaggagctgcgggcgatcatcaagaagatctggaagcggaccagcatgaagctgctggaccaggtggtgccccctgcaggtgatgatgaggtcaccgttggcaagttctacgccacgttcctgatccaggagtacttccggaagttcaagaagcgcaaagagcagggccttgtgggcaagccctcccagaggaacgcgctgtctctgcaggctggcttgcgcacactgcatgacatcgggcctgagatccgacgggccatctctggagatctcaccgctgaggaggagctggacaaggccatgaaggaggctgtgtccgctgcttctgaagatgacatcttcaggagggccggtggcctgttcggcaaccacgtcagctactaccaaagcgacggccggagcgccttcccccagaccttcaccactcagcgcccgctgcacatcaacaaggcgggcagcagccagggcgacactgagtcgccatcccacgagaagctggtggactccaccttcaccccgagcagctactcgtccaccggctccaacgccaacatcaacaacgccaacaacaccgccctgggtcgcctccctcgccccgccggctaccccagcacggtcagcactgtggagggccacgggccccccttgtcccctgccatccgggtgcaggaggtggcgtggaagctcagctccaacaggtgccactcccgggagagccaggcagccatggcgggtcaggaggagacgtctcaggatgagacctatgaagtgaagatgaaccatgacacggaggcctgcagtgagcccagcctgctctccacagagatgctctcctaccaggatgacgaaaatcggcaactgacgctcccagaggaggacaagagggacatccggcaatctccgaagaggggtttcctccgctctgcctcactaggtcgaagggcctccttccacctggaatgtctgaagcgacagaaggaccgagggggagacatctctcagaagacagtcctgcccttgcatctggttcatcatcaggcattggcagtggcaggcctgagccccctcctccagagaagccattcccctgcctcattccctaggccttttgccaccccaccagccacacctggcagccgaggctggcccccacagcccgtccccaccctgcggcttgagggggtcgagtccagtgagaaactcaacagcagcttcccatccatccactgcggctcctgggctgagaccacccccggtggcgggggcagcagcgccgcccggagagtccggcccgtctccctcatggtgcccagccaggctggggccccagggaggcagttccacggcagtgccagcagcctggtggaagcggtcttgatttcagaaggactggggcagtttgctcaagatcccaagttcatcgaggtcaccacccaggagctggccgacgcctgcgacatgaccatagaggagatggagagcgcggccgacaacatcctcagcgggggcgccccacagagccccaatggcgccctcttaccctttgtgaactgcagggacgcggggcaggaccgagccgggggcgaagaggacgcgggctgtgtgcgcgcgcggggtcgaccgagtgaggaggagctccaggacagcagggtctacgtcagcagcctgtagtgggcgctgccagatgcgggcttttttttatttgtttcaatgttcctaatgggttcgtttcagaagtgcctcactgttctcgtgacctggagtt

SEQ ID NO: 113184 - DNA, 6511 bp, Homo sapiens
  Payload ID: 2138
  Gene Symbol: CACNA1C
  Gene Name: calcium channel, voltage-dependent, L type, alpha 1C subunit
  Uniprot ID: Q13936
  ENST ID: ENST00000399644
  CDS Start-End: 1-6417
atggtcaatgagaatacgaggatgtacattccagaggaaaaccaccaaggttccaactatgggagcccacgccccgcccatgccaacatgaatgccaatgcggcagcggggctggcccctgagcacatccccaccccgggggctgccctgtcgtggcaggcggccatcgacgcagcccggcaggctaagctgatgggcagcgctggcaatgcgaccatctccacagtcagctccacgcagcggaagcggcagcaatatgggaaacccaagaagcagggcagcaccacggccacacgcccgccccgagccctgctctgcctgaccctgaagaaccccatccggagggcctgcatcagcattgtcgaatggaaaccatttgaaataattattttactgactatttttgccaattgtgtggccttagcgatctatattccctttccagaagatgattccaacgccaccaattccaacctggaacgagtggaatatctctttctcataatttttacggtggaagcgtttttaaaagtaatcgcctatggactcctctttcaccccaatgcctacctccgcaacggctggaacctactagattttataattgtggttgtggggctttttagtgcaattttagaacaagcaaccaaagcagatggggcaaacgctctcggagggaaaggggccggatttgatgtgaaggcgctgagggccttccgcgtgctgcgccccctgcggctggtgtccggagtcccaagtctccaggtggtcctgaattccatcatcaaggccatggtccccctgctgcacatcgccctgcttgtgctgtttgtcatcatcatctacgccatcatcggcttggagctcttcatggggaagatgcacaagacctgctacaaccaggagggcatagcagatgttccagcagaagatgacccttccccttgtgcgctggaaacgggccacgggcggcagtgccagaacggcacggtgtgcaagcccggctgggatggtcccaagcacggcatcaccaactttgacaactttgccttcgccatgctcacggtgttccagtgcatcaccatggagggctggacggacgtgctgtactgggtcaatgatgccgtaggaagggactggccctggatctattttgttacactaatcatcatagggtcattttttgtacttaacttggttctcggtgtgcttagcggagagttttccaaagagagggagaaggccaaggcccggggagatttccagaagctgcgggagaagcagcagctagaagaggatctcaaaggctacctggattggatcactcaggccgaagacatcgatcctgagaatgaggacgaaggcatggatgaggagaagccccgaaacatgagcatgcccaccagtgagaccgagtccgtcaacaccgaaaacgtggctggaggtgacatcgagggagaaaactgcggggccaggctggcccaccggatctccaagtcaaagttcagccgctactggcgccggtggaatcggttctgcagaaggaagtgccgcgccgcagtcaagtctaatgtcttctactggctggtgattttcctggtgttcctcaacacgctcaccattgcctctgagcactacaaccagcccaactggctcacagaagtccaagacacggcaaacaaggccctgctggccctgttcacggcagagatgctcctgaagatgtacagcctgggcctgcaggcctacttcgtgtccctcttcaaccgctttgactgcttcgtcgtgtgtggcggcatcctggagaccatcctggtggagaccaagatcatgtccccactgggcatctccgtgctcagatgcgtccggctgctgaggattttcaagatcacgaggtactggaactccttgagcaacctggtggcatccttgctgaactctgtgcgctccatcgcctccctgctccttctcctcttcctcttcatcatcatcttctccctcctggggatgcagctctttggaggaaagttcaactttgatgagatgcagacccggaggagcacattcgataacttcccccagtccctcctcactgtgtttcagatcctgaccggggaggactggaattcggtgatgtatgatgggatcatggcttatggcggcccctcttttccagggatgttagtctgtatttacttcatcatcctcttcatctgtggaaactatatcctactgaatgtgttcttggccattgctgtggacaacctggctgatgctgagagcctcacatctgcccaaaaggaggaggaagaggagaaggagagaaagaagctggccaggactgccagcccagagaagaaacaagagttggtggagaagccggcagtgggggaatccaaggaggagaagattgagctgaaatccatcacggctgacggagagtctccacccgccaccaagatcaacatggatgacctccagcccaatgaaaatgaggataagagcccctaccccaacccagaaactacaggagaagaggatgaggaggagccagagatgcctgtcggccctcgcccacgaccactctctgagcttcaccttaaggaaaaggcagtgcccatgccagaagccagcgcgtttttcatcttcagctctaacaacaggtttcgcctccagtgccaccgcattgtcaatgacacgatcttcaccaacctgatcctcttcttcattctgctcagcagcatttccctggctgctgaggacccggtccagcacacctccttcaggaaccatatcctaggcaatgcagactatgtcttcactagtatctttacattagaaattatccttaagatgactgcttatggggctttcttgcacaagggttctttctgccggaactacttcaacatcctggacctgctggtggtcagcgtgtccctcatctcctttggcatccagtccagtgcaatcaatgtcgtgaagatcttgcgagtcctgcgagtactcaggcccctgagggccatcaacagggccaaggggctaaagcatgtggttcagtgtgtgtttgtcgccatccggaccatcgggaacatcgtgattgtcaccaccctgctgcagttcatgtttgcctgcatcggggtccagctcttcaagggaaagctgtacacctgttcagacagttccaagcagacagaggcggaatgcaagggcaactacatcacgtacaaagacggggaggttgaccaccccatcatccaaccccgcagctgggagaacagcaagtttgactttgacaatgttctggcagccatgatggccctcttcaccgtctccaccttcgaagggtggccagagctgctgtaccgctccatcgactcccacacggaagacaagggccccatctacaactaccgtgtggagatctccatcttcttcatcatctacatcatcatcatcgccttcttcatgatgaacatcttcgtgggcttcgtcatcgtcacctttcaggagcagggggagcaggagtacaagaactgtgagctggacaagaaccagcgacagtgcgtggaatacgccctcaaggcccggcccctgcggaggtacatccccaagaaccagcaccagtacaaagtgtggtacgtggtcaactccacctacttcgagtacctgatgttcgtcctcatcctgctcaacaccatctgcctggccatgcagcactacggccagagctgcctgttcaaaatcgccatgaacatcctcaacatgctcttcactggcctcttcaccgtggagatgatcctgaagctcattgccttcaaacccaagggttactttagtgatccctggaatgtttttgacttcctcatcgtaattggcagcataattgacgtcattctcagtgagactaatccagctgaacatacccaatgctctccctctatgaacgcagaggaaaactcccgcatctccatcaccttcttccgcctgttccgggtcatgcgtctggtgaagctgctgagccgtggggagggcatccggacgctgctgtggaccttcatcaagtccttccaggccctgccctatgtggccctcctgatcgtgatgctgttcttcatctacgcggtgatcgggatgcaggtgtttgggaaaattgccctgaatgataccacagagatcaaccggaacaacaactttcagaccttcccccaggccgtgctgctcctcttcaggtgtgccaccggggaggcctggcaggacatcatgctggcctgcatgccaggcaagaagtgtgccccagagtccgagcccagcaacagcacggagggtgaaacaccctgtggtagcagctttgctgtcttctacttcatcagcttctacatgctctgtgccttcctgatcatcaacctctttgtagctgtcatcatggacaactttgactacctgacaagggactggtccatccttggtccccaccacctggatgagtttaaaagaatctgggcagagtatgaccctgaagccaagggtcgtatcaaacacctggatgtggtgaccctcctccggcggattcagccgccactaggttttgggaagctgtgccctcaccgcgtggcttgcaaacgcctggtctccatgaacatgcctctgaacagcgacgggacagtcatgttcaatgccaccctgtttgccctggtcaggacggccctgaggatcaaaacagaagggaacctagaacaagccaatgaggagctgcgggcgatcatcaagaagatctggaagcggaccagcatgaagctgctggaccaggtggtgccccctgcaggtgatgatgaggtcaccgttggcaagttctacgccacgttcctgatccaggagtacttccggaagttcaagaagcgcaaagagcagggccttgtgggcaagccctcccagaggaacgcgctgtctctgcaggctggcttgcgcacactgcatgacatcgggcctgagatccgacgggccatctctggagatctcaccgctgaggaggagctggacaaggccatgaaggaggctgtgtccgctgcttctgaagatgacatcttcaggagggccggtggcctgttcggcaaccacgtcagctactaccaaagcgacggccggagcgccttcccccagaccttcaccactcagcgcccgctgcacatcaacaaggcgggcagcagccagggcgacactgagtcgccatcccacgagaagctggtggactccaccttcaccccgagcagctactcgtccaccggctccaacgccaacatcaacaacgccaacaacaccgccctgggtcgcctccctcgccccgccggctaccccagcacggtcagcactgtggagggccacgggccccccttgtcccctgccatccgggtgcaggaggtggcgtggaagctcagctccaacaggtgccactcccgggagagccaggcagccatggcgggtcaggaggagacgtctcaggatgagacctatgaagtgaagatgaaccatgacacggaggcctgcagtgagcccagcctgctctccacagagatgctctcctaccaggatgacgaaaatcggcaactgacgctcccagaggaggacaagagggacatccggcaatctccgaagaggggtttcctccgctctgcctcactaggtcgaagggcctccttccacctggaatgtctgaagcgacagaaggaccgagggggagacatctctcagaagacagtcctgcccttgcatctggttcatcatcaggcattggcagtggcaggcctgagccccctcctccagagaagccattcccctgcctcattccctaggccttttgccaccccaccagccacacctggcagccgaggctggcccccacagcccgtccccaccctgcggcttgagggggtcgagtccagtgagaaactcaacagcagcttcccatccatccactgcggctcctgggctgagaccacccccggtggcgggggcagcagcgccgcccggagagtccggcccgtctccctcatggtgcccagccaggctggggccccagggaggcagttccacggcagtgccagcagcctggtggaagcggtcttgatttcagaaggactggggcagtttgctcaagatcccaagttcatcgaggtcaccacccaggagctggccgacgcctgcgacatgaccatagaggagatggagagcgcggccgacaacatcctcagcgggggcgccccacagagccccaatggcgccctcttaccctttgtgaactgcagggacgcggggcaggaccgagccgggggcgaagaggacgcgggctgtgtgcgcgcgcggggtcgaccgagtgaggaggagctccaggacagcagggtctacgtcagcagcctgtagtgggcgctgccagatgcgggcttttttttatttgtttcaatgttcctaatgggttcgtttcagaagtgcctcactgttctcgtgacctggagtt

SEQ ID NO: 113185 - DNA, 6529 bp, Homo sapiens
  Payload ID: 2138
  Gene Symbol: CACNA1C
  Gene Name: calcium channel, voltage-dependent, L type, alpha 1C subunit
  Uniprot ID: Q13936
  ENST ID: ENST00000399649
  CDS Start-End: 1-6435
atggtcaatgagaatacgaggatgtacattccagaggaaaaccaccaaggttccaactatgggagcccacgccccgcccatgccaacatgaatgccaatgcggcagcggggctggcccctgagcacatccccaccccgggggctgccctgtcgtggcaggcggccatcgacgcagcccggcaggctaagctgatgggcagcgctggcaatgcgaccatctccacagtcagctccacgcagcggaagcggcagcaatatgggaaacccaagaagcagggcagcaccacggccacacgcccgccccgagccctgctctgcctgaccctgaagaaccccatccggagggcctgcatcagcattgtcgaatggaaaccatttgaaataattattttactgactatttttgccaattgtgtggccttagcgatctatattccctttccagaagatgattccaacgccaccaattccaacctggaacgagtggaatatctctttctcataatttttacggtggaagcgtttttaaaagtaatcgcctatggactcctctttcaccccaatgcctacctccgcaacggctggaacctactagattttataattgtggttgtggggctttttagtgcaattttagaacaagcaaccaaagcagatggggcaaacgctctcggagggaaaggggccggatttgatgtgaaggcgctgagggccttccgcgtgctgcgccccctgcggctggtgtccggagtcccaagtctccaggtggtcctgaattccatcatcaaggccatggtccccctgctgcacatcgccctgcttgtgctgtttgtcatcatcatctacgccatcatcggcttggagctcttcatggggaagatgcacaagacctgctacaaccaggagggcatagcagatgttccagcagaagatgacccttccccttgtgcgctggaaacgggccacgggcggcagtgccagaacggcacggtgtgcaagcccggctgggatggtcccaagcacggcatcaccaactttgacaactttgccttcgccatgctcacggtgttccagtgcatcaccatggagggctggacggacgtgctgtactgggtcaatgatgccgtaggaagggactggccctggatctattttgttacactaatcatcatagggtcattttttgtacttaacttggttctcggtgtgcttagcggagagttttccaaagagagggagaaggccaaggcccggggagatttccagaagctgcgggagaagcagcagctagaagaggatctcaaaggctacctggattggatcactcaggccgaagacatcgatcctgagaatgaggacgaaggcatggatgaggagaagccccgaaacatgagcatgcccaccagtgagaccgagtccgtcaacaccgaaaacgtggctggaggtgacatcgagggagaaaactgcggggccaggctggcccaccggatctccaagtcaaagttcagccgctactggcgccggtggaatcggttctgcagaaggaagtgccgcgccgcagtcaagtctaatgtcttctactggctggtgattttcctggtgttcctcaacacgctcaccattgcctctgagcactacaaccagcccaactggctcacagaagtccaagacacggcaaacaaggccctgctggccctgttcacggcagagatgctcctgaagatgtacagcctgggcctgcaggcctacttcgtgtccctcttcaaccgctttgactgcttcgtcgtgtgtggcggcatcctggagaccatcctggtggagaccaagatcatgtccccactgggcatctccgtgctcagatgcgtccggctgctgaggattttcaagatcacgaggtactggaactccttgagcaacctggtggcatccttgctgaactctgtgcgctccatcgcctccctgctccttctcctcttcctcttcatcatcatcttctccctcctggggatgcagctctttggaggaaagttcaactttgatgagatgcagacccggaggagcacattcgataacttcccccagtccctcctcactgtgtttcagatcctgaccggggaggactggaattcggtgatgtatgatgggatcatggcttatggcggcccctcttttccagggatgttagtctgtatttacttcatcatcctcttcatctgtggaaactatatcctactgaatgtgttcttggccattgctgtggacaacctggctgatgctgagagcctcacatctgcccaaaaggaggaggaagaggagaaggagagaaagaagctggccaggactgccagcccagagaagaaacaagagttggtggagaagccggcagtgggggaatccaaggaggagaagattgagctgaaatccatcacggctgacggagagtctccacccgccaccaagatcaacatggatgacctccagcccaatgaaaatgaggataagagcccctaccccaacccagaaactacaggagaagaggatgaggaggagccagagatgcctgtcggccctcgcccacgaccactctctgagcttcaccttaaggaaaaggcagtgcccatgccagaagccagcgcgtttttcatcttcagctctaacaacaggtttcgcctccagtgccaccgcattgtcaatgacacgatcttcaccaacctgatcctcttcttcattctgctcagcagcatttccctggctgctgaggacccggtccagcacacctccttcaggaaccatattctgttttattttgatattgtttttaccaccattttcaccattgaaattgctctgaagatgactgcttatggggctttcttgcacaagggttctttctgccggaactacttcaacatcctggacctgctggtggtcagcgtgtccctcatctcctttggcatccagtccagtgcaatcaatgtcgtgaagatcttgcgagtcctgcgagtactcaggcccctgagggccatcaacagggccaaggggctaaagcatgtggttcagtgtgtgtttgtcgccatccggaccatcgggaacatcgtgattgtcaccaccctgctgcagttcatgtttgcctgcatcggggtccagctcttcaagggaaagctgtacacctgttcagacagttccaagcagacagaggcggaatgcaagggcaactacatcacgtacaaagacggggaggttgaccaccccatcatccaaccccgcagctgggagaacagcaagtttgactttgacaatgttctggcagccatgatggccctcttcaccgtctccaccttcgaagggtggccagagctgctgtaccgctccatcgactcccacacggaagacaagggccccatctacaactaccgtgtggagatctccatcttcttcatcatctacatcatcatcatcgccttcttcatgatgaacatcttcgtgggcttcgtcatcgtcacctttcaggagcagggggagcaggagtacaagaactgtgagctggacaagaaccagcgacagtgcgtggaatacgccctcaaggcccggcccctgcggaggtacatccccaagaaccagcaccagtacaaagtgtggtacgtggtcaactccacctacttcgagtacctgatgttcgtcctcatcctgctcaacaccatctgcctggccatgcagcactacggccagagctgcctgttcaaaatcgccatgaacatcctcaacatgctcttcactggcctcttcaccgtggagatgatcctgaagctcattgccttcaaacccaagcactatttctgtgatgcatggaatacatttgacgccttgattgttgtgggtagcattgttgatatagcaatcaccgagaacgcagaggaaaactcccgcatctccatcaccttcttccgcctgttccgggtcatgcgtctggtgaagctgctgagccgtggggagggcatccggacgctgctgtggaccttcatcaagtccttccaggccctgccctatgtggccctcctgatcgtgatgctgttcttcatctacgcggtgatcgggatgcaggtgtttgggaaaattgccctgaatgataccacagagatcaaccggaacaacaactttcagaccttcccccaggccgtgctgctcctcttcaggtgtgccaccggggaggcctggcaggacatcatgctggcctgcatgccaggcaagaagtgtgccccagagtccgagcccagcaacagcacggagggtgaaacaccctgtggtagcagctttgctgtcttctacttcatcagcttctacatgctctgtgccttcctgatcatcaacctctttgtagctgtcatcatggacaactttgactacctgacaagggactggtccatccttggtccccaccacctggatgagtttaaaagaatctgggcagagtatgaccctgaagccaagggtcgtatcaaacacctggatgtggtgaccctcctccggcggattcagccgccactaggttttgggaagctgtgccctcaccgcgtggcttgcaaacgcctggtctccatgaacatgcctctgaacagcgacgggacagtcatgttcaatgccaccctgtttgccctggtcaggacggccctgaggatcaaaacagaagagggacccagcccatcagaggcccaccaaggggctgaggatcctttccgccctgcagggaacctagaacaagccaatgaggagctgcgggcgatcatcaagaagatctggaagcggaccagcatgaagctgctggaccaggtggtgccccctgcaggtgatgatgaggtcaccgttggcaagttctacgccacgttcctgatccaggagtacttccggaagttcaagaagcgcaaagagcagggccttgtgggcaagccctcccagaggaacgcgctgtctctgcaggctggcttgcgcacactgcatgacatcgggcctgagatccgacgggccatctctggagatctcaccgctgaggaggagctggacaaggccatgaaggaggctgtgtccgctgcttctgaagatgacatcttcaggagggccggtggcctgttcggcaaccacgtcagctactaccaaagcgacggccggagcgccttcccccagaccttcaccactcagcgcccgctgcacatcaacaaggcgggcagcagccagggcgacactgagtcgccatcccacgagaagctggtggactccaccttcaccccgagcagctactcgtccaccggctccaacgccaacatcaacaacgccaacaacaccgccctgggtcgcctccctcgccccgccggctaccccagcacggtcagcactgtggagggccacgggccccccttgtcccctgccatccgggtgcaggaggtggcgtggaagctcagctccaacaggtgccactcccgggagagccaggcagccatggcgggtcaggaggagacgtctcaggatgagacctatgaagtgaagatgaaccatgacacggaggcctgcagtgagcccagcctgctctccacagagatgctctcctaccaggatgacgaaaatcggcaactgacgctcccagaggaggacaagagggacatccggcaatctccgaagaggggtttcctccgctctgcctcactaggtcgaagggcctccttccacctggaatgtctgaagcgacagaaggaccgagggggagacatctctcagaagacagtcctgcccttgcatctggttcatcatcaggcattggcagtggcaggcctgagccccctcctccagagaagccattcccctgcctcattccctaggccttttgccaccccaccagccacacctggcagccgaggctggcccccacagcccgtccccaccctgcggcttgagggggtcgagtccagtgagaaactcaacagcagcttcccatccatccactgcggctcctgggctgagaccacccccggtggcgggggcagcagcgccgcccggagagtccggcccgtctccctcatggtgcccagccaggctggggccccagggaggcagttccacggcagtgccagcagcctggtggaagcggtcttgatttcagaaggactggggcagtttgctcaagatcccaagttcatcgaggtcaccacccaggagctggccgacgcctgcgacatgaccatagaggagatggagagcgcggccgacaacatcctcagcgggggcgccccacagagccccaatggcgccctcttaccctttgtgaactgcagggacgcggggcaggaccgagccgggggcgaagaggacgcgggctgtgtgcgcgcgcggggtcgaccgagtgaggaggagctccaggacagcagggtctacgtcagcagcctgtagtgggcgctgccagatgcgggcttttttttatttgtttcaatgttcctaatgggttcgtttcagaagtgcctcactgttctcgtgacctggagtt

SEQ ID NO: 113186 - DNA, 13433 bp, Homo sapiens
  Payload ID: 2138
  Gene Symbol: CACNA1C
  Gene Name: calcium channel, voltage-dependent, L type, alpha 1C subunit
  Uniprot ID: Q13936
  ENST ID: ENST00000399655
  CDS Start-End: 266-6682
ggaaggggcccggatgtactgaggatgcgttacagtttcactcgaggaggcagtagtggaaaggagcagtttttggggtttgatgccataatgggaatcaggtaatcgtcggcggggaagaagaaacgctgcagaccacggcttcctcgaatcttgcgcgaaagccgccggcctcggaggagggattaatccagacccgccggggggtgttttcacatttcttcctcttcgtggctgctcctcctattaaaaccatttttggtccatggtcaatgagaatacgaggatgtacattccagaggaaaaccaccaaggttccaactatgggagcccacgccccgcccatgccaacatgaatgccaatgcggcagcggggctggcccctgagcacatccccaccccgggggctgccctgtcgtggcaggcggccatcgacgcagcccggcaggctaagctgatgggcagcgctggcaatgcgaccatctccacagtcagctccacgcagcggaagcggcagcaatatgggaaacccaagaagcagggcagcaccacggccacacgcccgccccgagccctgctctgcctgaccctgaagaaccccatccggagggcctgcatcagcattgtcgaatggaaaccatttgaaataattattttactgactatttttgccaattgtgtggccttagcgatctatattccctttccagaagatgattccaacgccaccaattccaacctggaacgagtggaatatctctttctcataatttttacggtggaagcgtttttaaaagtaatcgcctatggactcctctttcaccccaatgcctacctccgcaacggctggaacctactagattttataattgtggttgtggggctttttagtgcaattttagaacaagcaaccaaagcagatggggcaaacgctctcggagggaaaggggccggatttgatgtgaaggcgctgagggccttccgcgtgctgcgccccctgcggctggtgtccggagtcccaagtctccaggtggtcctgaattccatcatcaaggccatggtccccctgctgcacatcgccctgcttgtgctgtttgtcatcatcatctacgccatcatcggcttggagctcttcatggggaagatgcacaagacctgctacaaccaggagggcatagcagatgttccagcagaagatgacccttccccttgtgcgctggaaacgggccacgggcggcagtgccagaacggcacggtgtgcaagcccggctgggatggtcccaagcacggcatcaccaactttgacaactttgccttcgccatgctcacggtgttccagtgcatcaccatggagggctggacggacgtgctgtactgggtcaatgatgccgtaggaagggactggccctggatctattttgttacactaatcatcatagggtcattttttgtacttaacttggttctcggtgtgcttagcggagagttttccaaagagagggagaaggccaaggcccggggagatttccagaagctgcgggagaagcagcagctagaagaggatctcaaaggctacctggattggatcactcaggccgaagacatcgatcctgagaatgaggacgaaggcatggatgaggagaagccccgaaacatgagcatgcccaccagtgagaccgagtccgtcaacaccgaaaacgtggctggaggtgacatcgagggagaaaactgcggggccaggctggcccaccggatctccaagtcaaagttcagccgctactggcgccggtggaatcggttctgcagaaggaagtgccgcgccgcagtcaagtctaatgtcttctactggctggtgattttcctggtgttcctcaacacgctcaccattgcctctgagcactacaaccagcccaactggctcacagaagtccaagacacggcaaacaaggccctgctggccctgttcacggcagagatgctcctgaagatgtacagcctgggcctgcaggcctacttcgtgtccctcttcaaccgctttgactgcttcgtcgtgtgtggcggcatcctggagaccatcctggtggagaccaagatcatgtccccactgggcatctccgtgctcagatgcgtccggctgctgaggattttcaagatcacgaggtactggaactccttgagcaacctggtggcatccttgctgaactctgtgcgctccatcgcctccctgctccttctcctcttcctcttcatcatcatcttctccctcctggggatgcagctctttggaggaaagttcaactttgatgagatgcagacccggaggagcacattcgataacttcccccagtccctcctcactgtgtttcagatcctgaccggggaggactggaattcggtgatgtatgatgggatcatggcttatggcggcccctcttttccagggatgttagtctgtatttacttcatcatcctcttcatctgtggaaactatatcctactgaatgtgttcttggccattgctgtggacaacctggctgatgctgagagcctcacatctgcccaaaaggaggaggaagaggagaaggagagaaagaagctggccaggactgccagcccagagaagaaacaagagttggtggagaagccggcagtgggggaatccaaggaggagaagattgagctgaaatccatcacggctgacggagagtctccacccgccaccaagatcaacatggatgacctccagcccaatgaaaatgaggataagagcccctaccccaacccagaaactacaggagaagaggatgaggaggagccagagatgcctgtcggccctcgcccacgaccactctctgagcttcaccttaaggaaaaggcagtgcccatgccagaagccagcgcgtttttcatcttcagctctaacaacaggtttcgcctccagtgccaccgcattgtcaatgacacgatcttcaccaacctgatcctcttcttcattctgctcagcagcatttccctggctgctgaggacccggtccagcacacctccttcaggaaccatattctgttttattttgatattgtttttaccaccattttcaccattgaaattgctctgaagatgactgcttatggggctttcttgcacaagggttctttctgccggaactacttcaacatcctggacctgctggtggtcagcgtgtccctcatctcctttggcatccagtccagtgcaatcaatgtcgtgaagatcttgcgagtcctgcgagtactcaggcccctgagggccatcaacagggccaaggggctaaagcatgtggttcagtgtgtgtttgtcgccatccggaccatcgggaacatcgtgattgtcaccaccctgctgcagttcatgtttgcctgcatcggggtccagctcttcaagggaaagctgtacacctgttcagacagttccaagcagacagaggcggaatgcaagggcaactacatcacgtacaaagacggggaggttgaccaccccatcatccaaccccgcagctgggagaacagcaagtttgactttgacaatgttctggcagccatgatggccctcttcaccgtctccaccttcgaagggtggccagagctgctgtaccgctccatcgactcccacacggaagacaagggccccatctacaactaccgtgtggagatctccatcttcttcatcatctacatcatcatcatcgccttcttcatgatgaacatcttcgtgggcttcgtcatcgtcacctttcaggagcagggggagcaggagtacaagaactgtgagctggacaagaaccagcgacagtgcgtggaatacgccctcaaggcccggcccctgcggaggtacatccccaagaaccagcaccagtacaaagtgtggtacgtggtcaactccacctacttcgagtacctgatgttcgtcctcatcctgctcaacaccatctgcctggccatgcagcactacggccagagctgcctgttcaaaatcgccatgaacatcctcaacatgctcttcactggcctcttcaccgtggagatgatcctgaagctcattgccttcaaacccaagcactatttctgtgatgcatggaatacatttgacgccttgattgttgtgggtagcattgttgatatagcaatcaccgaggtaaacccagctgaacatacccaatgctctccctctatgaacgcagaggaaaactcccgcatctccatcaccttcttccgcctgttccgggtcatgcgtctggtgaagctgctgagccgtggggagggcatccggacgctgctgtggaccttcatcaagtccttccaggccctgccctatgtggccctcctgatcgtgatgctgttcttcatctacgcggtgatcgggatgcaggtgtttgggaaaattgccctgaatgataccacagagatcaaccggaacaacaactttcagaccttcccccaggccgtgctgctcctcttcaggtgtgccaccggggaggcctggcaggacatcatgctggcctgcatgccaggcaagaagtgtgccccagagtccgagcccagcaacagcacggagggtgaaacaccctgtggtagcagctttgctgtcttctacttcatcagcttctacatgctctgtgccttcctgatcatcaacctctttgtagctgtcatcatggacaactttgactacctgacaagggactggtccatccttggtccccaccacctggatgagtttaaaagaatctgggcagagtatgaccctgaagccaagggtcgtatcaaacacctggatgtggtgaccctcctccggcggattcagccgccactaggttttgggaagctgtgccctcaccgcgtggcttgcaaacgcctggtctccatgaacatgcctctgaacagcgacgggacagtcatgttcaatgccaccctgtttgccctggtcaggacggccctgaggatcaaaacagaagggaacctagaacaagccaatgaggagctgcgggcgatcatcaagaagatctggaagcggaccagcatgaagctgctggaccaggtggtgccccctgcaggtgatgatgaggtcaccgttggcaagttctacgccacgttcctgatccaggagtacttccggaagttcaagaagcgcaaagagcagggccttgtgggcaagccctcccagaggaacgcgctgtctctgcaggctggcttgcgcacactgcatgacatcgggcctgagatccgacgggccatctctggagatctcaccgctgaggaggagctggacaaggccatgaaggaggctgtgtccgctgcttctgaagatgacatcttcaggagggccggtggcctgttcggcaaccacgtcagctactaccaaagcgacggccggagcgccttcccccagaccttcaccactcagcgcccgctgcacatcaacaaggcgggcagcagccagggcgacactgagtcgccatcccacgagaagctggtggactccaccttcaccccgagcagctactcgtccaccggctccaacgccaacatcaacaacgccaacaacaccgccctgggtcgcctccctcgccccgccggctaccccagcacggtcagcactgtggagggccacgggccccccttgtcccctgccatccgggtgcaggaggtggcgtggaagctcagctccaacaggtgccactcccgggagagccaggcagccatggcgggtcaggaggagacgtctcaggatgagacctatgaagtgaagatgaaccatgacacggaggcctgcagtgagcccagcctgctctccacagagatgctctcctaccaggatgacgaaaatcggcaactgacgctcccagaggaggacaagagggacatccggcaatctccgaagaggggtttcctccgctctgcctcactaggtcgaagggcctccttccacctggaatgtctgaagcgacagaaggaccgagggggagacatctctcagaagacagtcctgcccttgcatctggttcatcatcaggcattggcagtggcaggcctgagccccctcctccagagaagccattcccctgcctcattccctaggccttttgccaccccaccagccacacctggcagccgaggctggcccccacagcccgtccccaccctgcggcttgagggggtcgagtccagtgagaaactcaacagcagcttcccatccatccactgcggctcctgggctgagaccacccccggtggcgggggcagcagcgccgcccggagagtccggcccgtctccctcatggtgcccagccaggctggggccccagggaggcagttccacggcagtgccagcagcctggtggaagcggtcttgatttcagaaggactggggcagtttgctcaagatcccaagttcatcgaggtcaccacccaggagctggccgacgcctgcgacatgaccatagaggagatggagagcgcggccgacaacatcctcagcgggggcgccccacagagccccaatggcgccctcttaccctttgtgaactgcagggacgcggggcaggaccgagccgggggcgaagaggacgcgggctgtgtgcgcgcgcggggtcgaccgagtgaggaggagctccaggacagcagggtctacgtcagcagcctgtagtgggcgctgccagatgcgggcttttttttatttgtttcaatgttcctaatgggttcgtttcagaagtgcctcactgttctcgtgacctggagttaaccggaacagcgtcttcattcatttctgttgggaccagacgcggagcctgggtgcgcgagccgccctccgggaggaaggcgcccggctgcgtctgcagaggcggggagaggaggcggcgagggtcccggggcgcgaggaaggcgcctgccctctcccagctcgcaggccccgggcccggccgcgcctccgcggggagagcaccccggcttcccgcgcgccctcaccaaaaggaccctacagcaaacgggtgtctttcgactctgcttgtagaaaccatttgcacatattctgtacgagcctcgctgtctccctagagccagggccctgcggatttggagaagggagcggggcaggacttccaggaggaccccaacccggcccggagagggaggaggaggcctccaggggcgcggagctctggggatgggcgtcgggccggcagtggtgcggctcactccgtccctgcccacctgcgacgggatcccccgaccggcacgggccacgccgagctcccggccagccgccggcccgcaggcagcgcgagggaggagctgcgccgccggctccgcccaaccaggtggtgctgagcttccgctgagcgctcttttgttttgtggtttgacacttttcttgacagcatgttgcagtttcttttcggttttggttttttttaaatgttttattttgctttcccagcgggaggggaggaagaagagtgtttacaaagtcctgtagccccctcacctttctgttttcacttttgccaatgtacatcgggtttggttttcttgtattatttaaacggttgtggtttcctttttccacggaggttcaatagaagccgctgcaggagagttttaccaaccattgtgtatgcccaataatttgttatcatttccttaggtagtaacctatttttgttctggtttggttcggttatctaatggaaaggtaactggcaatgcacttgatgtggtcttgcacatgtgggtgatagagttgggttcctttttatgctgggtgtacaggtgggtttgggagagaggagcatgcgcgagagagtctccgagtgtgtgcgacgcgtgtgtgtgtggtgggttgtctgtgtgcatatgtcctgcccgtgtatatgcacccacaccatgtgcccgtgcacaccagtgactacgcagtcccccctttctggtttagctgtgggaagatctgaatctggggccgtttgaaagcaaaaacaaaccactgtctctgcttctgaaacgggaatcagtaactctttgcattttctgtcccacaagatatgcaaaaacaatgcaataatattcatttaaaaatacaattgtgagttgtgttggcattaaaactgtattttaaaaaaagacagaaatttaagggaaaaacacaagaaggcattttgcttcaatatattccgtgtaatgttttattgcattgataatgtttctgttgaagaaaccgttatacttgaattcaggtcagtttcagtatttttcaaatatttttttaaaactgaattgcaattgtgccaagcgaatataatgaattgaattaagttggttttcggattcacttcttgtatattttgctgcatgtaaagtaaatcattttgtatttggagtgtgacaagctttacctttgaactcaagtgcttttctatatgtggttgggggaaagggaacaagttttctttagtttgcacaatgagcaaaggtatcaccagtgtagtcattattctgctctccacaaacaggtttggacattactgttttgcatatcttgtgtttgcttacatttccctcaatttttccaaaatcgtttgctgggtatgtttgtaccgcctcttgctgtgagagaccaggacctattttattccagtcttcactctgtccactctgctctggtcatctgatttggtacttctccaagaacagcccttcactgtgaggtgcagggaggcgttctgatgagccctcagtcactgggccgtcatccgcatcccccatggaagaggtagctggctttcccttcccttccaccacacggaattttctctttggcttccttaggaaagtgtacactaaccgggaggataaaattaaagtcaggctgcttggagggaggggcatcctcacttccggattcttgttgctctacccaacaaggacagcaggggctcgagaaaggaactggtgaaaccctgatccatctgaaagtcaactctgcgtgctcctttctccatcccttcctcactctggagcagcctttccttcaggcttgccctaatgtttgggctgccggggagggggccaggacaagggaagaggcatccggagctcacagtgggggtgggaacagatttttgtgggggcatctctaatgctcacttatatctccctagaacatcactcttttggtgctgtgtccttcaaatgtatgtcaacagtggtggctgaaaagggactgctttggggaaaacaggacccaaccattcacccagaattgacccattaaatctcttccagtcctagtgttccctgagcccctcttggcacatatataagtaagctagaaattacaataagggacagtccattcctctatgacagcttgctggactgattcatgacaaagtggagaaatgtactcaatactccccggttaacacagtctagaaacagagtttctttatggatatccacacccaagtcatccaaactttcttgattccttttcactgccatcaaggtcctctagaaattgagtttaggtatcatcctttgaaaagttcccaagatttctaccaggaggtacacacaggcgttccctgtctagggcaggaggactatcctagcttgaccttctgatccactagaataagactggcgtatgatgcctgtcatcagaacagactggcacaagtagtgacatcaatgaaccacagcacaatcttccaagtgatgtctactctccacctaaaatggaattttccccatgaccttgtaaaacataattgtcacatcttccatacccctcctgacagcccccaagtgtcaggagaaaacagtcaggggctaagggcccaagggacttgaagaaacaacagtttaaggtctgcagtttggtcaacttaattcttgtcctccgaccagccctgcctctttcatttccagaccttggagaatttttcccagctttgattcagaaggtactagttataacccctttccttcttcttaatccaataggcctcactctcactgggaaatccactcaaaggaacaaggcaatgtctctcattctatttcccagttccaaattccaggtgcttgtctggagtgaagctacccgttactttctcccagcttttctccacccagcatgtctcctgcccatgcagctgaagacagtggggcaacctcaggagaagcagacctttccatgcccaagttcatctcctgagcaacagtgacacctagaaaatgaggactttggaagtcacccaaaagatggtggctactttatggagtcctgaagatacacagccaccactcctaaaggcaaagaaagaaaacacgaatgtaggtcagggatagagtggaaccctggtcatcggggtttttagcctcatcgtgggaaaggtggtaaaggaggatgatggcatctccatccctagaggccaagaattgaaatatcattgtcaaggattagaaacaattcagcaaagaggccacaaaaagggcctgctgactcccagaagacctctttaaaccccaggggaggcaaatacttgctgatggagtctgggccgtttccatattttaaagaagacctgcctctggggcaaatgtcagcacagagaggactgggaggagaatggaggcaagaaaagggcatattttgactccctctgtgcctcttcccagttcatggaaggatgtgttcagcttacccacccacagtgaccagtgtggtggagccgctgacatctcaaggatctatttgggaaggtgagaagagtactcattccatctgggggtgttgttccagccacatcagcctacctggtgggatgtgggggtgtctgccaccctgtcccccctctgctgatgtccctcccctcaggctgtccaggtgccacctgacacaggctgctgtgcaaagacaggcggggaagcccaaacctcactcccagggaggccctcagccgccagagtccaggttctccagaggctacgatttgaggaggttgagggggaagacaggagggaaagaaaagtcctacaactgtcaggaatggggcacctttccctgtccctaagcaaagctccctcttcccactgccctccccagccccagctccctgtcctccccaacacctagtgagaaagacggtgcgtggaagggagtcccatgggcagatgcttacacgacctctttgtgaagcctcttctgggtttaacttcattcatcaatttattcttatgtcaaagcaatgaaacttttctttctggagccagataccaatacaacaggtgaacgggtttctgccacatctctacattgacgggggatgcttgaacaacccccctcactacacagacacacaccgttaaggcacaagggctggggttgagctctagatgagggactttcctgctcctgcaagggtgagcactgtatacacagacaaggagggtgcagtagagtgactcccttggatggaagtagtaccatcagaacctactattattatgacataaattctatttacatacattgagagaatactacaatcaacactttttcctgggatgactttaagaggtttgagccacagcacctgaagtggcaaagatccatggtctttgtagggtattagagaactcttccagtcacctctgaaagcactctagatcttgcagctgagtggatgaagtgtaacaaatctgttgcacgctgagaggagtcagaattagcatttttcatgaaagttccccacgtctctactaagaatgaggaagaaaagactaagactaggtaattacacagaggcttgaaatgttacatcaccagagccaagtcctctcccttcagatcagttactggctgctacacagggacacccccaccttttcagggcatcccatgcactccacttctcaggatctaaggaatttgactttgtagggatcccagaaagggcactgtgccacttcccctggtgtgaatcagacatacattgtacattcatttctaaaattcactcatgcacctcaaaccaaggtcattatccaaaaaaaaaaaaaaaaagctctgggtggaagagtttgtaagttttaagagagggtcatttctatgtgaggaaatgcagaaatggacagaatgattcttattcactgtttgggtctggagaattcccattgtggaaatcttagagatctcaagtttattaccaagggaataaggaaaaaaaggtgagcaggcaccaggccaagcagtggctcccttgccaaggaacctgaggctgcaggtttcagggacccccttgaagaaacctctcctggccattggccaggagaaaagagaagtctctcctgtagagtcacaagagaagcaaaagagggtgggtcactgggtcctggacatagcccccaaccccaagacttcccaatatggagaaactacaccaatgtttaaaaggggaaaaggaaagaacttgtacatcaagggaagatgatttgtaaacacacagtcctgtgcagaaagatccccttcaggaggtgtctccagcatcccaaagctgtgcgcaccttctcttttcctgcctcaggccacctatgcatccagctgcagcccatacccacacctgaaatccatctcttgaatcccagccaggttatataccaccccattgccatgtcctgtcctggccagaatgcatgctgttcccccaagcctcgtgggagtgaggccatgggaaacagagatgagcatgtctggacaagtctgtgatggtagtggatgagaataacccatggcaaaacacgcacattcattaagaaatagggcgacagattccccgttggtgaagcactgaaaggtctattactctcataatattgctgttttattttaatccaccagagctaccatgcaaaactttcctcctgtgaaacgctccagataaagctcctctaatctccccttccctcatgtcctccagctcaaacccaccttcatcccccaaaccaatctgtatcatgcctgttatcagagaggcacagaaagatgggcagtgcctccgttgtcaccattccccacacccctacacacccccacaccctcccctccaggctccacgacttcacagtcttactgttgtaaatatcattgtacagtttgtaatcctcaaataatcccattgtcagaggcctcgcctgatgggccttctcaccctcgagaaaggccagggaatctagaaggggcaacccttcaaggagagcttcagggtcatctctgtgtgagacactattgtatattcctgtaagattgcatttttatctaaggaatgatgttatttaaaaaacaaacaaaaaacacaaaaaataagaattgcaaataaatttcttaacaatgtcta

SEQ ID NO: 113187 - DNA, 6568 bp, Homo sapiens
  Payload ID: 2138
  Gene Symbol: CACNA1C
  Gene Name: calcium channel, voltage-dependent, L type, alpha 1C subunit
  Uniprot ID: Q13936
  ENST ID: ENST00000402845
  CDS Start-End: 1-6474
atggtcaatgagaatacgaggatgtacattccagaggaaaaccaccaaggttccaactatgggagcccacgccccgcccatgccaacatgaatgccaatgcggcagcggggctggcccctgagcacatccccaccccgggggctgccctgtcgtggcaggcggccatcgacgcagcccggcaggctaagctgatgggcagcgctggcaatgcgaccatctccacagtcagctccacgcagcggaagcggcagcaatatgggaaacccaagaagcagggcagcaccacggccacacgcccgccccgagccctgctctgcctgaccctgaagaaccccatccggagggcctgcatcagcattgtcgaatggaaaccatttgaaataattattttactgactatttttgccaattgtgtggccttagcgatctatattccctttccagaagatgattccaacgccaccaattccaacctggaacgagtggaatatctctttctcataatttttacggtggaagcgtttttaaaagtaatcgcctatggactcctctttcaccccaatgcctacctccgcaacggctggaacctactagattttataattgtggttgtggggctttttagtgcaattttagaacaagcaaccaaagcagatggggcaaacgctctcggagggaaaggggccggatttgatgtgaaggcgctgagggccttccgcgtgctgcgccccctgcggctggtgtccggagtcccaagtctccaggtggtcctgaattccatcatcaaggccatggtccccctgctgcacatcgccctgcttgtgctgtttgtcatcatcatctacgccatcatcggcttggagctcttcatggggaagatgcacaagacctgctacaaccaggagggcatagcagatgttccagcagaagatgacccttccccttgtgcgctggaaacgggccacgggcggcagtgccagaacggcacggtgtgcaagcccggctgggatggtcccaagcacggcatcaccaactttgacaactttgccttcgccatgctcacggtgttccagtgcatcaccatggagggctggacggacgtgctgtactgggtcaatgatgccgtaggaagggactggccctggatctattttgttacactaatcatcatagggtcattttttgtacttaacttggttctcggtgtgcttagcggagagttttccaaagagagggagaaggccaaggcccggggagatttccagaagctgcgggagaagcagcagctagaagaggatctcaaaggctacctggattggatcactcaggccgaagacatcgatcctgagaatgaggacgaaggcatggatgaggagaagccccgaaacatgagcatgcccaccagtgagaccgagtccgtcaacaccgaaaacgtggctggaggtgacatcgagggagaaaactgcggggccaggctggcccaccggatctccaagtcaaagttcagccgctactggcgccggtggaatcggttctgcagaaggaagtgccgcgccgcagtcaagtctaatgtcttctactggctggtgattttcctggtgttcctcaacacgctcaccattgcctctgagcactacaaccagcccaactggctcacagaagtccaagacacggcaaacaaggccctgctggccctgttcacggcagagatgctcctgaagatgtacagcctgggcctgcaggcctacttcgtgtccctcttcaaccgctttgactgcttcgtcgtgtgtggcggcatcctggagaccatcctggtggagaccaagatcatgtccccactgggcatctccgtgctcagatgcgtccggctgctgaggattttcaagatcacgaggtactggaactccttgagcaacctggtggcatccttgctgaactctgtgcgctccatcgcctccctgctccttctcctcttcctcttcatcatcatcttctccctcctggggatgcagctctttggaggaaagttcaactttgatgagatgcagacccggaggagcacattcgataacttcccccagtccctcctcactgtgtttcagatcctgaccggggaggactggaattcggtgatgtatgatgggatcatggcttatggcggcccctcttttccagggatgttagtctgtatttacttcatcatcctcttcatctgtggaaactatatcctactgaatgtgttcttggccattgctgtggacaacctggctgatgctgagagcctcacatctgcccaaaaggaggaggaagaggagaaggagagaaagaagctggccaggactgccagcccagagaagaaacaagagttggtggagaagccggcagtgggggaatccaaggaggagaagattgagctgaaatccatcacggctgacggagagtctccacccgccaccaagatcaacatggatgacctccagcccaatgaaaatgaggataagagcccctaccccaacccagaaactacaggagaagaggatgaggaggagccagagatgcctgtcggccctcgcccacgaccactctctgagcttcaccttaaggaaaaggcagtgcccatgccagaagccagcgcgtttttcatcttcagctctaacaacaggtttcgcctccagtgccaccgcattgtcaatgacacgatcttcaccaacctgatcctcttcttcattctgctcagcagcatttccctggctgctgaggacccggtccagcacacctccttcaggaaccatattctgttttattttgatattgtttttaccaccattttcaccattgaaattgctctgaagatgactgcttatggggctttcttgcacaagggttctttctgccggaactacttcaacatcctggacctgctggtggtcagcgtgtccctcatctcctttggcatccagtccagtgcaatcaatgtcgtgaagatcttgcgagtcctgcgagtactcaggcccctgagggccatcaacagggccaaggggctaaagcatgtggttcagtgtgtgtttgtcgccatccggaccatcgggaacatcgtgattgtcaccaccctgctgcagttcatgtttgcctgcatcggggtccagctcttcaagggaaagctgtacacctgttcagacagttccaagcagacagaggcggaatgcaagggcaactacatcacgtacaaagacggggaggttgaccaccccatcatccaaccccgcagctgggagaacagcaagtttgactttgacaatgttctggcagccatgatggccctcttcaccgtctccaccttcgaagggtggccagagctgctgtaccgctccatcgactcccacacggaagacaagggccccatctacaactaccgtgtggagatctccatcttcttcatcatctacatcatcatcatcgccttcttcatgatgaacatcttcgtgggcttcgtcatcgtcacctttcaggagcagggggagcaggagtacaagaactgtgagctggacaagaaccagcgacagtgcgtggaatacgccctcaaggcccggcccctgcggaggtacatccccaagaaccagcaccagtacaaagtgtggtacgtggtcaactccacctacttcgagtacctgatgttcgtcctcatcctgctcaacaccatctgcctggccatgcagcactacggccagagctgcctgttcaaaatcgccatgaacatcctcaacatgctcttcactggcctcttcaccgtggagatgatcctgaagctcattgccttcaaacccaagggttactttagtgatccctggaatgtttttgacttcctcatcgtaattggcagcataattgacgtcattctcagtgagactaatccagctgaacatacccaatgctctccctctatgaacgcagaggaaaactcccgcatctccatcaccttcttccgcctgttccgggtcatgcgtctggtgaagctgctgagccgtggggagggcatccggacgctgctgtggaccttcatcaagtccttccaggccctgccctatgtggccctcctgatcgtgatgctgttcttcatctacgcggtgatcgggatgcaggtgtttgggaaaattgccctgaatgataccacagagatcaaccggaacaacaactttcagaccttcccccaggccgtgctgctcctcttcaggtgtgccaccggggaggcctggcaggacatcatgctggcctgcatgccaggcaagaagtgtgccccagagtccgagcccagcaacagcacggagggtgaaacaccctgtggtagcagctttgctgtcttctacttcatcagcttctacatgctctgtgccttcctgatcatcaacctctttgtagctgtcatcatggacaactttgactacctgacaagggactggtccatccttggtccccaccacctggatgagtttaaaagaatctgggcagagtatgaccctgaagccaagggtcgtatcaaacacctggatgtggtgaccctcctccggcggattcagccgccactaggttttgggaagctgtgccctcaccgcgtggcttgcaaacgcctggtctccatgaacatgcctctgaacagcgacgggacagtcatgttcaatgccaccctgtttgccctggtcaggacggccctgaggatcaaaacagaagagggacccagcccatcagaggcccaccaaggggctgaggatcctttccgccctgcagggaacctagaacaagccaatgaggagctgcgggcgatcatcaagaagatctggaagcggaccagcatgaagctgctggaccaggtggtgccccctgcaggtgatgatgaggtcaccgttggcaagttctacgccacgttcctgatccaggagtacttccggaagttcaagaagcgcaaagagcagggccttgtgggcaagccctcccagaggaacgcgctgtctctgcaggctggcttgcgcacactgcatgacatcgggcctgagatccgacgggccatctctggagatctcaccgctgaggaggagctggacaaggccatgaaggaggctgtgtccgctgcttctgaagatgacatcttcaggagggccggtggcctgttcggcaaccacgtcagctactaccaaagcgacggccggagcgccttcccccagaccttcaccactcagcgcccgctgcacatcaacaaggcgggcagcagccagggcgacactgagtcgccatcccacgagaagctggtggactccaccttcaccccgagcagctactcgtccaccggctccaacgccaacatcaacaacgccaacaacaccgccctgggtcgcctccctcgccccgccggctaccccagcacggtcagcactgtggagggccacgggccccccttgtcccctgccatccgggtgcaggaggtggcgtggaagctcagctccaacaggtgccactcccgggagagccaggcagccatggcgggtcaggaggagacgtctcaggatgagacctatgaagtgaagatgaaccatgacacggaggcctgcagtgagcccagcctgctctccacagagatgctctcctaccaggatgacgaaaatcggcaactgacgctcccagaggaggacaagagggacatccggcaatctccgaagaggggtttcctccgctctgcctcactaggtcgaagggcctccttccacctggaatgtctgaagcgacagaaggaccgagggggagacatctctcagaagacagtcctgcccttgcatctggttcatcatcaggcattggcagtggcaggcctgagccccctcctccagagaagccattcccctgcctcattccctaggccttttgccaccccaccagccacacctggcagccgaggctggcccccacagcccgtccccaccctgcggcttgagggggtcgagtccagtgagaaactcaacagcagcttcccatccatccactgcggctcctgggctgagaccacccccggtggcgggggcagcagcgccgcccggagagtccggcccgtctccctcatggtgcccagccaggctggggccccagggaggcagttccacggcagtgccagcagcctggtggaagcggtcttgatttcagaaggactggggcagtttgctcaagatcccaagttcatcgaggtcaccacccaggagctggccgacgcctgcgacatgaccatagaggagatggagagcgcggccgacaacatcctcagcgggggcgccccacagagccccaatggcgccctcttaccctttgtgaactgcagggacgcggggcaggaccgagccgggggcgaagaggacgcgggctgtgtgcgcgcgcggggtcgaccgagtgaggaggagctccaggacagcagggtctacgtcagcagcctgtagtgggcgctgccagatgcgggcttttttttatttgtttcaatgttcctaatgggttcgtttcagaagtgcctcactgttctcgtgacctggagtt

SEQ ID NO: 113188 - DNA, 7590 bp, Homo sapiens
  Payload ID: 2138
  Gene Symbol: CACNA1C
  Gene Name: calcium channel, voltage-dependent, L type, alpha 1C subunit
  ENST ID: ENST00000406454
  CDS Start-End: 1-6630
atggtcaatgagaatacgaggatgtacattccagaggaaaaccaccaaggttccaactatgggagcccacgccccgcccatgccaacatgaatgccaatgcggcagcggggctggcccctgagcacatccccaccccgggggctgccctgtcgtggcaggcggccatcgacgcagcccggcaggctaagctgatgggcagcgctggcaatgcgaccatctccacagtcagctccacgcagcggaagcggcagcaatatgggaaacccaagaagcagggcagcaccacggccacacgcccgccccgagccctgctctgcctgaccctgaagaaccccatccggagggcctgcatcagcattgtcgaatggaaaccatttgaaataattattttactgactatttttgccaattgtgtggccttagcgatctatattccctttccagaagatgattccaacgccaccaattccaacctggaacgagtggaatatctctttctcataatttttacggtggaagcgtttttaaaagtaatcgcctatggactcctctttcaccccaatgcctacctccgcaacggctggaacctactagattttataattgtggttgtggggctttttagtgcaattttagaacaagcaaccaaagcagatggggcaaacgctctcggagggaaaggggccggatttgatgtgaaggcgctgagggccttccgcgtgctgcgccccctgcggctggtgtccggagtcccaagtctccaggtggtcctgaattccatcatcaaggccatggtccccctgctgcacatcgccctgcttgtgctgtttgtcatcatcatctacgccatcatcggcttggagctcttcatggggaagatgcacaagacctgctacaaccaggagggcatagcagatgttccagcagaagatgacccttccccttgtgcgctggaaacgggccacgggcggcagtgccagaacggcacggtgtgcaagcccggctgggatggtcccaagcacggcatcaccaactttgacaactttgccttcgccatgctcacggtgttccagtgcatcaccatggagggctggacggacgtgctgtactggatgcaggacgctatgggctatgagttaccctgggtgtattttgtcagtctggtcatctttggatcctttttcgttctaaatctggttctcggtgtgttgagcggagagttttccaaagagagggagaaggccaaggcccggggagatttccagaagctgcgggagaagcagcagctagaagaggatctcaaaggctacctggattggatcactcaggccgaagacatcgatcctgagaatgaggacgaaggcatggatgaggagaagccccgaaacatgagcatgcccaccagtgagaccgagtccgtcaacaccgaaaacgtggctggaggtgacatcgagggagaaaactgcggggccaggctggcccaccggatctccaagtcaaagttcagccgctactggcgccggtggaatcggttctgcagaaggaagtgccgcgccgcagtcaagtctaatgtcttctactggctggtgattttcctggtgttcctcaacacgctcaccattgcctctgagcactacaaccagcccaactggctcacagaagtccaagacacggcaaacaaggccctgctggccctgttcacggcagagatgctcctgaagatgtacagcctgggcctgcaggcctacttcgtgtccctcttcaaccgctttgactgcttcgtcgtgtgtggcggcatcctggagaccatcctggtggagaccaagatcatgtccccactgggcatctccgtgctcagatgcgtccggctgctgaggattttcaagatcacgaggtactggaactccttgagcaacctggtggcatccttgctgaactctgtgcgctccatcgcctccctgctccttctcctcttcctcttcatcatcatcttctccctcctggggatgcagctctttggaggaaagttcaactttgatgagatgcagacccggaggagcacattcgataacttcccccagtccctcctcactgtgtttcagatcctgaccggggaggactggaattcggtgatgtatgatgggatcatggcttatggcggcccctcttttccagggatgttagtctgtatttacttcatcatcctcttcatctgtggaaactatatcctactgaatgtgttcttggccattgctgtggacaacctggctgatgctgagagcctcacatctgcccaaaaggaggaggaagaggagaaggagagaaagaagctggccaggactgccagcccagagaagaaacaagagttggtggagaagccggcagtgggggaatccaaggaggagaagattgagctgaaatccatcacggctgacggagagtctccacccgccaccaagatcaacatggatgacctccagcccaatgaaaatgaggataagagcccctaccccaacccagaaactacaggagaagaggatgaggaggagccagagatgcctgtcggccctcgcccacgaccactctctgagcttcaccttaaggaaaaggcagtgcccatgccagaagccagcgcgtttttcatcttcagctctaacaacaggtttcgcctccagtgccaccgcattgtcaatgacacgatcttcaccaacctgatcctcttcttcattctgctcagcagcatttccctggctgctgaggacccggtccagcacacctccttcaggaaccatattctgttttattttgatattgtttttaccaccattttcaccattgaaattgctctgaagatgactgcttatggggctttcttgcacaagggttctttctgccggaactacttcaacatcctggacctgctggtggtcagcgtgtccctcatctcctttggcatccagtccagtgcaatcaatgtcgtgaagatcttgcgagtcctgcgagtactcaggcccctgagggccatcaacagggccaaggggctaaagcatgtggttcagtgtgtgtttgtcgccatccggaccatcgggaacatcgtgattgtcaccaccctgctgcagttcatgtttgcctgcatcggggtccagctcttcaagggaaagctgtacacctgttcagacagttccaagcagacagaggcggaatgcaagggcaactacatcacgtacaaagacggggaggttgaccaccccatcatccaaccccgcagctgggagaacagcaagtttgactttgacaatgttctggcagccatgatggccctcttcaccgtctccaccttcgaagggtggccagagctgctgtaccgctccatcgactcccacacggaagacaagggccccatctacaactaccgtgtggagatctccatcttcttcatcatctacatcatcatcatcgccttcttcatgatgaacatcttcgtgggcttcgtcatcgtcacctttcaggagcagggggagcaggagtacaagaactgtgagctggacaagaaccagcgacagtgcgtggaatacgccctcaaggcccggcccctgcggaggtacatccccaagaaccagcaccagtacaaagtgtggtacgtggtcaactccacctacttcgagtacctgatgttcgtcctcatcctgctcaacaccatctgcctggccatgcagcactacggccagagctgcctgttcaaaatcgccatgaacatcctcaacatgctcttcactggcctcttcaccgtggagatgatcctgaagctcattgccttcaaacccaagggttactttagtgatccctggaatgtttttgacttcctcatcgtaattggcagcataattgacgtcattctcagtgagactaatccagctgaacatacccaatgctctccctctatgaacgcagaggaaaactcccgcatctccatcaccttcttccgcctgttccgggtcatgcgtctggtgaagctgctgagccgtggggagggcatccggacgctgctgtggaccttcatcaagtccttccaggccctgccctatgtggccctcctgatcgtgatgctgttcttcatctacgcggtgatcgggatgcaggtgtttgggaaaattgccctgaatgataccacagagatcaaccggaacaacaactttcagaccttcccccaggccgtgctgctcctcttcaggtgtgccaccggggaggcctggcaggacatcatgctggcctgcatgccaggcaagaagtgtgccccagagtccgagcccagcaacagcacggagggtgaaacaccctgtggtagcagctttgctgtcttctacttcatcagcttctacatgctctgtgccttcctgatcatcaacctctttgtagctgtcatcatggacaactttgactacctgacaagggactggtccatccttggtccccaccacctggatgagtttaaaagaatctgggcagagtatgaccctgaagccaagggtcgtatcaaacacctggatgtggtgaccctcctccggcggattcagccgccactaggttttgggaagctgtgccctcaccgcgtggcttgcaaacgcctggtctccatgaacatgcctctgaacagcgacgggacagtcatgttcaatgccaccctgtttgccctggtcaggacggccctgaggatcaaaacagaagggaacctagaacaagccaatgaggagctgcgggcgatcatcaagaagatctggaagcggaccagcatgaagctgctggaccaggtggtgccccctgcaggtgatgatgaggtcaccgttggcaagttctacgccacgttcctgatccaggagtacttccggaagttcaagaagcgcaaagagcagggccttgtgggcaagccctcccagaggaacgcgctgtctctgcaggctggcttgcgcacactgcatgacatcgggcctgagatccgacgggccatctctggagatctcaccgctgaggaggagctggacaaggccatgaaggaggctgtgtccgctgcttctgaagatgacatcttcaggagggccggtggcctgttcggcaaccacgtcagctactaccaaagcgacggccggagcgccttcccccagaccttcaccactcagcgcccgctgcacatcaacaaggcgggcagcagccagggcgacactgagtcgccatcccacgagaagctggtggactccaccttcaccccgagcagctactcgtccaccggctccaacgccaacatcaacaacgccaacaacaccgccctgggtcgcctccctcgccccgccggctaccccagcacggtcagcactgtggagggccacgggccccccttgtcccctgccatccgggtgcaggaggtggcgtggaagctcagctccaacaggatgcactgctgtgacatgctggatggtgggaccttccctcccgccctgggcccccgcagggctcctccctgtctgcatcagcagctccagggttccctggcggggctgagagaggacacaccctgcatcgtgcctggccacgcttcactgtgctgctcttccagagtaggagagtggctcccagcaggctgcacagccccccagcatgccaggtgccactcccgggagagccaggcagccatggcgggtcaggaggagacgtctcaggatgagacctatgaagtgaagatgaaccatgacacggaggcctgcagtgagcccagcctgctctccacagagatgctctcctaccaggatgacgaaaatcggcaactgacgctcccagaggaggacaagagggacatccggcaatctccgaagaggggtttcctccgctctgcctcactaggtcgaagggcctccttccacctggaatgtctgaagcgacagaaggaccgagggggagacatctctcagaagacagtcctgcccttgcatctggttcatcatcaggcattggcagtggcaggcctgagccccctcctccagagaagccattcccctgcctcattccctaggccttttgccaccccaccagccacacctggcagccgaggctggcccccacagcccgtccccaccctgcggcttgagggggtcgagtccagtgagaaactcaacagcagcttcccatccatccactgcggctcctgggctgagaccacccccggtggcgggggcagcagcgccgcccggagagtccggcccgtctccctcatggtgcccagccaggctggggccccagggaggcagttccacggcagtgccagcagcctggtggaagcggtcttgatttcagaaggactggggcagtttgctcaagatcccaagttcatcgaggtcaccacccaggagctggccgacgcctgcgacatgaccatagaggagatggagagcgcggccgacaacatcctcagcgggggcgccccacagagccccaatggcgccctcttaccctttgtgaactgcagggacgcggggcaggaccgagccgggggcgaagaggacgcgggctgtgtgcgcgcgcggggtcgaccgagtgaggaggagctccaggacagcagggtctacgtcagcagcctgtagtgggcgctgccagatgcgggcttttttttatttgtttcaatgttcctaatgggttcgtttcagaagtgcctcactgttctcgtgacctggagttaaccggaacagcgtcttcattcatttctgttgggaccagacgcggagcctgggtgcgcgagccgccctccgggaggaaggcgcccggctgcgtctgcagaggcggggagaggaggcggcgagggtcccggggcgcgaggaaggcgcctgccctctcccagctcgcaggccccgggcccggccgcgcctccgcggggagagcaccccggcttcccgcgcgccctcaccaaaaggaccctacagcaaacgggtgtctttcgactctgcttgtagaaaccatttgcacatattctgtacgagcctcgctgtctccctagagccagggccctgcggatttggagaagggagcggggcaggacttccaggaggaccccaacccggcccggagagggaggaggaggcctccaggggcgcggagctctggggatgggcgtcgggccggcagtggtgcggctcactccgtccctgcccacctgcgacgggatcccccgaccggcacgggccacgccgagctcccggccagccgccggcccgcaggcagcgcgagggaggagctgcgccgccggctccgcccaaccaggtggtgctgagcttccgctgagcgctcttttgttttgtggtttgacacttttcttgacagcatgttgcagtttcttttcggttttggttttttttaaatgttttattttgctttcccagcgggaggggaggaagaagagtgtttacaaagtcctgtagccccctcacctttctgttttcacttttgccaatgtacatcgggtttggttttcttgtattatttaaacggttgtggtttcctttttccacggaggttcaatagaagccgctgcaggagagttttaccaa

SEQ ID NO: 113189 - DNA, 6811 bp, Homo sapiens
  Payload ID: 2138
  Gene Symbol: CACNA1C
  Gene Name: calcium channel, voltage-dependent, L type, alpha 1C subunit
  ENST ID: ENST00000480911
  CDS Start-End: 26-3865
ctcctattaaaaccatttttggtccatggtcaatgagaatacgaggatgtacattccagaggaaaaccaccaaggttccaactatgggagcccacgccccgcccatgccaacatgaatgccaatgcggcagcggggctggcccctgagcacatccccaccccgggggctgccctgtcgtggcaggcggccatcgacgcagcccggcaggctaagctgatgggcagcgctggcaatgcgaccatctccacagtcagctccacgcagcggaagcggcagcaatatgggaaacccaagaagcagggcagcaccacggccacacgcccgccccgagccctgctctgcctgaccctgaagaaccccatccggagggcctgcatcagcattgtcgaatggaaaccatttgaaataattattttactgactatttttgccaattgtgtggccttagcgatctatattccctttccagaagatgattccaacgccaccaattccaacctggaacgagtggaatatctctttctcataatttttacggtggaagcgtttttaaaagtaatcgcctatggactcctctttcaccccaatgcctacctccgcaacggctggaacctactagattttataattgtggttgtggggctttttagtgcaattttagaacaagcaaccaaagcagatggggcaaacgctctcggagggaaaggggccggatttgatgtgaaggcgctgagggccttccgcgtgctgcgccccctgcggctggtgtccggagtcccaagtctccaggtggtcctgaattccatcatcaaggccatggtccccctgctgcacatcgccctgcttgtgctgtttgtcatcatcatctacgccatcatcggcttggagctcttcatggggaagatgcacaagacctgctacaaccaggagggcatagcagatgttccagcagaagatgacccttccccttgtgcgctggaaacgggccacgggcggcagtgccagaacggcacggtgtgcaagcccggctgggatggtcccaagcacggcatcaccaactttgacaactttgccttcgccatgctcacggtgttccagtgcatcaccatggagggctggacggacgtgctgtactgggtcaatgatgccgtaggaagggactggccctggatctattttgttacactaatcatcatagggtcattttttgtacttaacttggttctcggtgtgcttagcggagagttttccaaagagagggagaaggccaaggcccggggagatttccagaagctgcgggagaagcagcagctagaagaggatctcaaaggctacctggattggatcactcaggccgaagacatcgatcctgagaatgaggacgaaggcatggatgaggagaagccccgaaacatgagcatgcccaccagtgagaccgagtccgtcaacaccgaaaacgtggctggaggtgacatcgagggagaaaactgcggggccaggctggcccaccggatctccaagtcaaagttcagccgctactggcgccggtggaatcggttctgcagaaggaagtgccgcgccgcagtcaagtctaatgtcttctactggctggtgattttcctggtgttcctcaacacgctcaccattgcctctgagcactacaaccagcccaactggctcacagaagtccaagacacggcaaacaaggccctgctggccctgttcacggcagagatgctcctgaagatgtacagcctgggcctgcaggcctacttcgtgtccctcttcaaccgctttgactgcttcgtcgtgtgtggcggcatcctggagaccatcctggtggagaccaagatcatgtccccactgggcatctccgtgctcagatgcgtccggctgctgaggattttcaagatcacgaggtactggaactccttgagcaacctggtggcatccttgctgaactctgtgcgctccatcgcctccctgctccttctcctcttcctcttcatcatcatcttctccctcctggggatgcagctctttggaggaaagttcaactttgatgagatgcagacccggaggagcacattcgataacttcccccagtccctcctcactgtgtttcagatcctgaccggggaggactggaattcggtgatgtatgatgggatcatggcttatggcggcccctcttttccagggatgttagtctgtatttacttcatcatcctcttcatctgtggaaactatatcctactgaatgtgttcttggccattgctgtggacaacctggctgatgctgagagcctcacatctgcccaaaaggaggaggaagaggagaaggagagaaagaagctggccaggactgccagcccagagaagaaacaagagttggtggagaagccggcagtgggggaatccaaggaggagaagattgagctgaaatccatcacggctgacggagagtctccacccgccaccaagatcaacatggatgacctccagcccaatgaaaatgaggataagagcccctaccccaacccagaaactacaggagaagaggatgaggaggagccagagatgcctgtcggccctcgcccacgaccactctctgagcttcaccttaaggaaaaggcagtgcccatgccagaagccagcgcgtttttcatcttcagctctaacaacaggtttcgcctccagtgccaccgcattgtcaatgacacgatcttcaccaacctgatcctcttcttcattctgctcagcagcatttccctggctgctgaggacccggtccagcacacctccttcaggaaccatatcctaggcaatgcagactatgtcttcactagtatctttacattagaaattatccttaagatgactgcttatggggctttcttgcacaagggttctttctgccggaactacttcaacatcctggacctgctggtggtcagcgtgtccctcatctcctttggcatccagtccagtgcaatcaatgtcgtgaagatcttgcgagtcctgcgagtactcaggcccctgagggccatcaacagggccaaggggctaaagcatgtggttcagtgtgtgtttgtcgccatccggaccatcgggaacatcgtgattgtcaccaccctgctgcagttcatgtttgcctgcatcggggtccagctcttcaagggaaagctgtacacctgttcagacagttccaagcagacagaggcggaatgcaagggcaactacatcacgtacaaagacggggaggttgaccaccccatcatccaaccccgcagctgggagaacagcaagtttgactttgacaatgttctggcagccatgatggccctcttcaccgtctccaccttcgaagggtggccagagctgctgtaccgctccatcgactcccacacggaagacaagggccccatctacaactaccgtgtggagatctccatcttcttcatcatctacatcatcatcatcgccttcttcatgatgaacatcttcgtgggcttcgtcatcgtcacctttcaggagcagggggagcaggagtacaagaactgtgagctggacaagaaccagcgacagtgcgtggaatacgccctcaaggcccggcccctgcggaggtacatccccaagaaccagcaccagtacaaagtgtggtacgtggtcaactccacctacttcgagtacctgatgttcgtcctcatcctgctcaacaccatctgcctggccatgcagcactacggccagagctgcctgttcaaaatcgccatgaacatcctcaacatgctcttcactggcctcttcaccgtggagatgatcctgaagctcattgccttcaaacccaaggtaggcctctgagaaagacctttgattcccaggcatcaggggtggacagaacggggaggtggggtgcaggtattgaaggcagaatgaggggaagagggaaaaaggcatcggtgaaggaccatccctgctccgatggtcagtgccccaactcctacacctgcccagagctgaaccaggccaactccaggaaacactctcagctctcagtgttgaccctggctggcatgcacaagctgcagattcctcgctgagctgaacctctgagcctctcctaggagaggcaggtgatggtctttctcctatgtcccatcctctagtacataacctgttaatagaagaaactatgctcatagactggcagaccaaacctctccaggcccagccccccagatccactcaggcctctgttccaccctcctcccatttcatcagccacacagaccaacctcatataaaacattcagccagggctggatttgctcagggctcaggactgagggctccagcccatgggcactcctgttccctgcctaagaggctatggcattgctccttacatgctctggggcaggaagaacaattaccagcaaatttctctgctttgttccttgtgtaagggcaagaagattaggcctgctgctgaatgaggcagggtcagaattcctgttctttggatcatctgtgcccttcctagccagtcacccccattgtcctcagtggtggaggagcagacactggtatgagccacaccttccaccctgggcctctgtagatgggtcagaatcacgggtatccactggccgggattcaccaccaggacagctgcttctgagggaggctataagagcaactgagcagcccccaggctaccataacaccttttggagaaggatgagaaggaacgagttctaggagcatcatgcagttacagacttgagacaatctctccagcttactgagccttcccctccctcctttggtagttttcccagaggcaacacagatcaacaggaggccaagagcaagaatccctggccatatcttctattttcattcaagtttttactggtctcaagattaattgggggtgggggagggtccagctcggcctttgaatccatgttcattgaggagatatccacagccttctttgaatgaatattcactcacactttggattccatatcatgtgctacatgtatatcatcgcacgtcattctcaaaacgtccctttaaagtaggtattagcatccctctgtggagaagggggaagggaggctcaaacaattaagtgcccaggattaattgatccactgctaagaactggcagaacggagactggaatccggcacctctgacttcactgtattttccaccacactgaggttaactatcattttcccatgtcaagtgttctgcgggtattttttagcaagagggaaacaaccttggagggacttaaaagataagacaatattcctacaatgcagattcttctgtcactcaaagaatgcctggggatcccagctgattttcatagaggaagtctcctaagggacatcctttggtgatagaacggtggtttcctgccttctccagagaagcaagtacactctttttcaccttcctgtacaagtcccatttaggaggacagatcttgtcctgacctagagaggacccctgcgttgccctgacaccttccttagggtacacggtgtctgtgcccacacatggtcctattccaagccctgcagcccaggagctctgacagttcgccacccacagcagcatgaccagctgaggccaggagtgcagtcactgcctagccgagcctcagtctcggatgactcctctcagtggggaaactggcatcattttcatacagtgtcacgagacatatggtttaaatatttcaaagccttgagtcattccacagttgactcagatgtgtttctgacgatgtctgaggcagtctggagagcctgcagtggactttctgaatcatgcctcctgagcacgggagacatacagacaaccttccctgggaagtgcatgaaattgacacctgcaggagcctccgtcctccgtctaaaagacactccacctaaatcctgccaatcaaggaacaagccagtttcctaggaagtaaccattgcgagtggtctaaactgtaaagtgcctcctaatttcctctgtccctggttttctattgtgagaagatggggcaagataacagagacttttacccaagaaggaagacagccatcctgggcccatttgcatttcacattccagggtacatctatggtgtaaagagaaaggaaaatggatctttccctgtgaatttccctaaaggggctctggcaagagggggataaaggtcaccacccagttaggagcatcatggagcacagctgagtccctggattcttactgagctatgttcttcattcacaaatagactccaggtaaagcagctccaaaattttcaggcagaaaaccaaactggaaaaacttgaagctctggaagaatatccagctggatctggcccaagaaccagtggcttctaaccatgacctgaatccatgacaactttcatttcccaccattaagtaggactctgtgctgcactttttatttcactggcatggttgtttgtgtatgacccagatgagcatcagcatttgctgtgaaaggatggctaggaaccaaggatgttgaagacagtctgaagttgtcactgcttatgtttcgtctctgcaactggctggttggttggtccatcagccggtcaacttgtattcttgcttcattctttcattgttttcatggtcatggatgttcccaatttcttcatttctgtgtgttctcctcaccactccatggaaaataaatttactcaagtaagtccctgccttaaatctaaccatcccactccttaaattcatactctgttc

SEQ ID NO: 113190 - DNA, 577 bp, Homo sapiens
  Payload ID: 2138
  Gene Symbol: CACNA1C
  Gene Name: calcium channel, voltage-dependent, L type, alpha 1C subunit
  ENST ID: ENST00000543114
  CDS Start-End: 278-577
acataggcagggagcagagcagggaagacgaaaatacaaggttgaaaagaatcaagtaagaaggtgttttgttttgttttttagaattctaaaacttaaaaggaattttactgtaacttaaacttgcagcgatacgatacggccatgtcaacttttgtggcactgaaatgttactgcaggaatagcttctgggttttaaaaaattataagagatcatgagcaggataattatttagctttaaaaatcaaccaattaatatacatctggaaattcacaatgcttcgagcctttgttcagcctggtacgcctgcataccagccgcttcccagccacctgtctgccaacacggaggtcaagtttaagggtactttggtgcatgaagctcaactcaactatttctacatctctcctggaggttccaactatgggagcccacgccccgcccatgccaacatgaatgccaatgcggcagcggggctggcccctgagcacatccccaccccgggggctgccctgtcgtggcaggcggccatcgacgcagcccggcaggctaagctgatgggcagcgctggcaat

SEQ ID NO: 113191 - DNA, 831 bp, Homo sapiens
  Payload ID: 2138
  Gene Symbol: CACNA1C
  Gene Name: calcium channel, voltage-dependent, L type, alpha 1C subunit
  ENST ID: ENST00000465278
  CDS Start-End: 1-730
ctcttttccagggatgttagtctgtatttacttcatcatcctcttcatctgtggaaactatatcctactgaatgtgttcttggccattgctgtggacaacctggctgatgctgagagcctcacatctgcccaaaaggaggaggaagaggagaaggagagaaagaagctggccaggactgccagcccagagaagaaacaagagttggtggagaagccggcagtgggggaatccaaggaggagaagattgagctgaaatccatcacggctgacggagagtctccacccgccaccaagatcaacatggatgacctccagcccaatgaaaatgaggataagagcccctaccccaacccagaaactacaggagaagaggatgaggaggagccagagatgcctgtcggccctcgcccacgaccactctctgagcttcaccttaaggaaaaggcagtgcccatgccagaagccagcgcgtttttcatcttcagctctaacaacaggtttcgcctccagtgccaccgcattgtcaatgacacgatcttcaccaacctgatcctcttcttcattctgctcagcagcatttccctggctgctgaggacccggtccagcacacctccttcaggaaccatgtatgcatcgcctgtgtcttctgcactccttccccctggggctgtgccaggcccacagcttctgttgctgacatcattgttcaatcaggagcccaattctaggtgtcataattagatccacaactaacatttcattaagagagtagggctttgatagaaaaccaccctaggaccacaagcaaataaaagagcatgtacccaaa

SEQ ID NO: 113192 - DNA, 12870 bp, Homo sapiens
  Payload ID: 2138
  Gene Symbol: CACNA1C
  Gene Name: calcium channel, voltage-dependent, L type, alpha 1C subunit
  ENST ID: ENST00000620878
  CDS Start-End: 1-6120
gaacgagtggaatatctctttctcataatttttacggtggaagcgtttttaaaagtaatcgcctatggactcctctttcaccccaatgcctacctccgcaacggctggaacctactagattttataattgtggttgtggggctttttagtgcaattttagaacaagcaaccaaagcagatggggcaaacgctctcggagggaaaggggccggatttgatgtgaaggcgctgagggccttccgcgtgctgcgccccctgcggctggtgtccggagtcccaagtctccaggtggtcctgaattccatcatcaaggccatggtccccctgctgcacatcgccctgcttgtgctgtttgtcatcatcatctacgccatcatcggcttggagctcttcatggggaagatgcacaagacctgctacaaccaggagggcatagcagatgttccagcagaagatgacccttccccttgtgcgctggaaacgggccacgggcggcagtgccagaacggcacggtgtgcaagcccggctgggatggtcccaagcacggcatcaccaactttgacaactttgccttcgccatgctcacggtgttccagtgcatcaccatggagggctggacggacgtgctgtactggatgcaggacgctatgggctatgagttaccctgggtgtattttgtcagtctggtcatctttggatcctttttcgttctaaatctggttctcggtgtgttgagcggagagttttccaaagagagggagaaggccaaggcccggggagatttccagaagctgcgggagaagcagcagctagaagaggatctcaaaggctacctggattggatcactcaggccgaagacatcgatcctgagaatgaggacgaaggcatggatgaggagaagccccgaaacatgagcatgcccaccagtgagaccgagtccgtcaacaccgaaaacgtggctggaggtgacatcgagggagaaaactgcggggccaggctggcccaccggatctccaagtcaaagttcagccgctactggcgccggtggaatcggttctgcagaaggaagtgccgcgccgcagtcaagtctaatgtcttctactggctggtgattttcctggtgttcctcaacacgctcaccattgcctctgagcactacaaccagcccaactggctcacagaagtccaagacacggcaaacaaggccctgctggccctgttcacggcagagatgctcctgaagatgtacagcctgggcctgcaggcctacttcgtgtccctcttcaaccgctttgactgcttcgtcgtgtgtggcggcatcctggagaccatcctggtggagaccaagatcatgtccccactgggcatctccgtgctcagatgcgtccggctgctgaggattttcaagatcacgaggtactggaactccttgagcaacctggtggcatccttgctgaactctgtgcgctccatcgcctccctgctccttctcctcttcctcttcatcatcatcttctccctcctggggatgcagctctttggaggaaagttcaactttgatgagatgcagacccggaggagcacattcgataacttcccccagtccctcctcactgtgtttcagatcctgaccggggaggactggaattcggtgatgtatgatgggatcatggcttatggcggcccctcttttccagggatgttagtctgtatttacttcatcatcctcttcatctgtggaaactatatcctactgaatgtgttcttggccattgctgtggacaacctggctgatgctgagagcctcacatctgcccaaaaggaggaggaagaggagaaggagagaaagaagctggccaggactgccagcccagagaagaaacaagagttggtggagaagccggcagtgggggaatccaaggaggagaagattgagctgaaatccatcacggctgacggagagtctccacccgccaccaagatcaacatggatgacctccagcccaatgaaaatgaggataagagcccctaccccaacccagaaactacaggagaagaggatgaggaggagccagagatgcctgtcggccctcgcccacgaccactctctgagcttcaccttaaggaaaaggcagtgcccatgccagaagccagcgcgtttttcatcttcagctctaacaacaggtttcgcctccagtgccaccgcattgtcaatgacacgatcttcaccaacctgatcctcttcttcattctgctcagcagcatttccctggctgctgaggacccggtccagcacacctccttcaggaaccatattctgttttattttgatattgtttttaccaccattttcaccattgaaattgctctgaagatgactgcttatggggctttcttgcacaagggttctttctgccggaactacttcaacatcctggacctgctggtggtcagcgtgtccctcatctcctttggcatccagtccagtgcaatcaatgtcgtgaagatcttgcgagtcctgcgagtactcaggcccctgagggccatcaacagggccaaggggctaaagcatgtggttcagtgtgtgtttgtcgccatccggaccatcgggaacatcgtgattgtcaccaccctgctgcagttcatgtttgcctgcatcggggtccagctcttcaagggaaagctgtacacctgttcagacagttccaagcagacagaggcggaatgcaagggcaactacatcacgtacaaagacggggaggttgaccaccccatcatccaaccccgcagctgggagaacagcaagtttgactttgacaatgttctggcagccatgatggccctcttcaccgtctccaccttcgaagggtggccagagctgctgtaccgctccatcgactcccacacggaagacaagggccccatctacaactaccgtgtggagatctccatcttcttcatcatctacatcatcatcatcgccttcttcatgatgaacatcttcgtgggcttcgtcatcgtcacctttcaggagcagggggagcaggagtacaagaactgtgagctggacaagaaccagcgacagtgcgtggaatacgccctcaaggcccggcccctgcggaggtacatccccaagaaccagcaccagtacaaagtgtggtacgtggtcaactccacctacttcgagtacctgatgttcgtcctcatcctgctcaacaccatctgcctggccatgcagcactacggccagagctgcctgttcaaaatcgccatgaacatcctcaacatgctcttcactggcctcttcaccgtggagatgatcctgaagctcattgccttcaaacccaagcactatttctgtgatgcatggaatacatttgacgccttgattgttgtgggtagcattgttgatatagcaatcaccgaggtaaacaacgcagaggaaaactcccgcatctccatcaccttcttccgcctgttccgggtcatgcgtctggtgaagctgctgagccgtggggagggcatccggacgctgctgtggaccttcatcaagtccttccaggccctgccctatgtggccctcctgatcgtgatgctgttcttcatctacgcggtgatcgggatgcaggtgtttgggaaaattgccctgaatgataccacagagatcaaccggaacaacaactttcagaccttcccccaggccgtgctgctcctcttcaggtgtgccaccggggaggcctggcaggacatcatgctggcctgcatgccaggcaagaagtgtgccccagagtccgagcccagcaacagcacggagggtgaaacaccctgtggtagcagctttgctgtcttctacttcatcagcttctacatgctctgtgccttcctgatcatcaacctctttgtagctgtcatcatggacaactttgactacctgacaagggactggtccatccttggtccccaccacctggatgagtttaaaagaatctgggcagagtatgaccctgaagccaagggtcgtatcaaacacctggatgtggtgaccctcctccggcggattcagccgccactaggttttgggaagctgtgccctcaccgcgtggcttgcaaacgcctggtctccatgaacatgcctctgaacagcgacgggacagtcatgttcaatgccaccctgtttgccctggtcaggacggccctgaggatcaaaacagaagggaacctagaacaagccaatgaggagctgcgggcgatcatcaagaagatctggaagcggaccagcatgaagctgctggaccaggtggtgccccctgcaggtgatgatgaggtcaccgttggcaagttctacgccacgttcctgatccaggagtacttccggaagttcaagaagcgcaaagagcagggccttgtgggcaagccctcccagaggaacgcgctgtctctgcaggctggcttgcgcacactgcatgacatcgggcctgagatccgacgggccatctctggagatctcaccgctgaggaggagctggacaaggccatgaaggaggctgtgtccgctgcttctgaagatgacatcttcaggagggccggtggcctgttcggcaaccacgtcagctactaccaaagcgacggccggagcgccttcccccagaccttcaccactcagcgcccgctgcacatcaacaaggcgggcagcagccagggcgacactgagtcgccatcccacgagaagctggtggactccaccttcaccccgagcagctactcgtccaccggctccaacgccaacatcaacaacgccaacaacaccgccctgggtcgcctccctcgccccgccggctaccccagcacggtcagcactgtggagggccacgggccccccttgtcccctgccatccgggtgcaggaggtggcgtggaagctcagctccaacaggatgcactgctgtgacatgctggatggtgggaccttccctcccgccctgggcccccgcagggctcctccctgtctgcatcagcagctccagggttccctggcggggctgagagaggacacaccctgcatcgtgcctggccacgcttcactgtgctgctcttccagagtaggagagtggctcccagcaggctgcacagccccccagcatgccaggtgccactcccgggagagccaggcagccatggcgggtcaggaggagacgtctcaggatgagacctatgaagtgaagatgaaccatgacacggaggcctgcagtgagcccagcctgctctccacagagatgctctcctaccaggatgacgaaaatcggcaactgacgctcccagaggaggacaagagggacatccggcaatctccgaagaggggtttcctccgctctgcctcactaggtcgaagggcctccttccacctggaatgtctgaagcgacagaaggaccgagggggagacatctctcagaagacagtcctgcccttgcatctggttcatcatcaggcattggcagtggcaggcctgagccccctcctccagagaagccattcccctgcctcattccctaggccttttgccaccccaccagccacacctggcagccgaggctggcccccacagcccgtccccaccctgcggcttgagggggtcgagtccagtgagaaactcaacagcagcttcccatccatccactgcggctcctgggctgagaccacccccggtggcgggggcagcagcgccgcccggagagtccggcccgtctccctcatggtgcccagccaggctggggccccagggaggcagttccacggcagtgccagcagcctggtggaagcggtcttgatttcagaaggactggggcagtttgctcaagatcccaagttcatcgaggtcaccacccaggagctggccgacgcctgcgacatgaccatagaggagatggagagcgcggccgacaacatcctcagcgggggcgccccacagagccccaatggcgccctcttaccctttgtgaactgcagggacgcggggcaggaccgagccgggggcgaagaggacgcgggctgtgtgcgcgcgcggggtcgaccgagtgaggaggagctccaggacagcagggtctacgtcagcagcctgtagtgggcgctgccagatgcgggcttttttttatttgtttcaatgttcctaatgggttcgtttcagaagtgcctcactgttctcgtgacctggagttaaccggaacagcgtcttcattcatttctgttgggaccagacgcggagcctgggtgcgcgagccgccctccgggaggaaggcgcccggctgcgtctgcagaggcggggagaggaggcggcgagggtcccggggcgcgaggaaggcgcctgccctctcccagctcgcaggccccgggcccggccgcgcctccgcggggagagcaccccggcttcccgcgcgccctcaccaaaaggaccctacagcaaacgggtgtctttcgactctgcttgtagaaaccatttgcacatattctgtacgagcctcgctgtctccctagagccagggccctgcggatttggagaagggagcggggcaggacttccaggaggaccccaacccggcccggagagggaggaggaggcctccaggggcgcggagctctggggatgggcgtcgggccggcagtggtgcggctcactccgtccctgcccacctgcgacgggatcccccgaccggcacgggccacgccgagctcccggccagccgccggcccgcaggcagcgcgagggaggagctgcgccgccggctccgcccaaccaggtggtgctgagcttccgctgagcgctcttttgttttgtggtttgacacttttcttgacagcatgttgcagtttcttttcggttttggttttttttaaatgttttattttgctttcccagcgggaggggaggaagaagagtgtttacaaagtcctgtagccccctcacctttctgttttcacttttgccaatgtacatcgggtttggttttcttgtattatttaaacggttgtggtttcctttttccacggaggttcaatagaagccgctgcaggagagttttaccaaccattgtgtatgcccaataatttgttatcatttccttaggtagtaacctatttttgttctggtttggttcggttatctaatggaaaggtaactggcaatgcacttgatgtggtcttgcacatgtgggtgatagagttgggttcctttttatgctgggtgtacaggtgggtttgggagagaggagcatgcgcgagagagtctccgagtgtgtgcgacgcgtgtgtgtgtggtgggttgtctgtgtgcatatgtcctgcccgtgtatatgcacccacaccatgtgcccgtgcacaccagtgactacgcagtcccccctttctggtttagctgtgggaagatctgaatctggggccgtttgaaagcaaaaacaaaccactgtctctgcttctgaaacgggaatcagtaactctttgcattttctgtcccacaagatatgcaaaaacaatgcaataatattcatttaaaaatacaattgtgagttgtgttggcattaaaactgtattttaaaaaaagacagaaatttaagggaaaaacacaagaaggcattttgcttcaatatattccgtgtaatgttttattgcattgataatgtttctgttgaagaaaccgttatacttgaattcaggtcagtttcagtatttttcaaatatttttttaaaactgaattgcaattgtgccaagcgaatataatgaattgaattaagttggttttcggattcacttcttgtatattttgctgcatgtaaagtaaatcattttgtatttggagtgtgacaagctttacctttgaactcaagtgcttttctatatgtggttgggggaaagggaacaagttttctttagtttgcacaatgagcaaaggtatcaccagtgtagtcattattctgctctccacaaacaggtttggacattactgttttgcatatcttgtgtttgcttacatttccctcaatttttccaaaatcgtttgctgggtatgtttgtaccgcctcttgctgtgagagaccaggacctattttattccagtcttcactctgtccactctgctctggtcatctgatttggtacttctccaagaacagcccttcactgtgaggtgcagggaggcgttctgatgagccctcagtcactgggccgtcatccgcatcccccatggaagaggtagctggctttcccttcccttccaccacacggaattttctctttggcttccttaggaaagtgtacactaaccgggaggataaaattaaagtcaggctgcttggagggaggggcatcctcacttccggattcttgttgctctacccaacaaggacagcaggggctcgagaaaggaactggtgaaaccctgatccatctgaaagtcaactctgcgtgctcctttctccatcccttcctcactctggagcagcctttccttcaggcttgccctaatgtttgggctgccggggagggggccaggacaagggaagaggcatccggagctcacagtgggggtgggaacagatttttgtgggggcatctctaatgctcacttatatctccctagaacatcactcttttggtgctgtgtccttcaaatgtatgtcaacagtggtggctgaaaagggactgctttggggaaaacaggacccaaccattcacccagaattgacccattaaatctcttccagtcctagtgttccctgagcccctcttggcacatatataagtaagctagaaattacaataagggacagtccattcctctatgacagcttgctggactgattcatgacaaagtggagaaatgtactcaatactccccggttaacacagtctagaaacagagtttctttatggatatccacacccaagtcatccaaactttcttgattccttttcactgccatcaaggtcctctagaaattgagtttaggtatcatcctttgaaaagttcccaagatttctaccaggaggtacacacaggcgttccctgtctagggcaggaggactatcctagcttgaccttctgatccactagaataagactggcgtatgatgcctgtcatcagaacagactggcacaagtagtgacatcaatgaaccacagcacaatcttccaagtgatgtctactctccacctaaaatggaattttccccatgaccttgtaaaacataattgtcacatcttccatacccctcctgacagcccccaagtgtcaggagaaaacagtcaggggctaagggcccaagggacttgaagaaacaacagtttaaggtctgcagtttggtcaacttaattcttgtcctccgaccagccctgcctctttcatttccagaccttggagaatttttcccagctttgattcagaaggtactagttataacccctttccttcttcttaatccaataggcctcactctcactgggaaatccactcaaaggaacaaggcaatgtctctcattctatttcccagttccaaattccaggtgcttgtctggagtgaagctacccgttactttctcccagcttttctccacccagcatgtctcctgcccatgcagctgaagacagtggggcaacctcaggagaagcagacctttccatgcccaagttcatctcctgagcaacagtgacacctagaaaatgaggactttggaagtcacccaaaagatggtggctactttatggagtcctgaagatacacagccaccactcctaaaggcaaagaaagaaaacacgaatgtaggtcagggatagagtggaaccctggtcatcggggtttttagcctcatcgtgggaaaggtggtaaaggaggatgatggcatctccatccctagaggccaagaattgaaatatcattgtcaaggattagaaacaattcagcaaagaggccacaaaaagggcctgctgactcccagaagacctctttaaaccccaggggaggcaaatacttgctgatggagtctgggccgtttccatattttaaagaagacctgcctctggggcaaatgtcagcacagagaggactgggaggagaatggaggcaagaaaagggcatattttgactccctctgtgcctcttcccagttcatggaaggatgtgttcagcttacccacccacagtgaccagtgtggtggagccgctgacatctcaaggatctatttgggaaggtgagaagagtactcattccatctgggggtgttgttccagccacatcagcctacctggtgggatgtgggggtgtctgccaccctgtcccccctctgctgatgtccctcccctcaggctgtccaggtgccacctgacacaggctgctgtgcaaagacaggcggggaagcccaaacctcactcccagggaggccctcagccgccagagtccaggttctccagaggctacgatttgaggaggttgagggggaagacaggagggaaagaaaagtcctacaactgtcaggaatggggcacctttccctgtccctaagcaaagctccctcttcccactgccctccccagccccagctccctgtcctccccaacacctagtgagaaagacggtgcgtggaagggagtcccatgggcagatgcttacacgacctctttgtgaagcctcttctgggtttaacttcattcatcaatttattcttatgtcaaagcaatgaaacttttctttctggagccagataccaatacaacaggtgaacgggtttctgccacatctctacattgacgggggatgcttgaacaacccccctcactacacagacacacaccgttaaggcacaagggctggggttgagctctagatgagggactttcctgctcctgcaagggtgagcactgtatacacagacaaggagggtgcagtagagtgactcccttggatggaagtagtaccatcagaacctactattattatgacataaattctatttacatacattgagagaatactacaatcaacactttttcctgggatgactttaagaggtttgagccacagcacctgaagtggcaaagatccatggtctttgtagggtattagagaactcttccagtcacctctgaaagcactctagatcttgcagctgagtggatgaagtgtaacaaatctgttgcacgctgagaggagtcagaattagcatttttcatgaaagttccccacgtctctactaagaatgaggaagaaaagactaagactaggtaattacacagaggcttgaaatgttacatcaccagagccaagtcctctcccttcagatcagttactggctgctacacagggacacccccaccttttcagggcatcccatgcactccacttctcaggatctaaggaatttgactttgtagggatcccagaaagggcactgtgccacttcccctggtgtgaatcagacatacattgtacattcatttctaaaattcactcatgcacctcaaaccaaggtcattatccaaaaaaaaaaaaaaaaagctctgggtggaagagtttgtaagttttaagagagggtcatttctatgtgaggaaatgcagaaatggacagaatgattcttattcactgtttgggtctggagaattcccattgtggaaatcttagagatctcaagtttattaccaagggaataaggaaaaaaaggtgagcaggcaccaggccaagcagtggctcccttgccaaggaacctgaggctgcaggtttcagggacccccttgaagaaacctctcctggccattggccaggagaaaagagaagtctctcctgtagagtcacaagagaagcaaaagagggtgggtcactgggtcctggacatagcccccaaccccaagacttcccaatatggagaaactacaccaatgtttaaaaggggaaaaggaaagaacttgtacatcaagggaagatgatttgtaaacacacagtcctgtgcagaaagatccccttcaggaggtgtctccagcatcccaaagctgtgcgcaccttctcttttcctgcctcaggccacctatgcatccagctgcagcccatacccacacctgaaatccatctcttgaatcccagccaggttatataccaccccattgccatgtcctgtcctggccagaatgcatgctgttcccccaagcctcgtgggagtgaggccatgggaaacagagatgagcatgtctggacaagtctgtgatggtagtggatgagaataacccatggcaaaacacgcacattcattaagaaatagggcgacagattccccgttggtgaagcactgaaaggtctattactctcataatattgctgttttattttaatccaccagagctaccatgcaaaactttcctcctgtgaaacgctccagataaagctcctctaatctccccttccctcatgtcctccagctcaaacccaccttcatcccccaaaccaatctgtatcatgcctgttatcagagaggcacagaaagatgggcagtgcctccgttgtcaccattccccacacccctacacacccccacaccctcccctccaggctccacgacttcacagtcttactgttgtaaatatcattgtacagtttgtaatcctcaaataatcccattgtcagaggcctcgcctgatgggccttctcaccctcgagaaaggccagggaatctagaaggggcaacccttcaaggagagcttcagggtcatctctgtgtgagacactattgtatattcctgtaagattgcatttttatctaaggaatgatgttatttaaaaaacaaacaaaaaacacaaaaaataagaattgcaaataaatttcttaacaatgtct

SEQ ID NO: 113193 - DNA, 545 bp, Homo sapiens
  Payload ID: 2138
  Gene Symbol: CACNA1C
  Gene Name: calcium channel, voltage-dependent, L type, alpha 1C subunit
  ENST ID: ENST00000496818
  CDS Start-End: 114-545
gatagctggagaataaccaagtgctgtgcagggctacagaggaaggggaagagataatccctgtccatgaaaaataacaagcttcatggggcacacagcccaggctcaaatgaatggcatatgtatgtaaactgcttatgtctaaaaccaggccattggtgatgatcggagtagcatgggtcatgctgctgtaccgctccatcgactcccacacggaagacaagggccccatctacaactaccgtgtggagatctccatcttcttcatcatctacatcatcatcatcgccttcttcatgatgaacatcttcgtgggcttcgtcatcgtcacctttcaggagcagggggagcaggagtacaagaactgtgagctggacaagaaccagcgacagtgcgtggaatacgccctcaaggcccggcccctgcggaggtacatccccaagaaccagcaccagtacaaagtgtggtacgtggtcaactccacctacttcgagtacctgatgttcgtcctcatcctgctcaacaccatctgcctggccatgcag

SEQ ID NO: 113194 - DNA, 12834 bp, Homo sapiens
  Payload ID: 2138
  Gene Symbol: CACNA1C
  Gene Name: calcium channel, voltage-dependent, L type, alpha 1C subunit
  ENST ID: ENST00000615400
  CDS Start-End: 1-6084
gaacgagtggaatatctctttctcataatttttacggtggaagcgtttttaaaagtaatcgcctatggactcctctttcaccccaatgcctacctccgcaacggctggaacctactagattttataattgtggttgtggggctttttagtgcaattttagaacaagcaaccaaagcagatggggcaaacgctctcggagggaaaggggccggatttgatgtgaaggcgctgagggccttccgcgtgctgcgccccctgcggctggtgtccggagtcccaagtctccaggtggtcctgaattccatcatcaaggccatggtccccctgctgcacatcgccctgcttgtgctgtttgtcatcatcatctacgccatcatcggcttggagctcttcatggggaagatgcacaagacctgctacaaccaggagggcatagcagatgttccagcagaagatgacccttccccttgtgcgctggaaacgggccacgggcggcagtgccagaacggcacggtgtgcaagcccggctgggatggtcccaagcacggcatcaccaactttgacaactttgccttcgccatgctcacggtgttccagtgcatcaccatggagggctggacggacgtgctgtactgggtcaatgatgccgtaggaagggactggccctggatctattttgttacactaatcatcatagggtcattttttgtacttaacttggttctcggtgtgcttagcggagagttttccaaagagagggagaaggccaaggcccggggagatttccagaagctgcgggagaagcagcagctagaagaggatctcaaaggctacctggattggatcactcaggccgaagacatcgatcctgagaatgaggacgaaggcatggatgaggagaagccccgaaacatgagcatgcccaccagtgagaccgagtccgtcaacaccgaaaacgtggctggaggtgacatcgagggagaaaactgcggggccaggctggcccaccggatctccaagtcaaagttcagccgctactggcgccggtggaatcggttctgcagaaggaagtgccgcgccgcagtcaagtctaatgtcttctactggctggtgattttcctggtgttcctcaacacgctcaccattgcctctgagcactacaaccagcccaactggctcacagaagtccaagacacggcaaacaaggccctgctggccctgttcacggcagagatgctcctgaagatgtacagcctgggcctgcaggcctacttcgtgtccctcttcaaccgctttgactgcttcgtcgtgtgtggcggcatcctggagaccatcctggtggagaccaagatcatgtccccactgggcatctccgtgctcagatgcgtccggctgctgaggattttcaagatcacgaggtactggaactccttgagcaacctggtggcatccttgctgaactctgtgcgctccatcgcctccctgctccttctcctcttcctcttcatcatcatcttctccctcctggggatgcagctctttggaggaaagttcaactttgatgagatgcagacccggaggagcacattcgataacttcccccagtccctcctcactgtgtttcagatcctgaccggggaggactggaattcggtgatgtatgatgggatcatggcttatggcggcccctcttttccagggatgttagtctgtatttacttcatcatcctcttcatctgtggaaactatatcctactgaatgtgttcttggccattgctgtggacaacctggctgatgctgagagcctcacatctgcccaaaaggaggaggaagaggagaaggagagaaagaagctggccaggactgccagcccagagaagaaacaagagttggtggagaagccggcagtgggggaatccaaggaggagaagattgagctgaaatccatcacggctgacggagagtctccacccgccaccaagatcaacatggatgacctccagcccaatgaaaatgaggataagagcccctaccccaacccagaaactacaggagaagaggatgaggaggagccagagatgcctgtcggccctcgcccacgaccactctctgagcttcaccttaaggaaaaggcagtgcccatgccagaagccagcgcgtttttcatcttcagctctaacaacaggtttcgcctccagtgccaccgcattgtcaatgacacgatcttcaccaacctgatcctcttcttcattctgctcagcagcatttccctggctgctgaggacccggtccagcacacctccttcaggaaccatattctgttttattttgatattgtttttaccaccattttcaccattgaaattgctctgaagatcctaggcaatgcagactatgtcttcactagtatctttacattagaaattatccttaagatgactgcttatggggctttcttgcacaagggttctttctgccggaactacttcaacatcctggacctgctggtggtcagcgtgtccctcatctcctttggcatccagtccagtgcaatcaatgtcgtgaagatcttgcgagtcctgcgagtactcaggcccctgagggccatcaacagggccaaggggctaaagcatgtggttcagtgtgtgtttgtcgccatccggaccatcgggaacatcgtgattgtcaccaccctgctgcagttcatgtttgcctgcatcggggtccagctcttcaagggaaagctgtacacctgttcagacagttccaagcagacagaggcggaatgcaagggcaactacatcacgtacaaagacggggaggttgaccaccccatcatccaaccccgcagctgggagaacagcaagtttgactttgacaatgttctggcagccatgatggccctcttcaccgtctccaccttcgaagggtggccagagctgctgtaccgctccatcgactcccacacggaagacaagggccccatctacaactaccgtgtggagatctccatcttcttcatcatctacatcatcatcatcgccttcttcatgatgaacatcttcgtgggcttcgtcatcgtcacctttcaggagcagggggagcaggagtacaagaactgtgagctggacaagaaccagcgacagtgcgtggaatacgccctcaaggcccggcccctgcggaggtacatccccaagaaccagcaccagtacaaagtgtggtacgtggtcaactccacctacttcgagtacctgatgttcgtcctcatcctgctcaacaccatctgcctggccatgcagcactacggccagagctgcctgttcaaaatcgccatgaacatcctcaacatgctcttcactggcctcttcaccgtggagatgatcctgaagctcattgccttcaaacccaagggttactttagtgatccctggaatgtttttgacttcctcatcgtaattggcagcataattgacgtcattctcagtgagactaatcactatttctgtgatgcatggaatacatttgacgccttgattgttgtgggtagcattgttgatatagcaatcaccgaggtaaacccagctgaacatacccaatgctctccctctatgaacgcagaggaaaactcccgcatctccatcaccttcttccgcctgttccgggtcatgcgtctggtgaagctgctgagccgtggggagggcatccggacgctgctgtggaccttcatcaagtccttccaggccctgccctatgtggccctcctgatcgtgatgctgttcttcatctacgcggtgatcgggatgcaggtgtttgggaaaattgccctgaatgataccacagagatcaaccggaacaacaactttcagaccttcccccaggccgtgctgctcctcttcaggtgtgccaccggggaggcctggcaggacatcatgctggcctgcatgccaggcaagaagtgtgccccagagtccgagcccagcaacagcacggagggtgaaacaccctgtggtagcagctttgctgtcttctacttcatcagcttctacatgctctgtgccttcctgatcatcaacctctttgtagctgtcatcatggacaactttgactacctgacaagggactggtccatccttggtccccaccacctggatgagtttaaaagaatctgggcagagtatgaccctgaagccaagggtcgtatcaaacacctggatgtggtgaccctcctccggcggattcagccgccactaggttttgggaagctgtgccctcaccgcgtggcttgcaaacgcctggtctccatgaacatgcctctgaacagcgacgggacagtcatgttcaatgccaccctgtttgccctggtcaggacggccctgaggatcaaaacagaagggaacctagaacaagccaatgaggagctgcgggcgatcatcaagaagatctggaagcggaccagcatgaagctgctggaccaggtggtgccccctgcaggtgatgatgaggtcaccgttggcaagttctacgccacgttcctgatccaggagtacttccggaagttcaagaagcgcaaagagcagggccttgtgggcaagccctcccagaggaacgcgctgtctctgcaggctggcttgcgcacactgcatgacatcgggcctgagatccgacgggccatctctggagatctcaccgctgaggaggagctggacaaggccatgaaggaggctgtgtccgctgcttctgaagatgacatcttcaggagggccggtggcctgttcggcaaccacgtcagctactaccaaagcgacggccggagcgccttcccccagaccttcaccactcagcgcccgctgcacatcaacaaggcgggcagcagccagggcgacactgagtcgccatcccacgagaagctggtggactccaccttcaccccgagcagctactcgtccaccggctccaacgccaacatcaacaacgccaacaacaccgccctgggtcgcctccctcgccccgccggctaccccagcacggtcagcactgtggagggccacgggccccccttgtcccctgccatccgggtgcaggaggtggcgtggaagctcagctccaacaggtgccactcccgggagagccaggcagccatggcgggtcaggaggagacgtctcaggatgagacctatgaagtgaagatgaaccatgacacggaggcctgcagtgagcccagcctgctctccacagagatgctctcctaccaggatgacgaaaatcggcaactgacgctcccagaggaggacaagagggacatccggcaatctccgaagaggggtttcctccgctctgcctcactaggtcgaagggcctccttccacctggaatgtctgaagcgacagaaggaccgagggggagacatctctcagaagacagtcctgcccttgcatctggttcatcatcaggcattggcagtggcaggcctgagccccctcctccagagaagccattcccctgcctcattccctaggccttttgccaccccaccagccacacctggcagccgaggctggcccccacagcccgtccccaccctgcggcttgagggggtcgagtccagtgagaaactcaacagcagcttcccatccatccactgcggctcctgggctgagaccacccccggtggcgggggcagcagcgccgcccggagagtccggcccgtctccctcatggtgcccagccaggctggggccccagggaggcagttccacggcagtgccagcagcctggtggaagcggtcttgatttcagaaggactggggcagtttgctcaagatcccaagttcatcgaggtcaccacccaggagctggccgacgcctgcgacatgaccatagaggagatggagagcgcggccgacaacatcctcagcgggggcgccccacagagccccaatggcgccctcttaccctttgtgaactgcagggacgcggggcaggaccgagccgggggcgaagaggacgcgggctgtgtgcgcgcgcggggtcgaccgagtgaggaggagctccaggacagcagggtctacgtcagcagcctgtagtgggcgctgccagatgcgggcttttttttatttgtttcaatgttcctaatgggttcgtttcagaagtgcctcactgttctcgtgacctggagttaaccggaacagcgtcttcattcatttctgttgggaccagacgcggagcctgggtgcgcgagccgccctccgggaggaaggcgcccggctgcgtctgcagaggcggggagaggaggcggcgagggtcccggggcgcgaggaaggcgcctgccctctcccagctcgcaggccccgggcccggccgcgcctccgcggggagagcaccccggcttcccgcgcgccctcaccaaaaggaccctacagcaaacgggtgtctttcgactctgcttgtagaaaccatttgcacatattctgtacgagcctcgctgtctccctagagccagggccctgcggatttggagaagggagcggggcaggacttccaggaggaccccaacccggcccggagagggaggaggaggcctccaggggcgcggagctctggggatgggcgtcgggccggcagtggtgcggctcactccgtccctgcccacctgcgacgggatcccccgaccggcacgggccacgccgagctcccggccagccgccggcccgcaggcagcgcgagggaggagctgcgccgccggctccgcccaaccaggtggtgctgagcttccgctgagcgctcttttgttttgtggtttgacacttttcttgacagcatgttgcagtttcttttcggttttggttttttttaaatgttttattttgctttcccagcgggaggggaggaagaagagtgtttacaaagtcctgtagccccctcacctttctgttttcacttttgccaatgtacatcgggtttggttttcttgtattatttaaacggttgtggtttcctttttccacggaggttcaatagaagccgctgcaggagagttttaccaaccattgtgtatgcccaataatttgttatcatttccttaggtagtaacctatttttgttctggtttggttcggttatctaatggaaaggtaactggcaatgcacttgatgtggtcttgcacatgtgggtgatagagttgggttcctttttatgctgggtgtacaggtgggtttgggagagaggagcatgcgcgagagagtctccgagtgtgtgcgacgcgtgtgtgtgtggtgggttgtctgtgtgcatatgtcctgcccgtgtatatgcacccacaccatgtgcccgtgcacaccagtgactacgcagtcccccctttctggtttagctgtgggaagatctgaatctggggccgtttgaaagcaaaaacaaaccactgtctctgcttctgaaacgggaatcagtaactctttgcattttctgtcccacaagatatgcaaaaacaatgcaataatattcatttaaaaatacaattgtgagttgtgttggcattaaaactgtattttaaaaaaagacagaaatttaagggaaaaacacaagaaggcattttgcttcaatatattccgtgtaatgttttattgcattgataatgtttctgttgaagaaaccgttatacttgaattcaggtcagtttcagtatttttcaaatatttttttaaaactgaattgcaattgtgccaagcgaatataatgaattgaattaagttggttttcggattcacttcttgtatattttgctgcatgtaaagtaaatcattttgtatttggagtgtgacaagctttacctttgaactcaagtgcttttctatatgtggttgggggaaagggaacaagttttctttagtttgcacaatgagcaaaggtatcaccagtgtagtcattattctgctctccacaaacaggtttggacattactgttttgcatatcttgtgtttgcttacatttccctcaatttttccaaaatcgtttgctgggtatgtttgtaccgcctcttgctgtgagagaccaggacctattttattccagtcttcactctgtccactctgctctggtcatctgatttggtacttctccaagaacagcccttcactgtgaggtgcagggaggcgttctgatgagccctcagtcactgggccgtcatccgcatcccccatggaagaggtagctggctttcccttcccttccaccacacggaattttctctttggcttccttaggaaagtgtacactaaccgggaggataaaattaaagtcaggctgcttggagggaggggcatcctcacttccggattcttgttgctctacccaacaaggacagcaggggctcgagaaaggaactggtgaaaccctgatccatctgaaagtcaactctgcgtgctcctttctccatcccttcctcactctggagcagcctttccttcaggcttgccctaatgtttgggctgccggggagggggccaggacaagggaagaggcatccggagctcacagtgggggtgggaacagatttttgtgggggcatctctaatgctcacttatatctccctagaacatcactcttttggtgctgtgtccttcaaatgtatgtcaacagtggtggctgaaaagggactgctttggggaaaacaggacccaaccattcacccagaattgacccattaaatctcttccagtcctagtgttccctgagcccctcttggcacatatataagtaagctagaaattacaataagggacagtccattcctctatgacagcttgctggactgattcatgacaaagtggagaaatgtactcaatactccccggttaacacagtctagaaacagagtttctttatggatatccacacccaagtcatccaaactttcttgattccttttcactgccatcaaggtcctctagaaattgagtttaggtatcatcctttgaaaagttcccaagatttctaccaggaggtacacacaggcgttccctgtctagggcaggaggactatcctagcttgaccttctgatccactagaataagactggcgtatgatgcctgtcatcagaacagactggcacaagtagtgacatcaatgaaccacagcacaatcttccaagtgatgtctactctccacctaaaatggaattttccccatgaccttgtaaaacataattgtcacatcttccatacccctcctgacagcccccaagtgtcaggagaaaacagtcaggggctaagggcccaagggacttgaagaaacaacagtttaaggtctgcagtttggtcaacttaattcttgtcctccgaccagccctgcctctttcatttccagaccttggagaatttttcccagctttgattcagaaggtactagttataacccctttccttcttcttaatccaataggcctcactctcactgggaaatccactcaaaggaacaaggcaatgtctctcattctatttcccagttccaaattccaggtgcttgtctggagtgaagctacccgttactttctcccagcttttctccacccagcatgtctcctgcccatgcagctgaagacagtggggcaacctcaggagaagcagacctttccatgcccaagttcatctcctgagcaacagtgacacctagaaaatgaggactttggaagtcacccaaaagatggtggctactttatggagtcctgaagatacacagccaccactcctaaaggcaaagaaagaaaacacgaatgtaggtcagggatagagtggaaccctggtcatcggggtttttagcctcatcgtgggaaaggtggtaaaggaggatgatggcatctccatccctagaggccaagaattgaaatatcattgtcaaggattagaaacaattcagcaaagaggccacaaaaagggcctgctgactcccagaagacctctttaaaccccaggggaggcaaatacttgctgatggagtctgggccgtttccatattttaaagaagacctgcctctggggcaaatgtcagcacagagaggactgggaggagaatggaggcaagaaaagggcatattttgactccctctgtgcctcttcccagttcatggaaggatgtgttcagcttacccacccacagtgaccagtgtggtggagccgctgacatctcaaggatctatttgggaaggtgagaagagtactcattccatctgggggtgttgttccagccacatcagcctacctggtgggatgtgggggtgtctgccaccctgtcccccctctgctgatgtccctcccctcaggctgtccaggtgccacctgacacaggctgctgtgcaaagacaggcggggaagcccaaacctcactcccagggaggccctcagccgccagagtccaggttctccagaggctacgatttgaggaggttgagggggaagacaggagggaaagaaaagtcctacaactgtcaggaatggggcacctttccctgtccctaagcaaagctccctcttcccactgccctccccagccccagctccctgtcctccccaacacctagtgagaaagacggtgcgtggaagggagtcccatgggcagatgcttacacgacctctttgtgaagcctcttctgggtttaacttcattcatcaatttattcttatgtcaaagcaatgaaacttttctttctggagccagataccaatacaacaggtgaacgggtttctgccacatctctacattgacgggggatgcttgaacaacccccctcactacacagacacacaccgttaaggcacaagggctggggttgagctctagatgagggactttcctgctcctgcaagggtgagcactgtatacacagacaaggagggtgcagtagagtgactcccttggatggaagtagtaccatcagaacctactattattatgacataaattctatttacatacattgagagaatactacaatcaacactttttcctgggatgactttaagaggtttgagccacagcacctgaagtggcaaagatccatggtctttgtagggtattagagaactcttccagtcacctctgaaagcactctagatcttgcagctgagtggatgaagtgtaacaaatctgttgcacgctgagaggagtcagaattagcatttttcatgaaagttccccacgtctctactaagaatgaggaagaaaagactaagactaggtaattacacagaggcttgaaatgttacatcaccagagccaagtcctctcccttcagatcagttactggctgctacacagggacacccccaccttttcagggcatcccatgcactccacttctcaggatctaaggaatttgactttgtagggatcccagaaagggcactgtgccacttcccctggtgtgaatcagacatacattgtacattcatttctaaaattcactcatgcacctcaaaccaaggtcattatccaaaaaaaaaaaaaaaaagctctgggtggaagagtttgtaagttttaagagagggtcatttctatgtgaggaaatgcagaaatggacagaatgattcttattcactgtttgggtctggagaattcccattgtggaaatcttagagatctcaagtttattaccaagggaataaggaaaaaaaggtgagcaggcaccaggccaagcagtggctcccttgccaaggaacctgaggctgcaggtttcagggacccccttgaagaaacctctcctggccattggccaggagaaaagagaagtctctcctgtagagtcacaagagaagcaaaagagggtgggtcactgggtcctggacatagcccccaaccccaagacttcccaatatggagaaactacaccaatgtttaaaaggggaaaaggaaagaacttgtacatcaagggaagatgatttgtaaacacacagtcctgtgcagaaagatccccttcaggaggtgtctccagcatcccaaagctgtgcgcaccttctcttttcctgcctcaggccacctatgcatccagctgcagcccatacccacacctgaaatccatctcttgaatcccagccaggttatataccaccccattgccatgtcctgtcctggccagaatgcatgctgttcccccaagcctcgtgggagtgaggccatgggaaacagagatgagcatgtctggacaagtctgtgatggtagtggatgagaataacccatggcaaaacacgcacattcattaagaaatagggcgacagattccccgttggtgaagcactgaaaggtctattactctcataatattgctgttttattttaatccaccagagctaccatgcaaaactttcctcctgtgaaacgctccagataaagctcctctaatctccccttccctcatgtcctccagctcaaacccaccttcatcccccaaaccaatctgtatcatgcctgttatcagagaggcacagaaagatgggcagtgcctccgttgtcaccattccccacacccctacacacccccacaccctcccctccaggctccacgacttcacagtcttactgttgtaaatatcattgtacagtttgtaatcctcaaataatcccattgtcagaggcctcgcctgatgggccttctcaccctcgagaaaggccagggaatctagaaggggcaacccttcaaggagagcttcagggtcatctctgtgtgagacactattgtatattcctgtaagattgcatttttatctaaggaatgatgttatttaaaaaacaaacaaaaaacacaaaaaataagaattgcaaataaatttcttaacaatgtct

SEQ ID NO: 113195 - DNA, 12939 bp, Homo sapiens
  Payload ID: 2138
  Gene Symbol: CACNA1C
  Gene Name: calcium channel, voltage-dependent, L type, alpha 1C subunit
  ENST ID: ENST00000615303
  CDS Start-End: 1-6189
gaacgagtggaatatctctttctcataatttttacggtggaagcgtttttaaaagtaatcgcctatggactcctctttcaccccaatgcctacctccgcaacggctggaacctactagattttataattgtggttgtggggctttttagtgcaattttagaacaagcaaccaaagcagatggggcaaacgctctcggagggaaaggggccggatttgatgtgaaggcgctgagggccttccgcgtgctgcgccccctgcggctggtgtccggagtcccaagtctccaggtggtcctgaattccatcatcaaggccatggtccccctgctgcacatcgccctgcttgtgctgtttgtcatcatcatctacgccatcatcggcttggagctcttcatggggaagatgcacaagacctgctacaaccaggagggcatagcagatgttccagcagaagatgacccttccccttgtgcgctggaaacgggccacgggcggcagtgccagaacggcacggtgtgcaagcccggctgggatggtcccaagcacggcatcaccaactttgacaactttgccttcgccatgctcacggtgttccagtgcatcaccatggagggctggacggacgtgctgtactgggtcaatgatgccgtaggaagggactggccctggatctattttgttacactaatcatcatagggtcattttttgtacttaacttggttctcggtgtgcttagcggagagttttccaaagagagggagaaggccaaggcccggggagatttccagaagctgcgggagaagcagcagctagaagaggatctcaaaggctacctggattggatcactcaggccgaagacatcgatcctgagaatgaggacgaaggcatggatgaggagaagccccgaaacatgagcatgcccaccagtgagaccgagtccgtcaacaccgaaaacgtggctggaggtgacatcgagggagaaaactgcggggccaggctggcccaccggatctccaagtcaaagttcagccgctactggcgccggtggaatcggttctgcagaaggaagtgccgcgccgcagtcaagtctaatgtcttctactggctggtgattttcctggtgttcctcaacacgctcaccattgcctctgagcactacaaccagcccaactggctcacagaagtccaagacacggcaaacaaggccctgctggccctgttcacggcagagatgctcctgaagatgtacagcctgggcctgcaggcctacttcgtgtccctcttcaaccgctttgactgcttcgtcgtgtgtggcggcatcctggagaccatcctggtggagaccaagatcatgtccccactgggcatctccgtgctcagatgcgtccggctgctgaggattttcaagatcacgaggtactggaactccttgagcaacctggtggcatccttgctgaactctgtgcgctccatcgcctccctgctccttctcctcttcctcttcatcatcatcttctccctcctggggatgcagctctttggaggaaagttcaactttgatgagatgcagacccggaggagcacattcgataacttcccccagtccctcctcactgtgtttcagatcctgaccggggaggactggaattcggtgatgtatgatgggatcatggcttatggcggcccctcttttccagggatgttagtctgtatttacttcatcatcctcttcatctgtggaaactatatcctactgaatgtgttcttggccattgctgtggacaacctggctgatgctgagagcctcacatctgcccaaaaggaggaggaagaggagaaggagagaaagaagctggccaggactgccagcccagagaagaaacaagagttggtggagaagccggcagtgggggaatccaaggaggagaagattgagctgaaatccatcacggctgacggagagtctccacccgccaccaagatcaacatggatgacctccagcccaatgaaaatgaggataagagcccctaccccaacccagaaactacaggagaagaggatgaggaggagccagagatgcctgtcggccctcgcccacgaccactctctgagcttcaccttaaggaaaaggcagtgcccatgccagaagccagcgcgtttttcatcttcagctctaacaacaggtttcgcctccagtgccaccgcattgtcaatgacacgatcttcaccaacctgatcctcttcttcattctgctcagcagcatttccctggctgctgaggacccggtccagcacacctccttcaggaaccatattctgttttattttgatattgtttttaccaccattttcaccattgaaattgctctgaagatcctaggcaatgcagactatgtcttcactagtatctttacattagaaattatccttaagatgactgcttatggggctttcttgcacaagggttctttctgccggaactacttcaacatcctggacctgctggtggtcagcgtgtccctcatctcctttggcatccagtccagtgcaatcaatgtcgtgaagatcttgcgagtcctgcgagtactcaggcccctgagggccatcaacagggccaaggggctaaagcatgtggttcagtgtgtgtttgtcgccatccggaccatcgggaacatcgtgattgtcaccaccctgctgcagttcatgtttgcctgcatcggggtccagctcttcaagggaaagctgtacacctgttcagacagttccaagcagacagaggcggaatgcaagggcaactacatcacgtacaaagacggggaggttgaccaccccatcatccaaccccgcagctgggagaacagcaagtttgactttgacaatgttctggcagccatgatggccctcttcaccgtctccaccttcgaagggtggccagagctgctgtaccgctccatcgactcccacacggaagacaagggccccatctacaactaccgtgtggagatctccatcttcttcatcatctacatcatcatcatcgccttcttcatgatgaacatcttcgtgggcttcgtcatcgtcacctttcaggagcagggggagcaggagtacaagaactgtgagctggacaagaaccagcgacagtgcgtggaatacgccctcaaggcccggcccctgcggaggtacatccccaagaaccagcaccagtacaaagtgtggtacgtggtcaactccacctacttcgagtacctgatgttcgtcctcatcctgctcaacaccatctgcctggccatgcagcactacggccagagctgcctgttcaaaatcgccatgaacatcctcaacatgctcttcactggcctcttcaccgtggagatgatcctgaagctcattgccttcaaacccaagggttactttagtgatccctggaatgtttttgacttcctcatcgtaattggcagcataattgacgtcattctcagtgagactaatcactatttctgtgatgcatggaatacatttgacgccttgattgttgtgggtagcattgttgatatagcaatcaccgaggtaaacccagctgaacatacccaatgctctccctctatgaacgcagaggaaaactcccgcatctccatcaccttcttccgcctgttccgggtcatgcgtctggtgaagctgctgagccgtggggagggcatccggacgctgctgtggaccttcatcaagtccttccaggccctgccctatgtggccctcctgatcgtgatgctgttcttcatctacgcggtgatcgggatgcaggtgtttgggaaaattgccctgaatgataccacagagatcaaccggaacaacaactttcagaccttcccccaggccgtgctgctcctcttcaggtgtgccaccggggaggcctggcaggacatcatgctggcctgcatgccaggcaagaagtgtgccccagagtccgagcccagcaacagcacggagggtgaaacaccctgtggtagcagctttgctgtcttctacttcatcagcttctacatgctctgtgccttcctgatcatcaacctctttgtagctgtcatcatggacaactttgactacctgacaagggactggtccatccttggtccccaccacctggatgagtttaaaagaatctgggcagagtatgaccctgaagccaagggtcgtatcaaacacctggatgtggtgaccctcctccggcggattcagccgccactaggttttgggaagctgtgccctcaccgcgtggcttgcaaacgcctggtctccatgaacatgcctctgaacagcgacgggacagtcatgttcaatgccaccctgtttgccctggtcaggacggccctgaggatcaaaacagaagggaacctagaacaagccaatgaggagctgcgggcgatcatcaagaagatctggaagcggaccagcatgaagctgctggaccaggtggtgccccctgcaggtgatgatgaggtcaccgttggcaagttctacgccacgttcctgatccaggagtacttccggaagttcaagaagcgcaaagagcagggccttgtgggcaagccctcccagaggaacgcgctgtctctgcaggctggcttgcgcacactgcatgacatcgggcctgagatccgacgggccatctctggagatctcaccgctgaggaggagctggacaaggccatgaaggaggctgtgtccgctgcttctgaagatgacatcttcaggagggccggtggcctgttcggcaaccacgtcagctactaccaaagcgacggccggagcgccttcccccagaccttcaccactcagcgcccgctgcacatcaacaaggcgggcagcagccagggcgacactgagtcgccatcccacgagaagctggtggactccaccttcaccccgagcagctactcgtccaccggctccaacgccaacatcaacaacgccaacaacaccgccctgggtcgcctccctcgccccgccggctaccccagcacggtcagcactgtggagggccacgggccccccttgtcccctgccatccgggtgcaggaggtggcgtggaagctcagctccaacagggaaaggcacgttccgatgtgtgaggatctggagctcaggagggattcaggctcagcagggactcaggctcactgccttctgctcaggagagcaaacccctctaggtgccactcccgggagagccaggcagccatggcgggtcaggaggagacgtctcaggatgagacctatgaagtgaagatgaaccatgacacggaggcctgcagtgagcccagcctgctctccacagagatgctctcctaccaggatgacgaaaatcggcaactgacgctcccagaggaggacaagagggacatccggcaatctccgaagaggggtttcctccgctctgcctcactaggtcgaagggcctccttccacctggaatgtctgaagcgacagaaggaccgagggggagacatctctcagaagacagtcctgcccttgcatctggttcatcatcaggcattggcagtggcaggcctgagccccctcctccagagaagccattcccctgcctcattccctaggccttttgccaccccaccagccacacctggcagccgaggctggcccccacagcccgtccccaccctgcggcttgagggggtcgagtccagtgagaaactcaacagcagcttcccatccatccactgcggctcctgggctgagaccacccccggtggcgggggcagcagcgccgcccggagagtccggcccgtctccctcatggtgcccagccaggctggggccccagggaggcagttccacggcagtgccagcagcctggtggaagcggtcttgatttcagaaggactggggcagtttgctcaagatcccaagttcatcgaggtcaccacccaggagctggccgacgcctgcgacatgaccatagaggagatggagagcgcggccgacaacatcctcagcgggggcgccccacagagccccaatggcgccctcttaccctttgtgaactgcagggacgcggggcaggaccgagccgggggcgaagaggacgcgggctgtgtgcgcgcgcggggtcgaccgagtgaggaggagctccaggacagcagggtctacgtcagcagcctgtagtgggcgctgccagatgcgggcttttttttatttgtttcaatgttcctaatgggttcgtttcagaagtgcctcactgttctcgtgacctggagttaaccggaacagcgtcttcattcatttctgttgggaccagacgcggagcctgggtgcgcgagccgccctccgggaggaaggcgcccggctgcgtctgcagaggcggggagaggaggcggcgagggtcccggggcgcgaggaaggcgcctgccctctcccagctcgcaggccccgggcccggccgcgcctccgcggggagagcaccccggcttcccgcgcgccctcaccaaaaggaccctacagcaaacgggtgtctttcgactctgcttgtagaaaccatttgcacatattctgtacgagcctcgctgtctccctagagccagggccctgcggatttggagaagggagcggggcaggacttccaggaggaccccaacccggcccggagagggaggaggaggcctccaggggcgcggagctctggggatgggcgtcgggccggcagtggtgcggctcactccgtccctgcccacctgcgacgggatcccccgaccggcacgggccacgccgagctcccggccagccgccggcccgcaggcagcgcgagggaggagctgcgccgccggctccgcccaaccaggtggtgctgagcttccgctgagcgctcttttgttttgtggtttgacacttttcttgacagcatgttgcagtttcttttcggttttggttttttttaaatgttttattttgctttcccagcgggaggggaggaagaagagtgtttacaaagtcctgtagccccctcacctttctgttttcacttttgccaatgtacatcgggtttggttttcttgtattatttaaacggttgtggtttcctttttccacggaggttcaatagaagccgctgcaggagagttttaccaaccattgtgtatgcccaataatttgttatcatttccttaggtagtaacctatttttgttctggtttggttcggttatctaatggaaaggtaactggcaatgcacttgatgtggtcttgcacatgtgggtgatagagttgggttcctttttatgctgggtgtacaggtgggtttgggagagaggagcatgcgcgagagagtctccgagtgtgtgcgacgcgtgtgtgtgtggtgggttgtctgtgtgcatatgtcctgcccgtgtatatgcacccacaccatgtgcccgtgcacaccagtgactacgcagtcccccctttctggtttagctgtgggaagatctgaatctggggccgtttgaaagcaaaaacaaaccactgtctctgcttctgaaacgggaatcagtaactctttgcattttctgtcccacaagatatgcaaaaacaatgcaataatattcatttaaaaatacaattgtgagttgtgttggcattaaaactgtattttaaaaaaagacagaaatttaagggaaaaacacaagaaggcattttgcttcaatatattccgtgtaatgttttattgcattgataatgtttctgttgaagaaaccgttatacttgaattcaggtcagtttcagtatttttcaaatatttttttaaaactgaattgcaattgtgccaagcgaatataatgaattgaattaagttggttttcggattcacttcttgtatattttgctgcatgtaaagtaaatcattttgtatttggagtgtgacaagctttacctttgaactcaagtgcttttctatatgtggttgggggaaagggaacaagttttctttagtttgcacaatgagcaaaggtatcaccagtgtagtcattattctgctctccacaaacaggtttggacattactgttttgcatatcttgtgtttgcttacatttccctcaatttttccaaaatcgtttgctgggtatgtttgtaccgcctcttgctgtgagagaccaggacctattttattccagtcttcactctgtccactctgctctggtcatctgatttggtacttctccaagaacagcccttcactgtgaggtgcagggaggcgttctgatgagccctcagtcactgggccgtcatccgcatcccccatggaagaggtagctggctttcccttcccttccaccacacggaattttctctttggcttccttaggaaagtgtacactaaccgggaggataaaattaaagtcaggctgcttggagggaggggcatcctcacttccggattcttgttgctctacccaacaaggacagcaggggctcgagaaaggaactggtgaaaccctgatccatctgaaagtcaactctgcgtgctcctttctccatcccttcctcactctggagcagcctttccttcaggcttgccctaatgtttgggctgccggggagggggccaggacaagggaagaggcatccggagctcacagtgggggtgggaacagatttttgtgggggcatctctaatgctcacttatatctccctagaacatcactcttttggtgctgtgtccttcaaatgtatgtcaacagtggtggctgaaaagggactgctttggggaaaacaggacccaaccattcacccagaattgacccattaaatctcttccagtcctagtgttccctgagcccctcttggcacatatataagtaagctagaaattacaataagggacagtccattcctctatgacagcttgctggactgattcatgacaaagtggagaaatgtactcaatactccccggttaacacagtctagaaacagagtttctttatggatatccacacccaagtcatccaaactttcttgattccttttcactgccatcaaggtcctctagaaattgagtttaggtatcatcctttgaaaagttcccaagatttctaccaggaggtacacacaggcgttccctgtctagggcaggaggactatcctagcttgaccttctgatccactagaataagactggcgtatgatgcctgtcatcagaacagactggcacaagtagtgacatcaatgaaccacagcacaatcttccaagtgatgtctactctccacctaaaatggaattttccccatgaccttgtaaaacataattgtcacatcttccatacccctcctgacagcccccaagtgtcaggagaaaacagtcaggggctaagggcccaagggacttgaagaaacaacagtttaaggtctgcagtttggtcaacttaattcttgtcctccgaccagccctgcctctttcatttccagaccttggagaatttttcccagctttgattcagaaggtactagttataacccctttccttcttcttaatccaataggcctcactctcactgggaaatccactcaaaggaacaaggcaatgtctctcattctatttcccagttccaaattccaggtgcttgtctggagtgaagctacccgttactttctcccagcttttctccacccagcatgtctcctgcccatgcagctgaagacagtggggcaacctcaggagaagcagacctttccatgcccaagttcatctcctgagcaacagtgacacctagaaaatgaggactttggaagtcacccaaaagatggtggctactttatggagtcctgaagatacacagccaccactcctaaaggcaaagaaagaaaacacgaatgtaggtcagggatagagtggaaccctggtcatcggggtttttagcctcatcgtgggaaaggtggtaaaggaggatgatggcatctccatccctagaggccaagaattgaaatatcattgtcaaggattagaaacaattcagcaaagaggccacaaaaagggcctgctgactcccagaagacctctttaaaccccaggggaggcaaatacttgctgatggagtctgggccgtttccatattttaaagaagacctgcctctggggcaaatgtcagcacagagaggactgggaggagaatggaggcaagaaaagggcatattttgactccctctgtgcctcttcccagttcatggaaggatgtgttcagcttacccacccacagtgaccagtgtggtggagccgctgacatctcaaggatctatttgggaaggtgagaagagtactcattccatctgggggtgttgttccagccacatcagcctacctggtgggatgtgggggtgtctgccaccctgtcccccctctgctgatgtccctcccctcaggctgtccaggtgccacctgacacaggctgctgtgcaaagacaggcggggaagcccaaacctcactcccagggaggccctcagccgccagagtccaggttctccagaggctacgatttgaggaggttgagggggaagacaggagggaaagaaaagtcctacaactgtcaggaatggggcacctttccctgtccctaagcaaagctccctcttcccactgccctccccagccccagctccctgtcctccccaacacctagtgagaaagacggtgcgtggaagggagtcccatgggcagatgcttacacgacctctttgtgaagcctcttctgggtttaacttcattcatcaatttattcttatgtcaaagcaatgaaacttttctttctggagccagataccaatacaacaggtgaacgggtttctgccacatctctacattgacgggggatgcttgaacaacccccctcactacacagacacacaccgttaaggcacaagggctggggttgagctctagatgagggactttcctgctcctgcaagggtgagcactgtatacacagacaaggagggtgcagtagagtgactcccttggatggaagtagtaccatcagaacctactattattatgacataaattctatttacatacattgagagaatactacaatcaacactttttcctgggatgactttaagaggtttgagccacagcacctgaagtggcaaagatccatggtctttgtagggtattagagaactcttccagtcacctctgaaagcactctagatcttgcagctgagtggatgaagtgtaacaaatctgttgcacgctgagaggagtcagaattagcatttttcatgaaagttccccacgtctctactaagaatgaggaagaaaagactaagactaggtaattacacagaggcttgaaatgttacatcaccagagccaagtcctctcccttcagatcagttactggctgctacacagggacacccccaccttttcagggcatcccatgcactccacttctcaggatctaaggaatttgactttgtagggatcccagaaagggcactgtgccacttcccctggtgtgaatcagacatacattgtacattcatttctaaaattcactcatgcacctcaaaccaaggtcattatccaaaaaaaaaaaaaaaaagctctgggtggaagagtttgtaagttttaagagagggtcatttctatgtgaggaaatgcagaaatggacagaatgattcttattcactgtttgggtctggagaattcccattgtggaaatcttagagatctcaagtttattaccaagggaataaggaaaaaaaggtgagcaggcaccaggccaagcagtggctcccttgccaaggaacctgaggctgcaggtttcagggacccccttgaagaaacctctcctggccattggccaggagaaaagagaagtctctcctgtagagtcacaagagaagcaaaagagggtgggtcactgggtcctggacatagcccccaaccccaagacttcccaatatggagaaactacaccaatgtttaaaaggggaaaaggaaagaacttgtacatcaagggaagatgatttgtaaacacacagtcctgtgcagaaagatccccttcaggaggtgtctccagcatcccaaagctgtgcgcaccttctcttttcctgcctcaggccacctatgcatccagctgcagcccatacccacacctgaaatccatctcttgaatcccagccaggttatataccaccccattgccatgtcctgtcctggccagaatgcatgctgttcccccaagcctcgtgggagtgaggccatgggaaacagagatgagcatgtctggacaagtctgtgatggtagtggatgagaataacccatggcaaaacacgcacattcattaagaaatagggcgacagattccccgttggtgaagcactgaaaggtctattactctcataatattgctgttttattttaatccaccagagctaccatgcaaaactttcctcctgtgaaacgctccagataaagctcctctaatctccccttccctcatgtcctccagctcaaacccaccttcatcccccaaaccaatctgtatcatgcctgttatcagagaggcacagaaagatgggcagtgcctccgttgtcaccattccccacacccctacacacccccacaccctcccctccaggctccacgacttcacagtcttactgttgtaaatatcattgtacagtttgtaatcctcaaataatcccattgtcagaggcctcgcctgatgggccttctcaccctcgagaaaggccagggaatctagaaggggcaacccttcaaggagagcttcagggtcatctctgtgtgagacactattgtatattcctgtaagattgcatttttatctaaggaatgatgttatttaaaaaacaaacaaaaaacacaaaaaataagaattgcaaataaatttcttaacaatgtct

SEQ ID NO: 113196 - DNA, 2833 bp, Homo sapiens
  Payload ID: 2138
  Gene Symbol: CACNA1C
  Gene Name: calcium channel, voltage-dependent, L type, alpha 1C subunit
  ENST ID: ENST00000616390
  CDS Start-End: 276-2765
acagctgggtggggcagaggttatccttgacatctccctccagccccccttctcattgctggagcctcctgttgccctcggagtcccttccagcttcttcccactttcggcaacagcccccacccccaacaaacctaatgctaccaagatgccttgtttcaaaatgaagtgattccagcacagtcattcatgctgggtggtagcaactcagtgagctgcccttctaatagatcattgtaccttgaagagaaggcgatgctcaacctgcaggtggaatgtttattgtatctcagaacgcagaggaaaactcccgcatctccatcaccttcttccgcctgttccgggtcatgcgtctggtgaagctgctgagccgtggggagggcatccggacgctgctgtggaccttcatcaagtccttccaggccctgccctatgtggccctcctgatcgtgatgctgttcttcatctacgcggtgatcgggatgcaggtgtttgggaaaattgccctgaatgataccacagagatcaaccggaacaacaactttcagaccttcccccaggccgtgctgctcctcttcaggtgtgccaccggggaggcctggcaggacatcatgctggcctgcatgccaggcaagaagtgtgccccagagtccgagcccagcaacagcacggagggtgaaacaccctgtggtagcagctttgctgtcttctacttcatcagcttctacatgctctgtgccttcctgatcatcaacctctttgtagctgtcatcatggacaactttgactacctgacaagggactggtccatccttggtccccaccacctggatgagtttaaaagaatctgggcagagtatgaccctgaagccaagggtcgtatcaaacacctggatgtggtgaccctcctccggcggattcagccgccactaggttttgggaagctgtgccctcaccgcgtggcttgcaaacgcctggtctccatgaacatgcctctgaacagcgacgggacagtcatgttcaatgccaccctgtttgccctggtcaggacggccctgaggatcaaaacagaagggaacctagaacaagccaatgaggagctgcgggcgatcatcaagaagatctggaagcggaccagcatgaagctgctggaccaggtggtgccccctgcaggtgatgatgaggtcaccgttggcaagttctacgccacgttcctgatccaggagtacttccggaagttcaagaagcgcaaagagcagggccttgtgggcaagccctcccagaggaacgcgctgtctctgcaggctggcttgcgcacactgcatgacatcgggcctgagatccgacgggccatctctggagatctcaccgctgaggaggagctggacaaggccatgaaggaggctgtgtccgctgcttctgaagatgacatcttcaggagggccggtggcctgttcggcaaccacgtcagctactaccaaagcgacggccggagcgccttcccccagaccttcaccactcagcgcccgctgcacatcaacaaggcgggcagcagccagggcgacactgagtcgccatcccacgagaagctggtggactccaccttcaccccgagcagctactcgtccaccggctccaacgccaacatcaacaacgccaacaacaccgccctgggtcgcctccctcgccccgccggctaccccagcacggtcagcactgtggagggccacgggccccccttgtcccctgccatccgggtgcaggaggtggcgtggaagctcagctccaacaggtgccactcccgggagagccaggcagccatggcgggtcaggaggagacgtctcaggatgagacctatgaagtgaagatgaaccatgacacggaggcctgcagtgagcccagcctgctctccacagagatgctctcctaccaggatgacgaaaatcggcaactgacgctcccagaggaggacaagagggacatccggcaatctccgaagaggggtttcctccgctctgcctcactaggtcgaagggcctccttccacctggaatgtctgaagcgacagaaggaccgagggggagacatctctcagaagacagtcctgcccttgcatctggttcatcatcaggcattggcagtggcaggcctgagccccctcctccagagaagccattcccctgcctcattccctaggccttttgccaccccaccagccacacctggcagccgaggctggcccccacagcccgtccccaccctgcggcttgagggggtcgagtccagtgagaaactcaacagcagcttcccatccatccactgcggctcctgggctgagaccacccccggtggcgggggcagcagcgccgcccggagagtccggcccgtctccctcatggtgcccagccaggctggggccccagggaggcagttccacggcagtgccagcagcctggtggaagcggtcttgatttcagaaggactggggcagtttgctcaagatcccaagttcatcgaggtcaccacccaggagctggccgacgcctgcgacatgaccatagaggagatggagagcgcggccgacaacatcctcagcgggggcgccccacagagccccaatggcgccctcttaccctttgtgaactgcagggacgcggggcaggaccgagccgggggcgaagaggacgcgggctgtgtgcgcgcgcggggtcgaccgagtgaggaggagctccaggacagcagggtctacgtcagcagcctgtagtgggcgctgccagatgcgggcttttttttatttgtttcaatgttcctaatgggttcgtttcagaagtg

SEQ ID NO: 113197 - DNA, 12795 bp, Homo sapiens
  Payload ID: 2138
  Gene Symbol: CACNA1C
  Gene Name: calcium channel, voltage-dependent, L type, alpha 1C subunit
  ENST ID: ENST00000613940
  CDS Start-End: 1-6045
gaacgagtggaatatctctttctcataatttttacggtggaagcgtttttaaaagtaatcgcctatggactcctctttcaccccaatgcctacctccgcaacggctggaacctactagattttataattgtggttgtggggctttttagtgcaattttagaacaagcaaccaaagcagatggggcaaacgctctcggagggaaaggggccggatttgatgtgaaggcgctgagggccttccgcgtgctgcgccccctgcggctggtgtccggagtcccaagtctccaggtggtcctgaattccatcatcaaggccatggtccccctgctgcacatcgccctgcttgtgctgtttgtcatcatcatctacgccatcatcggcttggagctcttcatggggaagatgcacaagacctgctacaaccaggagggcatagcagatgttccagcagaagatgacccttccccttgtgcgctggaaacgggccacgggcggcagtgccagaacggcacggtgtgcaagcccggctgggatggtcccaagcacggcatcaccaactttgacaactttgccttcgccatgctcacggtgttccagtgcatcaccatggagggctggacggacgtgctgtactggatgcaggacgctatgggctatgagttaccctgggtgtattttgtcagtctggtcatctttggatcctttttcgttctaaatctggttctcggtgtgttgagcggagagttttccaaagagagggagaaggccaaggcccggggagatttccagaagctgcgggagaagcagcagctagaagaggatctcaaaggctacctggattggatcactcaggccgaagacatcgatcctgagaatgaggacgaaggcatggatgaggagaagccccgaaacatgagcatgcccaccagtgagaccgagtccgtcaacaccgaaaacgtggctggaggtgacatcgagggagaaaactgcggggccaggctggcccaccggatctccaagtcaaagttcagccgctactggcgccggtggaatcggttctgcagaaggaagtgccgcgccgcagtcaagtctaatgtcttctactggctggtgattttcctggtgttcctcaacacgctcaccattgcctctgagcactacaaccagcccaactggctcacagaagtccaagacacggcaaacaaggccctgctggccctgttcacggcagagatgctcctgaagatgtacagcctgggcctgcaggcctacttcgtgtccctcttcaaccgctttgactgcttcgtcgtgtgtggcggcatcctggagaccatcctggtggagaccaagatcatgtccccactgggcatctccgtgctcagatgcgtccggctgctgaggattttcaagatcacgaggtactggaactccttgagcaacctggtggcatccttgctgaactctgtgcgctccatcgcctccctgctccttctcctcttcctcttcatcatcatcttctccctcctggggatgcagctctttggaggaaagttcaactttgatgagatgcagacccggaggagcacattcgataacttcccccagtccctcctcactgtgtttcagatcctgaccggggaggactggaattcggtgatgtatgatgggatcatggcttatggcggcccctcttttccagggatgttagtctgtatttacttcatcatcctcttcatctgtggaaactatatcctactgaatgtgttcttggccattgctgtggacaacctggctgatgctgagagcctcacatctgcccaaaaggaggaggaagaggagaaggagagaaagaagctggccaggactgccagcccagagaagaaacaagagttggtggagaagccggcagtgggggaatccaaggaggagaagattgagctgaaatccatcacggctgacggagagtctccacccgccaccaagatcaacatggatgacctccagcccaatgaaaatgaggataagagcccctaccccaacccagaaactacaggagaagaggatgaggaggagccagagatgcctgtcggccctcgcccacgaccactctctgagcttcaccttaaggaaaaggcagtgcccatgccagaagccagcgcgtttttcatcttcagctctaacaacaggtttcgcctccagtgccaccgcattgtcaatgacacgatcttcaccaacctgatcctcttcttcattctgctcagcagcatttccctggctgctgaggacccggtccagcacacctccttcaggaaccatattctgttttattttgatattgtttttaccaccattttcaccattgaaattgctctgaagatgactgcttatggggctttcttgcacaagggttctttctgccggaactacttcaacatcctggacctgctggtggtcagcgtgtccctcatctcctttggcatccagtccagtgcaatcaatgtcgtgaagatcttgcgagtcctgcgagtactcaggcccctgagggccatcaacagggccaaggggctaaagcatgtggttcagtgtgtgtttgtcgccatccggaccatcgggaacatcgtgattgtcaccaccctgctgcagttcatgtttgcctgcatcggggtccagctcttcaagggaaagctgtacacctgttcagacagttccaagcagacagaggcggaatgcaagggcaactacatcacgtacaaagacggggaggttgaccaccccatcatccaaccccgcagctgggagaacagcaagtttgactttgacaatgttctggcagccatgatggccctcttcaccgtctccaccttcgaagggtggccagagctgctgtaccgctccatcgactcccacacggaagacaagggccccatctacaactaccgtgtggagatctccatcttcttcatcatctacatcatcatcatcgccttcttcatgatgaacatcttcgtgggcttcgtcatcgtcacctttcaggagcagggggagcaggagtacaagaactgtgagctggacaagaaccagcgacagtgcgtggaatacgccctcaaggcccggcccctgcggaggtacatccccaagaaccagcaccagtacaaagtgtggtacgtggtcaactccacctacttcgagtacctgatgttcgtcctcatcctgctcaacaccatctgcctggccatgcagcactacggccagagctgcctgttcaaaatcgccatgaacatcctcaacatgctcttcactggcctcttcaccgtggagatgatcctgaagctcattgccttcaaacccaagggttactttagtgatccctggaatgtttttgacttcctcatcgtaattggcagcataattgacgtcattctcagtgagactaatccagctgaacatacccaatgctctccctctatgaacgcagaggaaaactcccgcatctccatcaccttcttccgcctgttccgggtcatgcgtctggtgaagctgctgagccgtggggagggcatccggacgctgctgtggaccttcatcaagtccttccaggccctgccctatgtggccctcctgatcgtgatgctgttcttcatctacgcggtgatcgggatgcaggtgtttgggaaaattgccctgaatgataccacagagatcaaccggaacaacaactttcagaccttcccccaggccgtgctgctcctcttcaggtgtgccaccggggaggcctggcaggacatcatgctggcctgcatgccaggcaagaagtgtgccccagagtccgagcccagcaacagcacggagggtgaaacaccctgtggtagcagctttgctgtcttctacttcatcagcttctacatgctctgtgccttcctgatcatcaacctctttgtagctgtcatcatggacaactttgactacctgacaagggactggtccatccttggtccccaccacctggatgagtttaaaagaatctgggcagagtatgaccctgaagccaagggtcgtatcaaacacctggatgtggtgaccctcctccggcggattcagccgccactaggttttgggaagctgtgccctcaccgcgtggcttgcaaacgcctggtctccatgaacatgcctctgaacagcgacgggacagtcatgttcaatgccaccctgtttgccctggtcaggacggccctgaggatcaaaacagaagggaacctagaacaagccaatgaggagctgcgggcgatcatcaagaagatctggaagcggaccagcatgaagctgctggaccaggtggtgccccctgcaggtgatgatgaggtcaccgttggcaagttctacgccacgttcctgatccaggagtacttccggaagttcaagaagcgcaaagagcagggccttgtgggcaagccctcccagaggaacgcgctgtctctgcaggctggcttgcgcacactgcatgacatcgggcctgagatccgacgggccatctctggagatctcaccgctgaggaggagctggacaaggccatgaaggaggctgtgtccgctgcttctgaagatgacatcttcaggagggccggtggcctgttcggcaaccacgtcagctactaccaaagcgacggccggagcgccttcccccagaccttcaccactcagcgcccgctgcacatcaacaaggcgggcagcagccagggcgacactgagtcgccatcccacgagaagctggtggactccaccttcaccccgagcagctactcgtccaccggctccaacgccaacatcaacaacgccaacaacaccgccctgggtcgcctccctcgccccgccggctaccccagcacggtcagcactgtggagggccacgggccccccttgtcccctgccatccgggtgcaggaggtggcgtggaagctcagctccaacagggaaaggcacgttccgatgtgtgaggatctggagctcaggagggattcaggctcagcagggactcaggctcactgccttctgctcaggagagcaaacccctctaggtgccactcccgggagagccaggcagccatggcgggtcaggaggagacgtctcaggatgagacctatgaagtgaagatgaaccatgacacggaggcctgcagtgagcccagcctgctctccacagagatgctctcctaccaggatgacgaaaatcggcaactgacgctcccagaggaggacaagagggacatccggcaatctccgaagaggggtttcctccgctctgcctcactaggtcgaagggcctccttccacctggaatgtctgaagcgacagaaggaccgagggggagacatctctcagaagacagtcctgcccttgcatctggttcatcatcaggcattggcagtggcaggcctgagccccctcctccagagaagccattcccctgcctcattccctaggccttttgccaccccaccagccacacctggcagccgaggctggcccccacagcccgtccccaccctgcggcttgagggggtcgagtccagtgagaaactcaacagcagcttcccatccatccactgcggctcctgggctgagaccacccccggtggcgggggcagcagcgccgcccggagagtccggcccgtctccctcatggtgcccagccaggctggggccccagggaggcagttccacggcagtgccagcagcctggtggaagcggtcttgatttcagaaggactggggcagtttgctcaagatcccaagttcatcgaggtcaccacccaggagctggccgacgcctgcgacatgaccatagaggagatggagagcgcggccgacaacatcctcagcgggggcgccccacagagccccaatggcgccctcttaccctttgtgaactgcagggacgcggggcaggaccgagccgggggcgaagaggacgcgggctgtgtgcgcgcgcggggtcgaccgagtgaggaggagctccaggacagcagggtctacgtcagcagcctgtagtgggcgctgccagatgcgggcttttttttatttgtttcaatgttcctaatgggttcgtttcagaagtgcctcactgttctcgtgacctggagttaaccggaacagcgtcttcattcatttctgttgggaccagacgcggagcctgggtgcgcgagccgccctccgggaggaaggcgcccggctgcgtctgcagaggcggggagaggaggcggcgagggtcccggggcgcgaggaaggcgcctgccctctcccagctcgcaggccccgggcccggccgcgcctccgcggggagagcaccccggcttcccgcgcgccctcaccaaaaggaccctacagcaaacgggtgtctttcgactctgcttgtagaaaccatttgcacatattctgtacgagcctcgctgtctccctagagccagggccctgcggatttggagaagggagcggggcaggacttccaggaggaccccaacccggcccggagagggaggaggaggcctccaggggcgcggagctctggggatgggcgtcgggccggcagtggtgcggctcactccgtccctgcccacctgcgacgggatcccccgaccggcacgggccacgccgagctcccggccagccgccggcccgcaggcagcgcgagggaggagctgcgccgccggctccgcccaaccaggtggtgctgagcttccgctgagcgctcttttgttttgtggtttgacacttttcttgacagcatgttgcagtttcttttcggttttggttttttttaaatgttttattttgctttcccagcgggaggggaggaagaagagtgtttacaaagtcctgtagccccctcacctttctgttttcacttttgccaatgtacatcgggtttggttttcttgtattatttaaacggttgtggtttcctttttccacggaggttcaatagaagccgctgcaggagagttttaccaaccattgtgtatgcccaataatttgttatcatttccttaggtagtaacctatttttgttctggtttggttcggttatctaatggaaaggtaactggcaatgcacttgatgtggtcttgcacatgtgggtgatagagttgggttcctttttatgctgggtgtacaggtgggtttgggagagaggagcatgcgcgagagagtctccgagtgtgtgcgacgcgtgtgtgtgtggtgggttgtctgtgtgcatatgtcctgcccgtgtatatgcacccacaccatgtgcccgtgcacaccagtgactacgcagtcccccctttctggtttagctgtgggaagatctgaatctggggccgtttgaaagcaaaaacaaaccactgtctctgcttctgaaacgggaatcagtaactctttgcattttctgtcccacaagatatgcaaaaacaatgcaataatattcatttaaaaatacaattgtgagttgtgttggcattaaaactgtattttaaaaaaagacagaaatttaagggaaaaacacaagaaggcattttgcttcaatatattccgtgtaatgttttattgcattgataatgtttctgttgaagaaaccgttatacttgaattcaggtcagtttcagtatttttcaaatatttttttaaaactgaattgcaattgtgccaagcgaatataatgaattgaattaagttggttttcggattcacttcttgtatattttgctgcatgtaaagtaaatcattttgtatttggagtgtgacaagctttacctttgaactcaagtgcttttctatatgtggttgggggaaagggaacaagttttctttagtttgcacaatgagcaaaggtatcaccagtgtagtcattattctgctctccacaaacaggtttggacattactgttttgcatatcttgtgtttgcttacatttccctcaatttttccaaaatcgtttgctgggtatgtttgtaccgcctcttgctgtgagagaccaggacctattttattccagtcttcactctgtccactctgctctggtcatctgatttggtacttctccaagaacagcccttcactgtgaggtgcagggaggcgttctgatgagccctcagtcactgggccgtcatccgcatcccccatggaagaggtagctggctttcccttcccttccaccacacggaattttctctttggcttccttaggaaagtgtacactaaccgggaggataaaattaaagtcaggctgcttggagggaggggcatcctcacttccggattcttgttgctctacccaacaaggacagcaggggctcgagaaaggaactggtgaaaccctgatccatctgaaagtcaactctgcgtgctcctttctccatcccttcctcactctggagcagcctttccttcaggcttgccctaatgtttgggctgccggggagggggccaggacaagggaagaggcatccggagctcacagtgggggtgggaacagatttttgtgggggcatctctaatgctcacttatatctccctagaacatcactcttttggtgctgtgtccttcaaatgtatgtcaacagtggtggctgaaaagggactgctttggggaaaacaggacccaaccattcacccagaattgacccattaaatctcttccagtcctagtgttccctgagcccctcttggcacatatataagtaagctagaaattacaataagggacagtccattcctctatgacagcttgctggactgattcatgacaaagtggagaaatgtactcaatactccccggttaacacagtctagaaacagagtttctttatggatatccacacccaagtcatccaaactttcttgattccttttcactgccatcaaggtcctctagaaattgagtttaggtatcatcctttgaaaagttcccaagatttctaccaggaggtacacacaggcgttccctgtctagggcaggaggactatcctagcttgaccttctgatccactagaataagactggcgtatgatgcctgtcatcagaacagactggcacaagtagtgacatcaatgaaccacagcacaatcttccaagtgatgtctactctccacctaaaatggaattttccccatgaccttgtaaaacataattgtcacatcttccatacccctcctgacagcccccaagtgtcaggagaaaacagtcaggggctaagggcccaagggacttgaagaaacaacagtttaaggtctgcagtttggtcaacttaattcttgtcctccgaccagccctgcctctttcatttccagaccttggagaatttttcccagctttgattcagaaggtactagttataacccctttccttcttcttaatccaataggcctcactctcactgggaaatccactcaaaggaacaaggcaatgtctctcattctatttcccagttccaaattccaggtgcttgtctggagtgaagctacccgttactttctcccagcttttctccacccagcatgtctcctgcccatgcagctgaagacagtggggcaacctcaggagaagcagacctttccatgcccaagttcatctcctgagcaacagtgacacctagaaaatgaggactttggaagtcacccaaaagatggtggctactttatggagtcctgaagatacacagccaccactcctaaaggcaaagaaagaaaacacgaatgtaggtcagggatagagtggaaccctggtcatcggggtttttagcctcatcgtgggaaaggtggtaaaggaggatgatggcatctccatccctagaggccaagaattgaaatatcattgtcaaggattagaaacaattcagcaaagaggccacaaaaagggcctgctgactcccagaagacctctttaaaccccaggggaggcaaatacttgctgatggagtctgggccgtttccatattttaaagaagacctgcctctggggcaaatgtcagcacagagaggactgggaggagaatggaggcaagaaaagggcatattttgactccctctgtgcctcttcccagttcatggaaggatgtgttcagcttacccacccacagtgaccagtgtggtggagccgctgacatctcaaggatctatttgggaaggtgagaagagtactcattccatctgggggtgttgttccagccacatcagcctacctggtgggatgtgggggtgtctgccaccctgtcccccctctgctgatgtccctcccctcaggctgtccaggtgccacctgacacaggctgctgtgcaaagacaggcggggaagcccaaacctcactcccagggaggccctcagccgccagagtccaggttctccagaggctacgatttgaggaggttgagggggaagacaggagggaaagaaaagtcctacaactgtcaggaatggggcacctttccctgtccctaagcaaagctccctcttcccactgccctccccagccccagctccctgtcctccccaacacctagtgagaaagacggtgcgtggaagggagtcccatgggcagatgcttacacgacctctttgtgaagcctcttctgggtttaacttcattcatcaatttattcttatgtcaaagcaatgaaacttttctttctggagccagataccaatacaacaggtgaacgggtttctgccacatctctacattgacgggggatgcttgaacaacccccctcactacacagacacacaccgttaaggcacaagggctggggttgagctctagatgagggactttcctgctcctgcaagggtgagcactgtatacacagacaaggagggtgcagtagagtgactcccttggatggaagtagtaccatcagaacctactattattatgacataaattctatttacatacattgagagaatactacaatcaacactttttcctgggatgactttaagaggtttgagccacagcacctgaagtggcaaagatccatggtctttgtagggtattagagaactcttccagtcacctctgaaagcactctagatcttgcagctgagtggatgaagtgtaacaaatctgttgcacgctgagaggagtcagaattagcatttttcatgaaagttccccacgtctctactaagaatgaggaagaaaagactaagactaggtaattacacagaggcttgaaatgttacatcaccagagccaagtcctctcccttcagatcagttactggctgctacacagggacacccccaccttttcagggcatcccatgcactccacttctcaggatctaaggaatttgactttgtagggatcccagaaagggcactgtgccacttcccctggtgtgaatcagacatacattgtacattcatttctaaaattcactcatgcacctcaaaccaaggtcattatccaaaaaaaaaaaaaaaaagctctgggtggaagagtttgtaagttttaagagagggtcatttctatgtgaggaaatgcagaaatggacagaatgattcttattcactgtttgggtctggagaattcccattgtggaaatcttagagatctcaagtttattaccaagggaataaggaaaaaaaggtgagcaggcaccaggccaagcagtggctcccttgccaaggaacctgaggctgcaggtttcagggacccccttgaagaaacctctcctggccattggccaggagaaaagagaagtctctcctgtagagtcacaagagaagcaaaagagggtgggtcactgggtcctggacatagcccccaaccccaagacttcccaatatggagaaactacaccaatgtttaaaaggggaaaaggaaagaacttgtacatcaagggaagatgatttgtaaacacacagtcctgtgcagaaagatccccttcaggaggtgtctccagcatcccaaagctgtgcgcaccttctcttttcctgcctcaggccacctatgcatccagctgcagcccatacccacacctgaaatccatctcttgaatcccagccaggttatataccaccccattgccatgtcctgtcctggccagaatgcatgctgttcccccaagcctcgtgggagtgaggccatgggaaacagagatgagcatgtctggacaagtctgtgatggtagtggatgagaataacccatggcaaaacacgcacattcattaagaaatagggcgacagattccccgttggtgaagcactgaaaggtctattactctcataatattgctgttttattttaatccaccagagctaccatgcaaaactttcctcctgtgaaacgctccagataaagctcctctaatctccccttccctcatgtcctccagctcaaacccaccttcatcccccaaaccaatctgtatcatgcctgttatcagagaggcacagaaagatgggcagtgcctccgttgtcaccattccccacacccctacacacccccacaccctcccctccaggctccacgacttcacagtcttactgttgtaaatatcattgtacagtttgtaatcctcaaataatcccattgtcagaggcctcgcctgatgggccttctcaccctcgagaaaggccagggaatctagaaggggcaacccttcaaggagagcttcagggtcatctctgtgtgagacactattgtatattcctgtaagattgcatttttatctaaggaatgatgttatttaaaaaacaaacaaaaaacacaaaaaataagaattgcaaataaatttcttaacaatgtct

SEQ ID NO: 113198 - DNA, 12795 bp, Homo sapiens
  Payload ID: 2138
  Gene Symbol: CACNA1C
  Gene Name: calcium channel, voltage-dependent, L type, alpha 1C subunit
  ENST ID: ENST00000621625
  CDS Start-End: 1-6045
gaacgagtggaatatctctttctcataatttttacggtggaagcgtttttaaaagtaatcgcctatggactcctctttcaccccaatgcctacctccgcaacggctggaacctactagattttataattgtggttgtggggctttttagtgcaattttagaacaagcaaccaaagcagatggggcaaacgctctcggagggaaaggggccggatttgatgtgaaggcgctgagggccttccgcgtgctgcgccccctgcggctggtgtccggagtcccaagtctccaggtggtcctgaattccatcatcaaggccatggtccccctgctgcacatcgccctgcttgtgctgtttgtcatcatcatctacgccatcatcggcttggagctcttcatggggaagatgcacaagacctgctacaaccaggagggcatagcagatgttccagcagaagatgacccttccccttgtgcgctggaaacgggccacgggcggcagtgccagaacggcacggtgtgcaagcccggctgggatggtcccaagcacggcatcaccaactttgacaactttgccttcgccatgctcacggtgttccagtgcatcaccatggagggctggacggacgtgctgtactgggtcaatgatgccgtaggaagggactggccctggatctattttgttacactaatcatcatagggtcattttttgtacttaacttggttctcggtgtgcttagcggagagttttccaaagagagggagaaggccaaggcccggggagatttccagaagctgcgggagaagcagcagctagaagaggatctcaaaggctacctggattggatcactcaggccgaagacatcgatcctgagaatgaggacgaaggcatggatgaggagaagccccgaaacatgagcatgcccaccagtgagaccgagtccgtcaacaccgaaaacgtggctggaggtgacatcgagggagaaaactgcggggccaggctggcccaccggatctccaagtcaaagttcagccgctactggcgccggtggaatcggttctgcagaaggaagtgccgcgccgcagtcaagtctaatgtcttctactggctggtgattttcctggtgttcctcaacacgctcaccattgcctctgagcactacaaccagcccaactggctcacagaagtccaagacacggcaaacaaggccctgctggccctgttcacggcagagatgctcctgaagatgtacagcctgggcctgcaggcctacttcgtgtccctcttcaaccgctttgactgcttcgtcgtgtgtggcggcatcctggagaccatcctggtggagaccaagatcatgtccccactgggcatctccgtgctcagatgcgtccggctgctgaggattttcaagatcacgaggtactggaactccttgagcaacctggtggcatccttgctgaactctgtgcgctccatcgcctccctgctccttctcctcttcctcttcatcatcatcttctccctcctggggatgcagctctttggaggaaagttcaactttgatgagatgcagacccggaggagcacattcgataacttcccccagtccctcctcactgtgtttcagatcctgaccggggaggactggaattcggtgatgtatgatgggatcatggcttatggcggcccctcttttccagggatgttagtctgtatttacttcatcatcctcttcatctgtggaaactatatcctactgaatgtgttcttggccattgctgtggacaacctggctgatgctgagagcctcacatctgcccaaaaggaggaggaagaggagaaggagagaaagaagctggccaggactgccagcccagagaagaaacaagagttggtggagaagccggcagtgggggaatccaaggaggagaagattgagctgaaatccatcacggctgacggagagtctccacccgccaccaagatcaacatggatgacctccagcccaatgaaaatgaggataagagcccctaccccaacccagaaactacaggagaagaggatgaggaggagccagagatgcctgtcggccctcgcccacgaccactctctgagcttcaccttaaggaaaaggcagtgcccatgccagaagccagcgcgtttttcatcttcagctctaacaacaggtttcgcctccagtgccaccgcattgtcaatgacacgatcttcaccaacctgatcctcttcttcattctgctcagcagcatttccctggctgctgaggacccggtccagcacacctccttcaggaaccatatcctaggcaatgcagactatgtcttcactagtatctttacattagaaattatccttaagatgactgcttatggggctttcttgcacaagggttctttctgccggaactacttcaacatcctggacctgctggtggtcagcgtgtccctcatctcctttggcatccagtccagtgcaatcaatgtcgtgaagatcttgcgagtcctgcgagtactcaggcccctgagggccatcaacagggccaaggggctaaagcatgtggttcagtgtgtgtttgtcgccatccggaccatcgggaacatcgtgattgtcaccaccctgctgcagttcatgtttgcctgcatcggggtccagctcttcaagggaaagctgtacacctgttcagacagttccaagcagacagaggcggaatgcaagggcaactacatcacgtacaaagacggggaggttgaccaccccatcatccaaccccgcagctgggagaacagcaagtttgactttgacaatgttctggcagccatgatggccctcttcaccgtctccaccttcgaagggtggccagagctgctgtaccgctccatcgactcccacacggaagacaagggccccatctacaactaccgtgtggagatctccatcttcttcatcatctacatcatcatcatcgccttcttcatgatgaacatcttcgtgggcttcgtcatcgtcacctttcaggagcagggggagcaggagtacaagaactgtgagctggacaagaaccagcgacagtgcgtggaatacgccctcaaggcccggcccctgcggaggtacatccccaagaaccagcaccagtacaaagtgtggtacgtggtcaactccacctacttcgagtacctgatgttcgtcctcatcctgctcaacaccatctgcctggccatgcagcactacggccagagctgcctgttcaaaatcgccatgaacatcctcaacatgctcttcactggcctcttcaccgtggagatgatcctgaagctcattgccttcaaacccaagcactatttctgtgatgcatggaatacatttgacgccttgattgttgtgggtagcattgttgatatagcaatcaccgaggtaaacccagctgaacatacccaatgctctccctctatgaacgcagaggaaaactcccgcatctccatcaccttcttccgcctgttccgggtcatgcgtctggtgaagctgctgagccgtggggagggcatccggacgctgctgtggaccttcatcaagtccttccaggccctgccctatgtggccctcctgatcgtgatgctgttcttcatctacgcggtgatcgggatgcaggtgtttgggaaaattgccctgaatgataccacagagatcaaccggaacaacaactttcagaccttcccccaggccgtgctgctcctcttcaggtgtgccaccggggaggcctggcaggacatcatgctggcctgcatgccaggcaagaagtgtgccccagagtccgagcccagcaacagcacggagggtgaaacaccctgtggtagcagctttgctgtcttctacttcatcagcttctacatgctctgtgccttcctgatcatcaacctctttgtagctgtcatcatggacaactttgactacctgacaagggactggtccatccttggtccccaccacctggatgagtttaaaagaatctgggcagagtatgaccctgaagccaagggtcgtatcaaacacctggatgtggtgaccctcctccggcggattcagccgccactaggttttgggaagctgtgccctcaccgcgtggcttgcaaacgcctggtctccatgaacatgcctctgaacagcgacgggacagtcatgttcaatgccaccctgtttgccctggtcaggacggccctgaggatcaaaacagaagggaacctagaacaagccaatgaggagctgcgggcgatcatcaagaagatctggaagcggaccagcatgaagctgctggaccaggtggtgccccctgcaggtgatgatgaggtcaccgttggcaagttctacgccacgttcctgatccaggagtacttccggaagttcaagaagcgcaaagagcagggccttgtgggcaagccctcccagaggaacgcgctgtctctgcaggctggcttgcgcacactgcatgacatcgggcctgagatccgacgggccatctctggagatctcaccgctgaggaggagctggacaaggccatgaaggaggctgtgtccgctgcttctgaagatgacatcttcaggagggccggtggcctgttcggcaaccacgtcagctactaccaaagcgacggccggagcgccttcccccagaccttcaccactcagcgcccgctgcacatcaacaaggcgggcagcagccagggcgacactgagtcgccatcccacgagaagctggtggactccaccttcaccccgagcagctactcgtccaccggctccaacgccaacatcaacaacgccaacaacaccgccctgggtcgcctccctcgccccgccggctaccccagcacggtcagcactgtggagggccacgggccccccttgtcccctgccatccgggtgcaggaggtggcgtggaagctcagctccaacagggaaaggcacgttccgatgtgtgaggatctggagctcaggagggattcaggctcagcagggactcaggctcactgccttctgctcaggagagcaaacccctctaggtgccactcccgggagagccaggcagccatggcgggtcaggaggagacgtctcaggatgagacctatgaagtgaagatgaaccatgacacggaggcctgcagtgagcccagcctgctctccacagagatgctctcctaccaggatgacgaaaatcggcaactgacgctcccagaggaggacaagagggacatccggcaatctccgaagaggggtttcctccgctctgcctcactaggtcgaagggcctccttccacctggaatgtctgaagcgacagaaggaccgagggggagacatctctcagaagacagtcctgcccttgcatctggttcatcatcaggcattggcagtggcaggcctgagccccctcctccagagaagccattcccctgcctcattccctaggccttttgccaccccaccagccacacctggcagccgaggctggcccccacagcccgtccccaccctgcggcttgagggggtcgagtccagtgagaaactcaacagcagcttcccatccatccactgcggctcctgggctgagaccacccccggtggcgggggcagcagcgccgcccggagagtccggcccgtctccctcatggtgcccagccaggctggggccccagggaggcagttccacggcagtgccagcagcctggtggaagcggtcttgatttcagaaggactggggcagtttgctcaagatcccaagttcatcgaggtcaccacccaggagctggccgacgcctgcgacatgaccatagaggagatggagagcgcggccgacaacatcctcagcgggggcgccccacagagccccaatggcgccctcttaccctttgtgaactgcagggacgcggggcaggaccgagccgggggcgaagaggacgcgggctgtgtgcgcgcgcggggtcgaccgagtgaggaggagctccaggacagcagggtctacgtcagcagcctgtagtgggcgctgccagatgcgggcttttttttatttgtttcaatgttcctaatgggttcgtttcagaagtgcctcactgttctcgtgacctggagttaaccggaacagcgtcttcattcatttctgttgggaccagacgcggagcctgggtgcgcgagccgccctccgggaggaaggcgcccggctgcgtctgcagaggcggggagaggaggcggcgagggtcccggggcgcgaggaaggcgcctgccctctcccagctcgcaggccccgggcccggccgcgcctccgcggggagagcaccccggcttcccgcgcgccctcaccaaaaggaccctacagcaaacgggtgtctttcgactctgcttgtagaaaccatttgcacatattctgtacgagcctcgctgtctccctagagccagggccctgcggatttggagaagggagcggggcaggacttccaggaggaccccaacccggcccggagagggaggaggaggcctccaggggcgcggagctctggggatgggcgtcgggccggcagtggtgcggctcactccgtccctgcccacctgcgacgggatcccccgaccggcacgggccacgccgagctcccggccagccgccggcccgcaggcagcgcgagggaggagctgcgccgccggctccgcccaaccaggtggtgctgagcttccgctgagcgctcttttgttttgtggtttgacacttttcttgacagcatgttgcagtttcttttcggttttggttttttttaaatgttttattttgctttcccagcgggaggggaggaagaagagtgtttacaaagtcctgtagccccctcacctttctgttttcacttttgccaatgtacatcgggtttggttttcttgtattatttaaacggttgtggtttcctttttccacggaggttcaatagaagccgctgcaggagagttttaccaaccattgtgtatgcccaataatttgttatcatttccttaggtagtaacctatttttgttctggtttggttcggttatctaatggaaaggtaactggcaatgcacttgatgtggtcttgcacatgtgggtgatagagttgggttcctttttatgctgggtgtacaggtgggtttgggagagaggagcatgcgcgagagagtctccgagtgtgtgcgacgcgtgtgtgtgtggtgggttgtctgtgtgcatatgtcctgcccgtgtatatgcacccacaccatgtgcccgtgcacaccagtgactacgcagtcccccctttctggtttagctgtgggaagatctgaatctggggccgtttgaaagcaaaaacaaaccactgtctctgcttctgaaacgggaatcagtaactctttgcattttctgtcccacaagatatgcaaaaacaatgcaataatattcatttaaaaatacaattgtgagttgtgttggcattaaaactgtattttaaaaaaagacagaaatttaagggaaaaacacaagaaggcattttgcttcaatatattccgtgtaatgttttattgcattgataatgtttctgttgaagaaaccgttatacttgaattcaggtcagtttcagtatttttcaaatatttttttaaaactgaattgcaattgtgccaagcgaatataatgaattgaattaagttggttttcggattcacttcttgtatattttgctgcatgtaaagtaaatcattttgtatttggagtgtgacaagctttacctttgaactcaagtgcttttctatatgtggttgggggaaagggaacaagttttctttagtttgcacaatgagcaaaggtatcaccagtgtagtcattattctgctctccacaaacaggtttggacattactgttttgcatatcttgtgtttgcttacatttccctcaatttttccaaaatcgtttgctgggtatgtttgtaccgcctcttgctgtgagagaccaggacctattttattccagtcttcactctgtccactctgctctggtcatctgatttggtacttctccaagaacagcccttcactgtgaggtgcagggaggcgttctgatgagccctcagtcactgggccgtcatccgcatcccccatggaagaggtagctggctttcccttcccttccaccacacggaattttctctttggcttccttaggaaagtgtacactaaccgggaggataaaattaaagtcaggctgcttggagggaggggcatcctcacttccggattcttgttgctctacccaacaaggacagcaggggctcgagaaaggaactggtgaaaccctgatccatctgaaagtcaactctgcgtgctcctttctccatcccttcctcactctggagcagcctttccttcaggcttgccctaatgtttgggctgccggggagggggccaggacaagggaagaggcatccggagctcacagtgggggtgggaacagatttttgtgggggcatctctaatgctcacttatatctccctagaacatcactcttttggtgctgtgtccttcaaatgtatgtcaacagtggtggctgaaaagggactgctttggggaaaacaggacccaaccattcacccagaattgacccattaaatctcttccagtcctagtgttccctgagcccctcttggcacatatataagtaagctagaaattacaataagggacagtccattcctctatgacagcttgctggactgattcatgacaaagtggagaaatgtactcaatactccccggttaacacagtctagaaacagagtttctttatggatatccacacccaagtcatccaaactttcttgattccttttcactgccatcaaggtcctctagaaattgagtttaggtatcatcctttgaaaagttcccaagatttctaccaggaggtacacacaggcgttccctgtctagggcaggaggactatcctagcttgaccttctgatccactagaataagactggcgtatgatgcctgtcatcagaacagactggcacaagtagtgacatcaatgaaccacagcacaatcttccaagtgatgtctactctccacctaaaatggaattttccccatgaccttgtaaaacataattgtcacatcttccatacccctcctgacagcccccaagtgtcaggagaaaacagtcaggggctaagggcccaagggacttgaagaaacaacagtttaaggtctgcagtttggtcaacttaattcttgtcctccgaccagccctgcctctttcatttccagaccttggagaatttttcccagctttgattcagaaggtactagttataacccctttccttcttcttaatccaataggcctcactctcactgggaaatccactcaaaggaacaaggcaatgtctctcattctatttcccagttccaaattccaggtgcttgtctggagtgaagctacccgttactttctcccagcttttctccacccagcatgtctcctgcccatgcagctgaagacagtggggcaacctcaggagaagcagacctttccatgcccaagttcatctcctgagcaacagtgacacctagaaaatgaggactttggaagtcacccaaaagatggtggctactttatggagtcctgaagatacacagccaccactcctaaaggcaaagaaagaaaacacgaatgtaggtcagggatagagtggaaccctggtcatcggggtttttagcctcatcgtgggaaaggtggtaaaggaggatgatggcatctccatccctagaggccaagaattgaaatatcattgtcaaggattagaaacaattcagcaaagaggccacaaaaagggcctgctgactcccagaagacctctttaaaccccaggggaggcaaatacttgctgatggagtctgggccgtttccatattttaaagaagacctgcctctggggcaaatgtcagcacagagaggactgggaggagaatggaggcaagaaaagggcatattttgactccctctgtgcctcttcccagttcatggaaggatgtgttcagcttacccacccacagtgaccagtgtggtggagccgctgacatctcaaggatctatttgggaaggtgagaagagtactcattccatctgggggtgttgttccagccacatcagcctacctggtgggatgtgggggtgtctgccaccctgtcccccctctgctgatgtccctcccctcaggctgtccaggtgccacctgacacaggctgctgtgcaaagacaggcggggaagcccaaacctcactcccagggaggccctcagccgccagagtccaggttctccagaggctacgatttgaggaggttgagggggaagacaggagggaaagaaaagtcctacaactgtcaggaatggggcacctttccctgtccctaagcaaagctccctcttcccactgccctccccagccccagctccctgtcctccccaacacctagtgagaaagacggtgcgtggaagggagtcccatgggcagatgcttacacgacctctttgtgaagcctcttctgggtttaacttcattcatcaatttattcttatgtcaaagcaatgaaacttttctttctggagccagataccaatacaacaggtgaacgggtttctgccacatctctacattgacgggggatgcttgaacaacccccctcactacacagacacacaccgttaaggcacaagggctggggttgagctctagatgagggactttcctgctcctgcaagggtgagcactgtatacacagacaaggagggtgcagtagagtgactcccttggatggaagtagtaccatcagaacctactattattatgacataaattctatttacatacattgagagaatactacaatcaacactttttcctgggatgactttaagaggtttgagccacagcacctgaagtggcaaagatccatggtctttgtagggtattagagaactcttccagtcacctctgaaagcactctagatcttgcagctgagtggatgaagtgtaacaaatctgttgcacgctgagaggagtcagaattagcatttttcatgaaagttccccacgtctctactaagaatgaggaagaaaagactaagactaggtaattacacagaggcttgaaatgttacatcaccagagccaagtcctctcccttcagatcagttactggctgctacacagggacacccccaccttttcagggcatcccatgcactccacttctcaggatctaaggaatttgactttgtagggatcccagaaagggcactgtgccacttcccctggtgtgaatcagacatacattgtacattcatttctaaaattcactcatgcacctcaaaccaaggtcattatccaaaaaaaaaaaaaaaaagctctgggtggaagagtttgtaagttttaagagagggtcatttctatgtgaggaaatgcagaaatggacagaatgattcttattcactgtttgggtctggagaattcccattgtggaaatcttagagatctcaagtttattaccaagggaataaggaaaaaaaggtgagcaggcaccaggccaagcagtggctcccttgccaaggaacctgaggctgcaggtttcagggacccccttgaagaaacctctcctggccattggccaggagaaaagagaagtctctcctgtagagtcacaagagaagcaaaagagggtgggtcactgggtcctggacatagcccccaaccccaagacttcccaatatggagaaactacaccaatgtttaaaaggggaaaaggaaagaacttgtacatcaagggaagatgatttgtaaacacacagtcctgtgcagaaagatccccttcaggaggtgtctccagcatcccaaagctgtgcgcaccttctcttttcctgcctcaggccacctatgcatccagctgcagcccatacccacacctgaaatccatctcttgaatcccagccaggttatataccaccccattgccatgtcctgtcctggccagaatgcatgctgttcccccaagcctcgtgggagtgaggccatgggaaacagagatgagcatgtctggacaagtctgtgatggtagtggatgagaataacccatggcaaaacacgcacattcattaagaaatagggcgacagattccccgttggtgaagcactgaaaggtctattactctcataatattgctgttttattttaatccaccagagctaccatgcaaaactttcctcctgtgaaacgctccagataaagctcctctaatctccccttccctcatgtcctccagctcaaacccaccttcatcccccaaaccaatctgtatcatgcctgttatcagagaggcacagaaagatgggcagtgcctccgttgtcaccattccccacacccctacacacccccacaccctcccctccaggctccacgacttcacagtcttactgttgtaaatatcattgtacagtttgtaatcctcaaataatcccattgtcagaggcctcgcctgatgggccttctcaccctcgagaaaggccagggaatctagaaggggcaacccttcaaggagagcttcagggtcatctctgtgtgagacactattgtatattcctgtaagattgcatttttatctaaggaatgatgttatttaaaaaacaaacaaaaaacacaaaaaataagaattgcaaataaatttcttaacaatgtct

SEQ ID NO: 113199 - DNA, 7636 bp, Homo sapiens
  Payload ID: 2139
  Gene Symbol: CACNA1D
  Gene Name: calcium channel, voltage-dependent, L type, alpha 1D subunit
  Uniprot ID: Q01668
  ENST ID: ENST00000350061
  CDS Start-End: 512-6997
gggcgagcgcctccgtccccggatgtgagctccggctgcccgcggtcccgagccagcggcggcgcgggcggcggcggcgggcaccgggcaccgcggcgggcgggcagacgggcgggcatggggggagcgccgagcggccccggcggccgggccggcatcaccgcggcgtctctccgctagaggaggggacaagccagttctcctttgcagcaaaaaattacatgtatatattattaagataatatatacattggattttatttttttaaaaagtttattttgctccatttttgaaaaagagagagcttgggtggcgagcggttttttttttaaatcaattatccttattttctgttatttgtccccgtccctccccacccccctgctgaagcgagaataagggcagggaccgcggctcctacctcttggtgatccccttccccattccgcccccgcctcaacgcccagcacagtgccctgcacacagtagtcgctcaataaatgttcgtggatgatgatgatgatgatgatgaaaaaaatgcagcatcaacggcagcagcaagcggaccacgcgaacgaggcaaactatgcaagaggcaccagacttcctctttctggtgaaggaccaacttctcagccgaatagctccaagcaaactgtcctgtcttggcaagctgcaatcgatgctgctagacaggccaaggctgcccaaactatgagcacctctgcacccccacctgtaggatctctctcccaaagaaaacgtcagcaatacgccaagagcaaaaaacagggtaactcgtccaacagccgacctgcccgcgcccttttctgtttatcactcaataaccccatccgaagagcctgcattagtatagtggaatggaaaccatttgacatatttatattattggctatttttgccaattgtgtggccttagctatttacatcccattccctgaagatgattctaattcaacaaatcataacttggaaaaagtagaatatgccttcctgattatttttacagtcgagacatttttgaagattatagcgtatggattattgctacatcctaatgcttatgttaggaatggatggaatttactggattttgttatagtaatagtaggattgtttagtgtaattttggaacaattaaccaaagaaacagaaggcgggaaccactcaagcggcaaatctggaggctttgatgtcaaagccctccgtgcctttcgagtgttgcgaccacttcgactagtgtcaggagtgcccagtttacaagttgtcctgaactccattataaaagccatggttcccctccttcacatagcccttttggtattatttgtaatcataatctatgctattataggattggaactttttattggaaaaatgcacaaaacatgtttttttgctgactcagatatcgtagctgaagaggacccagctccatgtgcgttctcagggaatggacgccagtgtactgccaatggcacggaatgtaggagtggctgggttggcccgaacggaggcatcaccaactttgataactttgcctttgccatgcttactgtgtttcagtgcatcaccatggagggctggacagatgtgctctactggatgaatgatgctatgggatttgaattgccctgggtgtattttgtcagtctcgtcatctttgggtcatttttcgtactaaatcttgtacttggtgtattgagcggagaattctcaaaggaaagagagaaggcaaaagcacggggagatttccagaagctccgggagaagcagcagctggaggaggatctaaagggctacttggattggatcacccaagctgaggacatcgatccggagaatgaggaagaaggaggagaggaaggcaaacgaaatactagcatgcccaccagcgagactgagtctgtgaacacagagaacgtcagcggtgaaggcgagaaccgaggctgctgtggaagtctctgtcaagccatctcaaaatccaaactcagccgacgctggcgtcgctggaaccgattcaatcgcagaagatgtagggccgccgtgaagtctgtcacgttttactggctggttatcgtcctggtgtttctgaacaccttaaccatttcctctgagcactacaatcagccagattggttgacacagattcaagatattgccaacaaagtcctcttggctctgttcacctgcgagatgctggtaaaaatgtacagcttgggcctccaagcatatttcgtctctcttttcaaccggtttgattgcttcgtggtgtgtggtggaatcactgagacgatcttggtggaactggaaatcatgtctcccctggggatctctgtgtttcggtgtgtgcgcctcttaagaatcttcaaagtgaccaggcactggacttccctgagcaacttagtggcatccttattaaactccatgaagtccatcgcttcgctgttgcttctgctttttctcttcattatcatcttttccttgcttgggatgcagctgtttggcggcaagtttaattttgatgaaacgcaaaccaagcggagcacctttgacaatttccctcaagcacttctcacagtgttccagatcctgacaggcgaagactggaatgctgtgatgtacgatggcatcatggcttacgggggcccatcctcttcaggaatgatcgtctgcatctacttcatcatcctcttcatttgtggtaactatattctactgaatgtcttcttggccatcgctgtagacaatttggctgatgctgaaagtctgaacactgctcagaaagaagaagcggaagaaaaggagaggaaaaagattgccagaaaagagagcctagaaaataaaaagaacaacaaaccagaagtcaaccagatagccaacagtgacaacaaggttacaattgatgactatagagaagaggatgaagacaaggacccctatccgccttgcgatgtgccagtaggggaagaggaagaggaagaggaggaggatgaacctgaggttcctgccggaccccgtcctcgaaggatctcggagttgaacatgaaggaaaaaattgcccccatccctgaagggagcgctttcttcattcttagcaagaccaacccgatccgcgtaggctgccacaagctcatcaaccaccacatcttcaccaacctcatccttgtcttcatcatgctgagcagcgctgccctggccgcagaggaccccatccgcagccactccttccggaacacgatactgggttactttgactatgccttcacagccatctttactgttgagatcctgttgaagatgacaacttttggagctttcctccacaaaggggccttctgcaggaactacttcaatttgctggatatgctggtggttggggtgtctctggtgtcatttgggattcaatccagtgccatctccgttgtgaagattctgagggtcttaagggtcctgcgtcccctcagggccatcaacagagcaaaaggacttaagcacgtggtccagtgcgtcttcgtggccatccggaccatcggcaacatcatgatcgtcaccaccctcctgcagttcatgtttgcctgtatcggggtccagttgttcaaggggaagttctatcgctgtacggatgaagccaaaagtaaccctgaagaatgcaggggacttttcatcctctacaaggatggggatgttgacagtcctgtggtccgtgaacggatctggcaaaacagtgatttcaacttcgacaacgtcctctctgctatgatggcgctcttcacagtctccacgtttgagggctggcctgcgttgctgtataaagccatcgactcgaatggagagaacatcggcccaatctacaaccaccgcgtggagatctccatcttcttcatcatctacatcatcattgtagctttcttcatgatgaacatctttgtgggctttgtcatcgttacatttcaggaacaaggagaaaaagagtataagaactgtgagctggacaaaaatcagcgtcagtgtgttgaatacgccttgaaagcacgtcccttgcggagatacatccccaaaaacccctaccagtacaagttctggtacgtggtgaactcttcgcctttcgaatacatgatgtttgtcctcatcatgctcaacacactctgcttggccatgcagcactacgagcagtccaagatgttcaatgatgccatggacattctgaacatggtcttcaccggggtgttcaccgtcgagatggttttgaaagtcatcgcatttaagcctaaggggtattttagtgacgcctggaacacgtttgactccctcatcgtaatcggcagcattatagacgtggccctcagcgaagcagacccaactgaaagtgaaaatgtccctgtcccaactgctacacctgggaactctgaagagagcaatagaatctccatcacctttttccgtcttttccgagtgatgcgattggtgaagcttctcagcaggggggaaggcatccggacattgctgtggacttttattaagtcctttcaggcgctcccgtatgtggccctcctcatagccatgctgttcttcatctatgcggtcattggcatgcagatgtttgggaaagttgccatgagagataacaaccagatcaataggaacaataacttccagacgtttccccaggcggtgctgctgctcttcaggtgtgcaacaggtgaggcctggcaggagatcatgctggcctgtctcccagggaagctctgtgaccctgagtcagattacaaccccggggaggagtatacatgtgggagcaactttgccattgtctatttcatcagtttttacatgctctgtgcatttctgatcatcaatctgtttgtggctgtcatcatggataatttcgactatctgacccgggactggtctattttggggcctcaccatttagatgaattcaaaagaatatggtcagaatatgaccctgaggcaaagggaaggataaaacaccttgatgtggtcactctgcttcgacgcatccagcctcccctggggtttgggaagttatgtccacacagggtagcgtgcaagagattagttgccatgaacatgcctctcaacagtgacgggacagtcatgtttaatgcaaccctgtttgctttggttcgaacggctcttaagatcaagaccgaagggaacctggagcaagctaatgaagaacttcgggctgtgataaagaaaatttggaagaaaaccagcatgaaattacttgaccaagttgtccctccagctggtgatgatgaggtaaccgtggggaagttctatgccactttcctgatacaggactactttaggaaattcaagaaacggaaagaacaaggactggtgggaaagtaccctgcgaagaacaccacaattgccctacaggcgggattaaggacactgcatgacattgggccagaaatccggcgtgctatatcgtgtgatttgcaagatgacgagcctgaggaaacaaaacgagaagaagaagatgatgtgttcaaaagaaatggtgccctgcttggaaaccatgtcaatcatgttaatagtgataggagagattcccttcagcagaccaataccacccaccgtcccctgcatgtccaaaggccttcaattccacctgcaagtgatactgagaaaccgctgtttcctccagcaggaaattcggtgtgtcataaccatcataaccataattccataggaaagcaagttcccacctcaacaaatgccaatctcaataatgccaatatgtccaaagctgcccatggaaagcggcccagcattgggaaccttgagcatgtgtctgaaaatgggcatcattcttcccacaagcatgaccgggagcctcagagaaggtccagtgtgaaaagaacccgctattatgaaacttacattaggtccgactcaggagatgaacagctcccaactatttgccgggaagacccagagatacatggctatttcagggacccccactgcttgggggagcaggagtatttcagtagtgaggaatgctacgaggatgacagctcgcccacctggagcaggcaaaactatggctactacagcagatacccaggcagaaacatcgactctgagaggccccgaggctaccatcatccccaaggattcttggaggacgatgactcgcccgtttgctatgattcacggagatctccaaggagacgcctactacctcccaccccagcatcccaccggagatcctccttcaactttgagtgcctgcgccggcagagcagccaggaagaggtcccgtcgtctcccatcttcccccatcgcacggccctgcctctgcatctaatgcagcaacagatcatggcagttgccggcctagattcaagtaaagcccagaagtactcaccgagtcactcgacccggtcgtgggccacccctccagcaacccctccctaccgggactggacaccgtgctacacccccctgatccaagtggagcagtcagaggccctggaccaggtgaacggcagcctgccgtccctgcaccgcagctcctggtacacagacgagcccgacatctcctaccggactttcacaccagccagcctgactgtccccagcagcttccggaacaaaaacagcgacaagcagaggagtgcggacagcttggtggaggcagtcctgatatccgaaggcttgggacgctatgcaagggacccaaaatttgtgtcagcaacaaaacacgaaatcgctgatgcctgtgacctcaccatcgacgagatggagagtgcagccagcaccctgcttaatgggaacgtgcgtccccgagccaacggggatgtgggccccctctcacaccggcaggactatgagctacaggactttggtcctggctacagcgacgaagagccagaccctgggagggatgaggaggacctggcggatgaaatgatatgcatcaccaccttgtagcccccagcgaggggcagactggctctggcctcaggtggggcgcaggagagccaggggaaaagtgcctcatagttaggaaagtttaggcactagttgggagtaatattcaattaattagacttttgtataagagatgtcatgcctcaagaaagccataaacctggtaggaacaggtcccaagcggttgagcctggcagagtaccatgcgctcggccccagctgcaggaaacagcaggccccgccctctcacagaggatgggtgaggaggccagacctgccctgccccattgtccagatgggcactgctgtggagtctgcttctcccatgtaccagggcaccaggcccacccaactgaaggcatggcggcggggtgcaggggaaagttaaaggtgatgacgatcatcacacctgtgtcgttacctcagccatcggtctagcatatcagtcactgggcccaacatatccatttttaaaccctttcccccaaatacactgcgtcctggttcctgtttagctgttctgaaatacggtgtgtaagtaagtcagaacccagctaccagtgattattgcgagggcaatgggacctcataaataaggttttctgtgatgtgacgccagtttacataagagaatatcac

SEQ ID NO: 113200 - DNA, 8991 bp, Homo sapiens
  Payload ID: 2139
  Gene Symbol: CACNA1D
  Gene Name: calcium channel, voltage-dependent, L type, alpha 1D subunit
  Uniprot ID: Q01668
  ENST ID: ENST00000288139
  CDS Start-End: 119-6664
agaataagggcagggaccgcggctcctacctcttggtgatccccttccccattccgcccccgcctcaacgcccagcacagtgccctgcacacagtagtcgctcaataaatgttcgtggatgatgatgatgatgatgatgaaaaaaatgcagcatcaacggcagcagcaagcggaccacgcgaacgaggcaaactatgcaagaggcaccagacttcctctttctggtgaaggaccaacttctcagccgaatagctccaagcaaactgtcctgtcttggcaagctgcaatcgatgctgctagacaggccaaggctgcccaaactatgagcacctctgcacccccacctgtaggatctctctcccaaagaaaacgtcagcaatacgccaagagcaaaaaacagggtaactcgtccaacagccgacctgcccgcgcccttttctgtttatcactcaataaccccatccgaagagcctgcattagtatagtggaatggaaaccatttgacatatttatattattggctatttttgccaattgtgtggccttagctatttacatcccattccctgaagatgattctaattcaacaaatcataacttggaaaaagtagaatatgccttcctgattatttttacagtcgagacatttttgaagattatagcgtatggattattgctacatcctaatgcttatgttaggaatggatggaatttactggattttgttatagtaatagtaggattgtttagtgtaattttggaacaattaaccaaagaaacagaaggcgggaaccactcaagcggcaaatctggaggctttgatgtcaaagccctccgtgcctttcgagtgttgcgaccacttcgactagtgtcaggagtgcccagtttacaagttgtcctgaactccattataaaagccatggttcccctccttcacatagcccttttggtattatttgtaatcataatctatgctattataggattggaactttttattggaaaaatgcacaaaacatgtttttttgctgactcagatatcgtagctgaagaggacccagctccatgtgcgttctcagggaatggacgccagtgtactgccaatggcacggaatgtaggagtggctgggttggcccgaacggaggcatcaccaactttgataactttgcctttgccatgcttactgtgtttcagtgcatcaccatggagggctggacagatgtgctctactgggtaaatgatgcgataggatgggaatggccatgggtgtattttgttagtctgatcatccttggctcatttttcgtccttaacctggttcttggtgtccttagtggagaattctcaaaggaaagagagaaggcaaaagcacggggagatttccagaagctccgggagaagcagcagctggaggaggatctaaagggctacttggattggatcacccaagctgaggacatcgatccggagaatgaggaagaaggaggagaggaaggcaaacgaaatactagcatgcccaccagcgagactgagtctgtgaacacagagaacgtcagcggtgaaggcgagaaccgaggctgctgtggaagtctctggtgctggtggagacggagaggcgcggccaaggcggggccctctgggtgtcggcggtggggtcaagccatctcaaaatccaaactcagccgacgctggcgtcgctggaaccgattcaatcgcagaagatgtagggccgccgtgaagtctgtcacgttttactggctggttatcgtcctggtgtttctgaacaccttaaccatttcctctgagcactacaatcagccagattggttgacacagattcaagatattgccaacaaagtcctcttggctctgttcacctgcgagatgctggtaaaaatgtacagcttgggcctccaagcatatttcgtctctcttttcaaccggtttgattgcttcgtggtgtgtggtggaatcactgagacgatcttggtggaactggaaatcatgtctcccctggggatctctgtgtttcggtgtgtgcgcctcttaagaatcttcaaagtgaccaggcactggacttccctgagcaacttagtggcatccttattaaactccatgaagtccatcgcttcgctgttgcttctgctttttctcttcattatcatcttttccttgcttgggatgcagctgtttggcggcaagtttaattttgatgaaacgcaaaccaagcggagcacctttgacaatttccctcaagcacttctcacagtgttccagatcctgacaggcgaagactggaatgctgtgatgtacgatggcatcatggcttacgggggcccatcctcttcaggaatgatcgtctgcatctacttcatcatcctcttcatttgtggtaactatattctactgaatgtcttcttggccatcgctgtagacaatttggctgatgctgaaagtctgaacactgctcagaaagaagaagcggaagaaaaggagaggaaaaagattgccagaaaagagagcctagaaaataaaaagaacaacaaaccagaagtcaaccagatagccaacagtgacaacaaggttacaattgatgactatagagaagaggatgaagacaaggacccctatccgccttgcgatgtgccagtaggggaagaggaagaggaagaggaggaggatgaacctgaggttcctgccggaccccgtcctcgaaggatctcggagttgaacatgaaggaaaaaattgcccccatccctgaagggagcgctttcttcattcttagcaagaccaacccgatccgcgtaggctgccacaagctcatcaaccaccacatcttcaccaacctcatccttgtcttcatcatgctgagcagcgctgccctggccgcagaggaccccatccgcagccactccttccggaacacgatactgggttactttgactatgccttcacagccatctttactgttgagatcctgttgaagatgacaacttttggagctttcctccacaaaggggccttctgcaggaactacttcaatttgctggatatgctggtggttggggtgtctctggtgtcatttgggattcaatccagtgccatctccgttgtgaagattctgagggtcttaagggtcctgcgtcccctcagggccatcaacagagcaaaaggacttaagcacgtggtccagtgcgtcttcgtggccatccggaccatcggcaacatcatgatcgtcaccaccctcctgcagttcatgtttgcctgtatcggggtccagttgttcaaggggaagttctatcgctgtacggatgaagccaaaagtaaccctgaagaatgcaggggacttttcatcctctacaaggatggggatgttgacagtcctgtggtccgtgaacggatctggcaaaacagtgatttcaacttcgacaacgtcctctctgctatgatggcgctcttcacagtctccacgtttgagggctggcctgcgttgctgtataaagccatcgactcgaatggagagaacatcggcccaatctacaaccaccgcgtggagatctccatcttcttcatcatctacatcatcattgtagctttcttcatgatgaacatctttgtgggctttgtcatcgttacatttcaggaacaaggagaaaaagagtataagaactgtgagctggacaaaaatcagcgtcagtgtgttgaatacgccttgaaagcacgtcccttgcggagatacatccccaaaaacccctaccagtacaagttctggtacgtggtgaactcttcgcctttcgaatacatgatgtttgtcctcatcatgctcaacacactctgcttggccatgcagcactacgagcagtccaagatgttcaatgatgccatggacattctgaacatggtcttcaccggggtgttcaccgtcgagatggttttgaaagtcatcgcatttaagcctaaggggtattttagtgacgcctggaacacgtttgactccctcatcgtaatcggcagcattatagacgtggccctcagcgaagcagacccaactgaaagtgaaaatgtccctgtcccaactgctacacctgggaactctgaagagagcaatagaatctccatcacctttttccgtcttttccgagtgatgcgattggtgaagcttctcagcaggggggaaggcatccggacattgctgtggacttttattaagtcctttcaggcgctcccgtatgtggccctcctcatagccatgctgttcttcatctatgcggtcattggcatgcagatgtttgggaaagttgccatgagagataacaaccagatcaataggaacaataacttccagacgtttccccaggcggtgctgctgctcttcaggtgtgcaacaggtgaggcctggcaggagatcatgctggcctgtctcccagggaagctctgtgaccctgagtcagattacaaccccggggaggagtatacatgtgggagcaactttgccattgtctatttcatcagtttttacatgctctgtgcatttctgatcatcaatctgtttgtggctgtcatcatggataatttcgactatctgacccgggactggtctattttggggcctcaccatttagatgaattcaaaagaatatggtcagaatatgaccctgaggcaaagggaaggataaaacaccttgatgtggtcactctgcttcgacgcatccagcctcccctggggtttgggaagttatgtccacacagggtagcgtgcaagagattagttgccatgaacatgcctctcaacagtgacgggacagtcatgtttaatgcaaccctgtttgctttggttcgaacggctcttaagatcaagaccgaagggaacctggagcaagctaatgaagaacttcgggctgtgataaagaaaatttggaagaaaaccagcatgaaattacttgaccaagttgtccctccagctggtgatgatgaggtaaccgtggggaagttctatgccactttcctgatacaggactactttaggaaattcaagaaacggaaagaacaaggactggtgggaaagtaccctgcgaagaacaccacaattgccctacaggcgggattaaggacactgcatgacattgggccagaaatccggcgtgctatatcgtgtgatttgcaagatgacgagcctgaggaaacaaaacgagaagaagaagatgatgtgttcaaaagaaatggtgccctgcttggaaaccatgtcaatcatgttaatagtgataggagagattcccttcagcagaccaataccacccaccgtcccctgcatgtccaaaggccttcaattccacctgcaagtgatactgagaaaccgctgtttcctccagcaggaaattcggtgtgtcataaccatcataaccataattccataggaaagcaagttcccacctcaacaaatgccaatctcaataatgccaatatgtccaaagctgcccatggaaagcggcccagcattgggaaccttgagcatgtgtctgaaaatgggcatcattcttcccacaagcatgaccgggagcctcagagaaggtccagtgtgaaaagaacccgctattatgaaacttacattaggtccgactcaggagatgaacagctcccaactatttgccgggaagacccagagatacatggctatttcagggacccccactgcttgggggagcaggagtatttcagtagtgaggaatgctacgaggatgacagctcgcccacctggagcaggcaaaactatggctactacagcagatacccaggcagaaacatcgactctgagaggccccgaggctaccatcatccccaaggattcttggaggacgatgactcgcccgtttgctatgattcacggagatctccaaggagacgcctactacctcccaccccagcatcccaccggagatcctccttcaactttgagtgcctgcgccggcagagcagccaggaagaggtcccgtcgtctcccatcttcccccatcgcacggccctgcctctgcatctaatgcagcaacagatcatggcagttgccggcctagattcaagtaaagcccagaagtactcaccgagtcactcgacccggtcgtgggccacccctccagcaacccctccctaccgggactggacaccgtgctacacccccctgatccaagtggagcagtcagaggccctggaccaggtgaacggcagcctgccgtccctgcaccgcagctcctggtacacagacgagcccgacatctcctaccggactttcacaccagccagcctgactgtccccagcagcttccggaacaaaaacagcgacaagcagaggagtgcggacagcttggtggaggcagtcctgatatccgaaggcttgggacgctatgcaagggacccaaaatttgtgtcagcaacaaaacacgaaatcgctgatgcctgtgacctcaccatcgacgagatggagagtgcagccagcaccctgcttaatgggaacgtgcgtccccgagccaacggggatgtgggccccctctcacaccggcaggactatgagctacaggactttggtcctggctacagcgacgaagagccagaccctgggagggatgaggaggacctggcggatgaaatgatatgcatcaccaccttgtagcccccagcgaggggcagactggctctggcctcaggtggggcgcaggagagccaggggaaaagtgcctcatagttaggaaagtttaggcactagttgggagtaatattcaattaattagacttttgtataagagatgtcatgcctcaagaaagccataaacctggtaggaacaggtcccaagcggttgagcctggcagagtaccatgcgctcggccccagctgcaggaaacagcaggccccgccctctcacagaggatgggtgaggaggccagacctgccctgccccattgtccagatgggcactgctgtggagtctgcttctcccatgtaccagggcaccaggcccacccaactgaaggcatggcggcggggtgcaggggaaagttaaaggtgatgacgatcatcacacctgtgtcgttacctcagccatcggtctagcatatcagtcactgggcccaacatatccatttttaaaccctttcccccaaatacactgcgtcctggttcctgtttagctgttctgaaatacggtgtgtaagtaagtcagaacccagctaccagtgattattgcgagggcaatgggacctcataaataaggttttctgtgatgtgacgccagtttacataagagaatatcactccgatggtcggtttctgactgtcacgctaagggcaactgtaaactggaataataatgcactcgcaaccaggtaaacttagatacactagtttgtttaaaattatagatttactgtacatgacttgtaatatactataatttgtatttgtaaagagatggtctatattttgtaattactgtattgtatttgaactgcagcaatatccatgggtcctaataattgtagttccccactaaaatctagaaattattagtatttttactcgggctatccagaagtagaagaaatagagccaattctcatttattcagcgaaaatcctctggggttaaaattttaagtttgaaagaacttgacactacagaaatttttctaaaatattttgagtcactataaacctatcatctttccacaagatataccagatgactatttgcagtcttttctttgggcaagagttccatgattttgatactgtacctttggatccaccatgggttgcaactgtctttggttttgtttgtttgacttgaaccaccctctggtaagtaagtaagtgaattacagagcaggtccagctggctgctctgccccttgggtatccatagttacggttttctctgtggcccacccagggtgttttttgcatcgctggtgcagaaatgcataggtggatgagatatagctgctcttgtcctctggggactggtggtgctgcttaagaaataaggggtgctggggacagaggagcaacgtggtgatctataggattggagtgtcggggtctgtacaaatcgtattgttgccttttacaaaactgctgtactgtatgttctctttgagggcttttatatgcaattgaatgagggctgaagttttcattagaatgcactcacactctgactgtacgtcctgatgaaaacccacttttggataattagaaccgtcaaggcttcattttctgtcaacagaattaggccgactgtcaggttaccttggcagggattccctgcaatcaaaaagatagatgataggtagcaattttggtccaaaatttttaatagtatacagacaacctgttaatttttttttttttttttttttttgtaaataacaaacaccactttgttatgaagaccttacaaacctcttcttaagacattcttactctgatccaggcaaaaacacttcaaggtttgtaaatgactctttcctgacataaatccttttttattaaaatgcaaaatgttcttcagaataaaactgtgtaataatttttatacttgggagtgctccttgcacagagctgtcatttgccagtgagagcctccgacagggcaggtactgtgccagggcagctctgaaattatggatattcttatcctcctggttccttcggtgccaatggtaacctaataccagccgcagggagcgccatttctcctaaagggctacaccactgtcaacattatcctggactctgtgtctctctctgttgggtcttgtggcatcacatcaggccaaaattgccagaccaggaccctaagtgtctgatagaggcgatgatcttttccaaagtcagtacttacaaactggcattcttacaggctgcaccatttcctagtatgtctgctttaagcctggttcaacctctcatcgaatattaaatttttctttgtaagaaaaa

SEQ ID NO: 113201 - DNA, 6414 bp, Homo sapiens
  Payload ID: 2139
  Gene Symbol: CACNA1D
  Gene Name: calcium channel, voltage-dependent, L type, alpha 1D subunit
  Uniprot ID: Q01668
  ENST ID: ENST00000422281
  CDS Start-End: 1-6414
atgatgatgatgatgatgatgaaaaaaatgcagcatcaacggcagcagcaagcggaccacgcgaacgaggcaaactatgcaagaggcaccagacttcctctttctggtgaaggaccaacttctcagccgaatagctccaagcaaactgtcctgtcttggcaagctgcaatcgatgctgctagacaggccaaggctgcccaaactatgagcacctctgcacccccacctgtaggatctctctcccaaagaaaacgtcagcaatacgccaagagcaaaaaacagggtaactcgtccaacagccgacctgcccgcgcccttttctgtttatcactcaataaccccatccgaagagcctgcattagtatagtggaatggaaaccatttgacatatttatattattggctatttttgccaattgtgtggccttagctatttacatcccattccctgaagatgattctaattcaacaaatcataacttggaaaaagtagaatatgccttcctgattatttttacagtcgagacatttttgaagattatagcgtatggattattgctacatcctaatgcttatgttaggaatggatggaatttactggattttgttatagtaatagtaggattgtttagtgtaattttggaacaattaaccaaagaaacagaaggcgggaaccactcaagcggcaaatctggaggctttgatgtcaaagccctccgtgcctttcgagtgttgcgaccacttcgactagtgtcaggagtgcccagtttacaagttgtcctgaactccattataaaagccatggttcccctccttcacatagcccttttggtattatttgtaatcataatctatgctattataggattggaactttttattggaaaaatgcacaaaacatgtttttttgctgactcagatatcgtagctgaagaggacccagctccatgtgcgttctcagggaatggacgccagtgtactgccaatggcacggaatgtaggagtggctgggttggcccgaacggaggcatcaccaactttgataactttgcctttgccatgcttactgtgtttcagtgcatcaccatggagggctggacagatgtgctctactggatgaatgatgctatgggatttgaattgccctgggtgtattttgtcagtctcgtcatctttgggtcatttttcgtactaaatcttgtacttggtgtattgagcggagaattctcaaaggaaagagagaaggcaaaagcacggggagatttccagaagctccgggagaagcagcagctggaggaggatctaaagggctacttggattggatcacccaagctgaggacatcgatccggagaatgaggaagaaggaggagaggaaggcaaacgaaatactagcatgcccaccagcgagactgagtctgtgaacacagagaacgtcagcggtgaaggcgagaaccgaggctgctgtggaagtctctgtcaagccatctcaaaatccaaactcagccgacgctggcgtcgctggaaccgattcaatcgcagaagatgtagggccgccgtgaagtctgtcacgttttactggctggttatcgtcctggtgtttctgaacaccttaaccatttcctctgagcactacaatcagccagattggttgacacagattcaagatattgccaacaaagtcctcttggctctgttcacctgcgagatgctggtaaaaatgtacagcttgggcctccaagcatatttcgtctctcttttcaaccggtttgattgcttcgtggtgtgtggtggaatcactgagacgatcttggtggaactggaaatcatgtctcccctggggatctctgtgtttcggtgtgtgcgcctcttaagaatcttcaaagtgaccaggcactggacttccctgagcaacttagtggcatccttattaaactccatgaagtccatcgcttcgctgttgcttctgctttttctcttcattatcatcttttccttgcttgggatgcagctgtttggcggcaagtttaattttgatgaaacgcaaaccaagcggagcacctttgacaatttccctcaagcacttctcacagtgttccagatcctgacaggcgaagactggaatgctgtgatgtacgatggcatcatggcttacgggggcccatcctcttcaggaatgatcgtctgcatctacttcatcatcctcttcatttgtggtaactatattctactgaatgtcttcttggccatcgctgtagacaatttggctgatgctgaaagtctgaacactgctcagaaagaagaagcggaagaaaaggagaggaaaaagattgccagaaaagagagcctagaaaataaaaagaacaacaaaccagaagtcaaccagatagccaacagtgacaacaaggttacaattgatgactatagagaagaggatgaagacaaggacccctatccgccttgcgatgtgccagtaggggaagaggaagaggaagaggaggaggatgaacctgaggttcctgccggaccccgtcctcgaaggatctcggagttgaacatgaaggaaaaaattgcccccatccctgaagggagcgctttcttcattcttagcaagaccaacccgatccgcgtaggctgccacaagctcatcaaccaccacatcttcaccaacctcatccttgtcttcatcatgctgagcagcgctgccctggccgcagaggaccccatccgcagccactccttccggaacacgatactgggttactttgactatgccttcacagccatctttactgttgagatcctgttgaagatgacaacttttggagctttcctccacaaaggggccttctgcaggaactacttcaatttgctggatatgctggtggttggggtgtctctggtgtcatttgggattcaatccagtgccatctccgttgtgaagattctgagggtcttaagggtcctgcgtcccctcagggccatcaacagagcaaaaggacttaagcacgtggtccagtgcgtcttcgtggccatccggaccatcggcaacatcatgatcgtcaccaccctcctgcagttcatgtttgcctgtatcggggtccagttgttcaaggggaagttctatcgctgtacggatgaagccaaaagtaaccctgaagaatgcaggggacttttcatcctctacaaggatggggatgttgacagtcctgtggtccgtgaacggatctggcaaaacagtgatttcaacttcgacaacgtcctctctgctatgatggcgctcttcacagtctccacgtttgagggctggcctgcgttgctgtataaagccatcgactcgaatggagagaacatcggcccaatctacaaccaccgcgtggagatctccatcttcttcatcatctacatcatcattgtagctttcttcatgatgaacatctttgtgggctttgtcatcgttacatttcaggaacaaggagaaaaagagtataagaactgtgagctggacaaaaatcagcgtcagtgtgttgaatacgccttgaaagcacgtcccttgcggagatacatccccaaaaacccctaccagtacaagttctggtacgtggtgaactcttcgcctttcgaatacatgatgtttgtcctcatcatgctcaacacactctgcttggccatgcagcactacgagcagtccaagatgttcaatgatgccatggacattctgaacatggtcttcaccggggtgttcaccgtcgagatggttttgaaagtcatcgcatttaagcctaaggggtattttagtgacgcctggaacacgtttgactccctcatcgtaatcggcagcattatagacgtggccctcagcgaagcagacaactctgaagagagcaatagaatctccatcacctttttccgtcttttccgagtgatgcgattggtgaagcttctcagcaggggggaaggcatccggacattgctgtggacttttattaagtcctttcaggcgctcccgtatgtggccctcctcatagccatgctgttcttcatctatgcggtcattggcatgcagatgtttgggaaagttgccatgagagataacaaccagatcaataggaacaataacttccagacgtttccccaggcggtgctgctgctcttcaggtgtgcaacaggtgaggcctggcaggagatcatgctggcctgtctcccagggaagctctgtgaccctgagtcagattacaaccccggggaggagtatacatgtgggagcaactttgccattgtctatttcatcagtttttacatgctctgtgcatttctgatcatcaatctgtttgtggctgtcatcatggataatttcgactatctgacccgggactggtctattttggggcctcaccatttagatgaattcaaaagaatatggtcagaatatgaccctgaggcaaagggaaggataaaacaccttgatgtggtcactctgcttcgacgcatccagcctcccctggggtttgggaagttatgtccacacagggtagcgtgcaagagattagttgccatgaacatgcctctcaacagtgacgggacagtcatgtttaatgcaaccctgtttgctttggttcgaacggctcttaagatcaagaccgaagggaacctggagcaagctaatgaagaacttcgggctgtgataaagaaaatttggaagaaaaccagcatgaaattacttgaccaagttgtccctccagctggtgatgatgaggtaaccgtggggaagttctatgccactttcctgatacaggactactttaggaaattcaagaaacggaaagaacaaggactggtgggaaagtaccctgcgaagaacaccacaattgccctacaggcgggattaaggacactgcatgacattgggccagaaatccggcgtgctatatcgtgtgatttgcaagatgacgagcctgaggaaacaaaacgagaagaagaagatgatgtgttcaaaagaaatggtgccctgcttggaaaccatgtcaatcatgttaatagtgataggagagattcccttcagcagaccaataccacccaccgtcccctgcatgtccaaaggccttcaattccacctgcaagtgatactgagaaaccgctgtttcctccagcaggaaattcggtgtgtcataaccatcataaccataattccataggaaagcaagttcccacctcaacaaatgccaatctcaataatgccaatatgtccaaagctgcccatggaaagcggcccagcattgggaaccttgagcatgtgtctgaaaatgggcatcattcttcccacaagcatgaccgggagcctcagagaaggtccagtgtgaaaaggtccgactcaggagatgaacagctcccaactatttgccgggaagacccagagatacatggctatttcagggacccccactgcttgggggagcaggagtatttcagtagtgaggaatgctacgaggatgacagctcgcccacctggagcaggcaaaactatggctactacagcagatacccaggcagaaacatcgactctgagaggccccgaggctaccatcatccccaaggattcttggaggacgatgactcgcccgtttgctatgattcacggagatctccaaggagacgcctactacctcccaccccagcatcccaccggagatcctccttcaactttgagtgcctgcgccggcagagcagccaggaagaggtcccgtcgtctcccatcttcccccatcgcacggccctgcctctgcatctaatgcagcaacagatcatggcagttgccggcctagattcaagtaaagcccagaagtactcaccgagtcactcgacccggtcgtgggccacccctccagcaacccctccctaccgggactggacaccgtgctacacccccctgatccaagtggagcagtcagaggccctggaccaggtgaacggcagcctgccgtccctgcaccgcagctcctggtacacagacgagcccgacatctcctaccggactttcacaccagccagcctgactgtccccagcagcttccggaacaaaaacagcgacaagcagaggagtgcggacagcttggtggaggcagtcctgatatccgaaggcttgggacgctatgcaagggacccaaaatttgtgtcagcaacaaaacacgaaatcgctgatgcctgtgacctcaccatcgacgagatggagagtgcagccagcaccctgcttaatgggaacgtgcgtccccgagccaacggggatgtgggccccctctcacaccggcaggactatgagctacaggactttggtcctggctacagcgacgaagagccagaccctgggagggatgaggaggacctggcggatgaaatgatatgcatcaccaccttgtag

SEQ ID NO: 113202 - DNA, 5667 bp, Homo sapiens
  Payload ID: 2139
  Gene Symbol: CACNA1D
  Gene Name: calcium channel, voltage-dependent, L type, alpha 1D subunit
  ENST ID: ENST00000481478
  CDS Start-End: 1-5565
gccaatggcacggaatgtaggagtggctgggttggcccgaacggaggcatcaccaactttgataactttgcctttgccatgcttactgtgtttcagtgcatcaccatggagggctggacagatgtgctctactggatgaatgatgctatgggatttgaattgccctgggtgtattttgtcagtctcgtcatctttgggtcatttttcgtactaaatcttgtacttggtgtattgagcggagaattctcaaaggaaagagagaaggcaaaagcacggggagatttccagaagctccgggagaagcagcagctggaggaggatctaaagggctacttggattggatcacccaagctgaggacatcgatccggagaatgaggaagaaggaggagaggaaggcaaacgaaatactagcatgcccaccagcgagactgagtctgtgaacacagagaacgtcagcggtgaaggcgagaaccgaggctgctgtggaagtctctggtgctggtggagacggagaggcgcggccaaggcggggccctctgggtgtcggcggtggggtcaagccatctcaaaatccaaactcagccgacgctggcgtcgctggaaccgattcaatcgcagaagatgtagggccgccgtgaagtctgtcacgttttactggctggttatcgtcctggtgtttctgaacaccttaaccatttcctctgagcactacaatcagccagattggttgacacagattcaagatattgccaacaaagtcctcttggctctgttcacctgcgagatgctggtaaaaatgtacagcttgggcctccaagcatatttcgtctctcttttcaaccggtttgattgcttcgtggtgtgtggtggaatcactgagacgatcttggtggaactggaaatcatgtctcccctggggatctctgtgtttcggtgtgtgcgcctcttaagaatcttcaaagtgaccaggcactggacttccctgagcaacttagtggcatccttattaaactccatgaagtccatcgcttcgctgttgcttctgctttttctcttcattatcatcttttccttgcttgggatgcagctgtttggcggcaagtttaattttgatgaaacgcaaaccaagcggagcacctttgacaatttccctcaagcacttctcacagtgttccagatcctgacaggcgaagactggaatgctgtgatgtacgatggcatcatggcttacgggggcccatcctcttcaggaatgatcgtctgcatctacttcatcatcctcttcatttgtggtaactatattctactgaatgtcttcttggccatcgctgtagacaatttggctgatgctgaaagtctgaacactgctcagaaagaagaagcggaagaaaaggagaggaaaaagattgccagaaaagagagcctagaaaataaaaagaacaacaaaccagaagtcaaccagatagccaacagtgacaacaaggttacaattgatgactatagagaagaggatgaagacaaggacccctatccgccttgcgatgtgccagtaggggaagaggaagaggaagaggaggaggatgaacctgaggttcctgccggaccccgtcctcgaaggatctcggagttgaacatgaaggaaaaaattgcccccatccctgaagggagcgctttcttcattcttagcaagaccaacccgatccgcgtaggctgccacaagctcatcaaccaccacatcttcaccaacctcatccttgtcttcatcatgctgagcagcgctgccctggccgcagaggaccccatccgcagccactccttccggaacacgatactgggttactttgactatgccttcacagccatctttactgttgagatcctgttgaagatgacaacttttggagctttcctccacaaaggggccttctgcaggaactacttcaatttgctggatatgctggtggttggggtgtctctggtgtcatttgggattcaatccagtgccatctccgttgtgaagattctgagggtcttaagggtcctgcgtcccctcagggccatcaacagagcaaaaggacttaagcacgtggtccagtgcgtcttcgtggccatccggaccatcggcaacatcatgatcgtcaccaccctcctgcagttcatgtttgcctgtatcggggtccagttgttcaaggggaagttctatcgctgtacggatgaagccaaaagtaaccctgaagaatgcaggggacttttcatcctctacaaggatggggatgttgacagtcctgtggtccgtgaacggatctggcaaaacagtgatttcaacttcgacaacgtcctctctgctatgatggcgctcttcacagtctccacgtttgagggctggcctgcgttgctgtataaagccatcgactcgaatggagagaacatcggcccaatctacaaccaccgcgtggagatctccatcttcttcatcatctacatcatcattgtagctttcttcatgatgaacatctttgtgggctttgtcatcgttacatttcaggaacaaggagaaaaagagtataagaactgtgagctggacaaaaatcagcgtcagtgtgttgaatacgccttgaaagcacgtcccttgcggagatacatccccaaaaacccctaccagtacaagttctggtacgtggtgaactcttcgcctttcgaatacatgatgtttgtcctcatcatgctcaacacactctgcttggccatgcagcactacgagcagtccaagatgttcaatgatgccatggacattctgaacatggtcttcaccggggtgttcaccgtcgagatggttttgaaagtcatcgcatttaagcctaagcactatttcactgatgcatggaacacttttgatgccttaattgttgttggtagcgtcgttgatattgctataactgaagtgaatccaactgaaagtgaaaatgtccctgtcccaactgctacacctgggaactctgaagagagcaatagaatctccatcacctttttccgtcttttccgagtgatgcgattggtgaagcttctcagcaggggggaaggcatccggacattgctgtggacttttattaagtcctttcaggcgctcccgtatgtggccctcctcatagccatgctgttcttcatctatgcggtcattggcatgcagatgtttgggaaagttgccatgagagataacaaccagatcaataggaacaataacttccagacgtttccccaggcggtgctgctgctcttcaggtgtgcaacaggtgaggcctggcaggagatcatgctggcctgtctcccagggaagctctgtgaccctgagtcagattacaaccccggggaggagtatacatgtgggagcaactttgccattgtctatttcatcagtttttacatgctctgtgcatttctgatcatcaatctgtttgtggctgtcatcatggataatttcgactatctgacccgggactggtctattttggggcctcaccatttagatgaattcaaaagaatatggtcagaatatgaccctgaggcaaagggaaggataaaacaccttgatgtggtcactctgcttcgacgcatccagcctcccctggggtttgggaagttatgtccacacagggtagcgtgcaagagattagttgccatgaacatgcctctcaacagtgacgggacagtcatgtttaatgcaaccctgtttgctttggttcgaacggctcttaagatcaagaccgaagggaacctggagcaagctaatgaagaacttcgggctgtgataaagaaaatttggaagaaaaccagcatgaaattacttgaccaagttgtccctccagctggtgatgatgaggtaaccgtggggaagttctatgccactttcctgatacaggactactttaggaaattcaagaaacggaaagaacaaggactggtgggaaagtaccctgcgaagaacaccacaattgccctacaggcgggattaaggacactgcatgacattgggccagaaatccggcgtgctatatcgtgtgatttgcaagatgacgagcctgaggaaacaaaacgagaagaagaagatgatgtgttcaaaagaaatggtgccctgcttggaaaccatgtcaatcatgttaatagtgataggagagattcccttcagcagaccaataccacccaccgtcccctgcatgtccaaaggccttcaattccacctgcaagtgatactgagaaaccgctgtttcctccagcaggaaattcggtgtgtcataaccatcataaccataattccataggaaagcaagttcccacctcaacaaatgccaatctcaataatgccaatatgtccaaagctgcccatggaaagcggcccagcattgggaaccttgagcatgtgtctgaaaatgggcatcattcttcccacaagcatgaccgggagcctcagagaaggtccagtgtgaaaagaacccgctattatgaaacttacattaggtccgactcaggagatgaacagctcccaactatttgccgggaagacccagagatacatggctatttcagggacccccactgcttgggggagcaggagtatttcagtagtgaggaatgctacgaggatgacagctcgcccacctggagcaggcaaaactatggctactacagcagatacccaggcagaaacatcgactctgagaggccccgaggctaccatcatccccaaggattcttggaggacgatgactcgcccgtttgctatgattcacggagatctccaaggagacgcctactacctcccaccccagcatcccaccggagatcctccttcaactttgagtgcctgcgccggcagagcagccaggaagaggtcccgtcgtctcccatcttcccccatcgcacggccctgcctctgcatctaatgcagcaacagatcatggcagttgccggcctagattcaagtaaagcccagaagtactcaccgagtcactcgacccggtcgtgggccacccctccagcaacccctccctaccgggactggacaccgtgctacacccccctgatccaagtggagcagtcagaggccctggaccaggtgaacggcagcctgccgtccctgcaccgcagctcctggtacacagacgagcccgacatctcctaccggactttcacaccagccagcctgactgtccccagcagcttccggaacaaaaacagcgacaagcagaggagtgcggacagcttggtggaggcagtcctgatatccgaaggcttgggacgctatgcaagggacccaaaatttgtgtcagcaacaaaacacgaaatcgctgatgcctgtgacctcaccatcgacgagatggagagtgcagccagcaccctgcttaatgggaacgtgcgtccccgagccaacggggatgtgggccccctctcacaccggcaggactatgagctacaggactttggtcctggctacagcgacgaagagccagaccctgggagggatgaggaggacctggcggatgaaatgatatgcatcaccaccttgtagcccccagcgaggggcagactggctctggcctcaggtggggcgcaggagagccaggggaaaagtgcctcatagttaggaaagtttaggcactagttgggagta

SEQ ID NO: 113203 - DNA, 791 bp, Homo sapiens
  Payload ID: 2139
  Gene Symbol: CACNA1D
  Gene Name: calcium channel, voltage-dependent, L type, alpha 1D subunit
  ENST ID: ENST00000481085
  CDS Start-End: 1-791
ctccatgtgcgttctcagggaatggacgccagtgtactgccaatggcacggaatgtaggagtggctgggttggcccgaacggaggcatcaccaactttgataactttgcctttgccatgcttactgtgtttcagtgcatcaccatggagggctggacagatgtgctctactgggtaaatgatgcgataggatgggaatggccatgggtgtattttgttagtctgatcatccttggctcatttttcgtccttaacctggttcttggtgtccttagtggagaattctcaaaggaaagagagaaggcaaaagcacggggagatttccagaagctccgggagaagcagcagctggaggaggatctaaagggctacttggattggatcacccaagctgaggacatcgatccggagaatgaggaagaaggaggagaggaaggcaaacgaaatagggtcacagtggccgacttgcttaaagaggataagaagaaaaagaagttttgctgctttcggcaacgcagggctaaagatcatgctagcatgcccaccagcgagactgagtctgtgaacacagagaacgtcagcggtgaaggcgagaaccgaggctgctgtggaagtctctgtcaagccatctcaaaatccaaactcagccgacgctggcgtcgctggaaccgattcaatcgcagaagatgtagggccgccgtgaagtctgtcacgttttactggctggttatcgtcctggtgtttctgaacaccttaaccatttcctctgagcactacaatcagccagattgg

SEQ ID NO: 113204 - DNA, 6037 bp, Homo sapiens
  Payload ID: 2140
  Gene Symbol: CACNA1F
  Gene Name: calcium channel, voltage-dependent, L type, alpha 1F subunit
  Uniprot ID: O60840
  ENST ID: ENST00000323022
  CDS Start-End: 63-5963
ctccaaagctgggggaagagaggggggttgtgtgcagatggcccttcaatctcgaaagaaagatgtcggaatctgaaggcgggaaagacaccaccccagagcccagtccagccaatggggcaggccctggtcccgaatgggggctgtgccccgggcccccagctgtggaaggtgaaagcagtggggcatcaggcctagggacccctaagcgaagaaaccagcacagcaagcacaagacagtggcagtggccagtgcccagcggtcacctcgggcactcttctgcctcaccctggccaatcctctgcgacggtcctgcatcagcatcgtggagtggaagcccttcgacatcctcatcctgctgaccatctttgccaactgcgtggccctgggagtttacatccccttccctgaggacgactccaacactgccaaccacaacctggagcaggtggagtacgtattcctggtgattttcactgtggagacggtgctcaagatcgtggcctacgggctggtgctccaccccagcgcctacatccgcaatggctggaacctactcgacttcatcatcgtcgtggtcgggctgttcagcgttctgctggagcagggccccggacggccaggcgacgccccgcacaccgggggaaagccaggaggcttcgatgtgaaggcattgagggcgtttcgggtgctgcggccactgaggctggtgtctggggtcccgagcctgcacatagtgctcaattccatcatgaaggctctggtgccgctgctgcacattgcactgctcgtgctcttcgtcatcatcatttatgccatcattgggctcgagctgttccttggacgaatgcacaagacgtgctacttcctgggatccgacatggaagcggaggaggacccatcgccctgtgcgtcttcgggatcagggcgtgcgtgcacgctgaaccagactgagtgccgcgggcgctggccagggcccaatggaggcatcaccaactttgacaacttcttcttcgccatgctgacagtcttccagtgtgtcaccatggaaggctggaccgatgtgctctactggatgcaagatgccatggggtatgaactgccctgggtgtactttgtgagccttgtcatctttgggtccttcttcgtcctcaaccttgtgcttggcgtcctgagtggggagttctccaaggagagagagaaagcgaaagctcgcggggacttccagaagcagcgggagaagcagcagatggaggaagacctgcggggctacctggactggatcactcaagccgaagagctggacatggaggacccctccgccgatgacaaccttgggccacagctggccgagctgaccaataggaggcgtggacgtctgcgctggttcagtcattctactcgctccacacactccaccagcagccatgccagcctcccagccagtgacaccggttccatgacagagacccaaggcgatgaggatgaggaggagggggctctggccagctgtacacgctgcctaaacaagatcatgaaaaccagagtctgccgccgcctccgccgagccaaccgggtccttcgggcacgctgccgtcgggcagtgaagtccaatgcctgctactgggctgtgctgttgctcgtcttcctcaacacgttgaccatcgcctctgagcaccacgggcagcctgtgtggctcacccagatccaggagtatgccaacaaagtgttgctctgtctgttcacggtggagatgcttctcaaattgtacggtctgggcccctctgcctatgtgtcttccttcttcaaccgctttgactgctttgtggtctgtgggggcatcctagagaccaccttggtggaggtgggtgccatgcagcccttgggcatctcagtgctccgatgtgtgcgcctcctcaggatctttaaggtcaccagacactgggcttctctgagcaatctggtggcatccctgctcaattcaatgaaatccatcgcatccttgctgcttctcctcttcctcttcatcattatcttctccctgcttggcatgcagctgtttgggggcaagttcaactttgaccagacccacaccaagcgaagcacctttgacacgttcccccaggccctcctcactgtctttcagatcctgacaggtgaggactggaacgtggtcatgtatgatggtatcatggcatatggtggccccttcttcccaggaatgttggtgtgcatctatttcatcattctcttcatctgtggcaactacatcctgttgaacgtgtttcttgccattgctgtggacaacctggccagtggagatgcaggcactgccaaggacaagggcggggagaagagcaatgagaaggatctcccacaggagaatgaaggcctggtgcctggtgtggagaaagaggaagaggagggtgcaaggagggaaggagcagacatggaggaggaggaggaggaggaagaagaggaagaagaggaagaagaggaagagggtgcagggggtgtggaactcctgcaggaagttgtacccaaggagaaggtggtacccatccctgagggcagcgccttcttctgcctcagccaaaccaacccgctgaggaagggctgccacaccctcatccaccatcatgtcttcaccaatcttatcctggtgttcatcatcctcagcagtgtgtccctggccgctgaggaccccatccgagcccactccttccgcaaccatattctgggttacttcgattatgccttcacctccattttcactgtggagattctactaaagatgacagtgtttggggccttcctgcaccgcggctccttctgccgtagctggtttaatatgttggatctgctggtggtcagtgtgtccctcatctcctttggcatccactccagcgccatctcggtggtgaagattctgcgagtactccgagtactgcggcccctccgagccatcaacagggccaagggactcaagcatgtggtgcagtgtgtatttgtggccatccggaccatcggaaacatcatgattgtcaccacacttctgcaatttatgttcgcctgcatcggggtgcagctcttcaaggggaaattctacacctgcacggacgaggccaaacacacccctcaagaatgcaagggctccttcctggtatacccagatggagacgtgtcacggcccctggtccgggagcggctctgggtcaacagtgatttcaactttgacaatgtcctttcagccatgatggccctgttcactgtctccacctttgaaggctggcctgcactgctatacaaggccatcgatgcatatgcagaggaccacggccccatctataattaccgtgtggagatctcagtgttcttcattgtctacatcatcatcattgcgttcttcatgatgaacatcttcgtgggcttcgtcatcatcactttccgtgcccagggcgagcaggagtaccaaaactgtgagctggacaagaaccagcgtcaatgtgtggaatatgccctcaaggcccagccactccgccgttacatccccaagaacccgcatcagtatcgtgtgtgggccactgtgaactctgctgcctttgagtacctgatgttcctgctcatcctgctcaacacagttgccctagccatgcagcactatgagcagactgctcccttcaactatgccatggacatcctcaacatggtcttcactggcctcttcactattgagatggtgctcaaaatcatcgccttcaagcccaagcattacttcactgatgcctggaacacgtttgacgctcttattgtggtgggcagcatagtggatattgccgtcactgaagtcaataatggtggccaccttggcgagagctctgaggacagctcccgcatttccattaccttctttcgcctcttccgagttatgcggctggtcaagcttctcagtaagggtgaagggatccgcacattgctctggacattcatcaagtccttccaggccttgccctatgtggctcttctcatcgcaatgatattcttcatctatgccgtcattggcatgcagatgttcggcaaggtggctcttcaggatggcacacagataaaccgaaacaacaacttccagacctttccacaggctgtgctgcttctgttcaggtgtgccactggtgaggcatggcaggagataatgcttgccagccttcccggaaatcggtgtgatcctgagtctgacttcggccctggtgaagagtttacctgtggtagcaattttgccatcgcctatttcatcagcttcttcatgctctgtgccttcctgatcataaatctctttgtggctgtgatcatggacaactttgattatctcaccagagattggtccatcctgggcccccatcaccttgatgaattcaagaggatctggtctgaatatgaccctggggccaagggccgcatcaaacacttggatgtggttgccctgctgagacgtatccagccccctctgggatttgggaagctgtgcccacaccgagtggcctgcaagagacttgtggcaatgaacatgcccctcaactcagatgggacggtgacattcaacgccacactctttgccctggtccggacatccctgaagatcaaaacagaagggaacctggagcaagccaaccaggagctgcggattgtcatcaaaaagatctggaagcggatgaaacagaagctgctagatgaggtcatccccccaccagacgaggaggaggtcaccgtgggcaaattctacgccacatttctgatccaggactatttccgcaaattccggcggaggaaagaaaaagggctactaggcaacgacgccgcccctagcacctcttccgcccttcaggctggtctgcggagcctgcaggacttgggtcctgagatgcggcaggccctcacctgtgacacagaggaggaggaagaagaggggcaggagggagtggaggaggaagatgaaaaggacttggaaactaacaaagccacgatggtctcccagccctcagctcgccggggctccgggatttctgtgtctctgcctgtcggggacagacttccagattcactctcctttgggcccagtgatgatgacagggggactcccacctccagtcagcccagtgtgccccaggctggatccaacacccacaggagaggctctggggctctcattttcaccatcccagaagaaggaaattctcagcccaagggaaccaaagggcaaaacaagcaagatgaggatgaggaagtccctgatcggctttcctacctagatgagcaggcagggactcccccgtgctcagtccttttgccacctcacagagctcagagatacatggatgggcacctggtaccacgccgccgtctgctgccccccacacctgcaggtcggaagccctccttcaccatccagtgtctgcagcgccagggcagttgtgaggatttacccatcccaggcacctatcatcgtgggcgaaattcagggcccaatagggctcagggttcctgggcaacaccacctcagcggggtcggctcctgtatgccccgctgttgttggtggaagagggcgcagcgggggaggggtacctcggcagatccagtggcccactgcgcaccttcacctgtctgcacgtgcctggaacccactcggaccccagccatgggaagaggggcagtgccgacagcttggtggaggctgtgcttatctcagagggtctgggcctctttgctcgagacccacgtttcgtggccctggccaagcaggagattgcagatgcgtgtcgcctgacgctggatgagatggacaatgctgccagtgacctgctggcacagggaaccagctctctctatagcgacgaggagtccatcctctcccgcttcgatgaggaggacttgggagacgagatggcctgcgtccacgccctctgaattcccacccctccccaactgctcaataaacctcctgccctcccctccccagcaggaggcaggcatggaccaca

SEQ ID NO: 113205 - DNA, 5813 bp, Homo sapiens
  Payload ID: 2140
  Gene Symbol: CACNA1F
  Gene Name: calcium channel, voltage-dependent, L type, alpha 1F subunit
  Uniprot ID: O60840
  ENST ID: ENST00000376251
  CDS Start-End: 1-5739
atgtcggaatctgaaggcgggaaaggtgagagaatccttccatccctgcagacccttggagcaagcatcgtggagtggaagcccttcgacatcctcatcctgctgaccatctttgccaactgcgtggccctgggagtttacatccccttccctgaggacgactccaacactgccaaccacaacctggagcaggtggagtacgtattcctggtgattttcactgtggagacggtgctcaagatcgtggcctacgggctggtgctccaccccagcgcctacatccgcaatggctggaacctactcgacttcatcatcgtcgtggtcgggctgttcagcgttctgctggagcagggccccggacggccaggcgacgccccgcacaccgggggaaagccaggaggcttcgatgtgaaggcattgagggcgtttcgggtgctgcggccactgaggctggtgtctggggtcccgagcctgcacatagtgctcaattccatcatgaaggctctggtgccgctgctgcacattgcactgctcgtgctcttcgtcatcatcatttatgccatcattgggctcgagctgttccttggacgaatgcacaagacgtgctacttcctgggatccgacatggaagcggaggaggacccatcgccctgtgcgtcttcgggatcagggcgtgcgtgcacgctgaaccagactgagtgccgcgggcgctggccagggcccaatggaggcatcaccaactttgacaacttcttcttcgccatgctgacagtcttccagtgtgtcaccatggaaggctggaccgatgtgctctactggatgcaagatgccatggggtatgaactgccctgggtgtactttgtgagccttgtcatctttgggtccttcttcgtcctcaaccttgtgcttggcgtcctgagtggggagttctccaaggagagagagaaagcgaaagctcgcggggacttccagaagcagcgggagaagcagcagatggaggaagacctgcggggctacctggactggatcactcaagccgaagagctggacatggaggacccctccgccgatgacaaccttggttctatggctgaagagggccgggcgggccatcggccacagctggccgagctgaccaataggaggcgtggacgtctgcgctggttcagtcattctactcgctccacacactccaccagcagccatgccagcctcccagccagtgacaccggttccatgacagagacccaaggcgatgaggatgaggaggagggggctctggccagctgtacacgctgcctaaacaagatcatgaaaaccagagtctgccgccgcctccgccgagccaaccgggtccttcgggcacgctgccgtcgggcagtgaagtccaatgcctgctactgggctgtgctgttgctcgtcttcctcaacacgttgaccatcgcctctgagcaccacgggcagcctgtgtggctcacccagatccaggagtatgccaacaaagtgttgctctgtctgttcacggtggagatgcttctcaaattgtacggtctgggcccctctgcctatgtgtcttccttcttcaaccgctttgactgctttgtggtctgtgggggcatcctagagaccaccttggtggaggtgggtgccatgcagcccttgggcatctcagtgctccgatgtgtgcgcctcctcaggatctttaaggtcaccagacactgggcttctctgagcaatctggtggcatccctgctcaattcaatgaaatccatcgcatccttgctgcttctcctcttcctcttcatcattatcttctccctgcttggcatgcagctgtttgggggcaagttcaactttgaccagacccacaccaagcgaagcacctttgacacgttcccccaggccctcctcactgtctttcagatcctgacaggtgaggactggaacgtggtcatgtatgatggtatcatggcatatggtggccccttcttcccaggaatgttggtgtgcatctatttcatcattctcttcatctgtggcaactacatcctgttgaacgtgtttcttgccattgctgtggacaacctggccagtggagatgcaggcactgccaaggacaagggcggggagaagagcaatgagaaggatctcccacaggagaatgaaggcctggtgcctggtgtggagaaagaggaagaggagggtgcaaggagggaaggagcagacatggaggaggaggaggaggaggaagaagaggaagaagaggaagaagaggaagagggtgcagggggtgtggaactcctgcaggaagttgtacccaaggagaaggtggtacccatccctgagggcagcgccttcttctgcctcagccaaaccaacccgctgaggaagggctgccacaccctcatccaccatcatgtcttcaccaatcttatcctggtgttcatcatcctcagcagtgtgtccctggccgctgaggaccccatccgagcccactccttccgcaaccatattctgggttacttcgattatgccttcacctccattttcactgtggagattctactaaagatgacagtgtttggggccttcctgcaccgcggctccttctgccgtagctggtttaatatgttggatctgctggtggtcagtgtgtccctcatctcctttggcatccactccagcgccatctcggtggtgaagattctgcgagtactccgagtactgcggcccctccgagccatcaacagggccaagggactcaagcatgtggtgcagtgtgtatttgtggccatccggaccatcggaaacatcatgattgtcaccacacttctgcaatttatgttcgcctgcatcggggtgcagctcttcaaggggaaattctacacctgcacggacgaggccaaacacacccctcaagaatgcaagggctccttcctggtatacccagatggagacgtgtcacggcccctggtccgggagcggctctgggtcaacagtgatttcaactttgacaatgtcctttcagccatgatggccctgttcactgtctccacctttgaaggctggcctgcactgctatacaaggccatcgatgcatatgcagaggaccacggccccatctataattaccgtgtggagatctcagtgttcttcattgtctacatcatcatcattgcgttcttcatgatgaacatcttcgtgggcttcgtcatcatcactttccgtgcccagggcgagcaggagtaccaaaactgtgagctggacaagaaccagcgtcaatgtgtggaatatgccctcaaggcccagccactccgccgttacatccccaagaacccgcatcagtatcgtgtgtgggccactgtgaactctgctgcctttgagtacctgatgttcctgctcatcctgctcaacacagttgccctagccatgcagcactatgagcagactgctcccttcaactatgccatggacatcctcaacatggtcttcactggcctcttcactattgagatggtgctcaaaatcatcgccttcaagcccaagcattacttcactgatgcctggaacacgtttgacgctcttattgtggtgggcagcatagtggatattgccgtcactgaagtcaataatggtggccaccttggcgagagctctgaggacagctcccgcatttccattaccttctttcgcctcttccgagttatgcggctggtcaagcttctcagtaagggtgaagggatccgcacattgctctggacattcatcaagtccttccaggccttgccctatgtggctcttctcatcgcaatgatattcttcatctatgccgtcattggcatgcagatgttcggcaaggtggctcttcaggatggcacacagataaaccgaaacaacaacttccagacctttccacaggctgtgctgcttctgttcaggtgtgccactggtgaggcatggcaggagataatgcttgccagccttcccggaaatcggtgtgatcctgagtctgacttcggccctggtgaagagtttacctgtggtagcaattttgccatcgcctatttcatcagcttcttcatgctctgtgccttcctgatcataaatctctttgtggctgtgatcatggacaactttgattatctcaccagagattggtccatcctgggcccccatcaccttgatgaattcaagaggatctggtctgaatatgaccctggggccaagggccgcatcaaacacttggatgtggttgccctgctgagacgtatccagccccctctgggatttgggaagctgtgcccacaccgagtggcctgcaagagacttgtggcaatgaacatgcccctcaactcagatgggacggtgacattcaacgccacactctttgccctggtccggacatccctgaagatcaaaacagaagggaacctggagcaagccaaccaggagctgcggattgtcatcaaaaagatctggaagcggatgaaacagaagctgctagatgaggtcatccccccaccagacgaggaggaggtcaccgtgggcaaattctacgccacatttctgatccaggactatttccgcaaattccggcggaggaaagaaaaagggctactaggcaacgacgccgcccctagcacctcttccgcccttcaggctggtctgcggagcctgcaggacttgggtcctgagatgcggcaggccctcacctgtgacacagaggaggaggaagaagaggggcaggagggagtggaggaggaagatgaaaaggacttggaaactaacaaagccacgatggtctcccagccctcagctcgccggggctccgggatttctgtgtctctgcctgtcggggacagacttccagattcactctcctttgggcccagtgatgatgacagggggactcccacctccagtcagcccagtgtgccccaggctggatccaacacccacaggagaggctctggggctctcattttcaccatcccagaagaaggaaattctcagcccaagggaaccaaagggcaaaacaagcaagatgaggatgaggaagtccctgatcggctttcctacctagatgagcaggcagggactcccccgtgctcagtccttttgccacctcacagagctcagagatacatggatgggcacctggtaccacgccgccgtctgctgccccccacacctgcaggtcggaagccctccttcaccatccagtgtctgcagcgccagggcagttgtgaggatttacccatcccaggcacctatcatcgtgggcgaaattcagggcccaatagggctcagggttcctgggcaacaccacctcagcggggtcggctcctgtatgccccgctgttgttggtggaagagggcgcagcgggggaggggtacctcggcagatccagtggcccactgcgcaccttcacctgtctgcacgtgcctggaacccactcggaccccagccatgggaagaggggcagtgccgacagcttggtggaggctgtgcttatctcagagggtctgggcctctttgctcgagacccacgtttcgtggccctggccaagcaggagattgcagatgcgtgtcgcctgacgctggatgagatggacaatgctgccagtgacctgctggcacagggaaccagctctctctatagcgacgaggagtccatcctctcccgcttcgatgaggaggacttgggagacgagatggcctgcgtccacgccctctgaattcccacccctccccaactgctcaataaacctcctgccctcccctccccagcaggaggcaggcatggaccaca

SEQ ID NO: 113206 - DNA, 6070 bp, Homo sapiens
  Payload ID: 2140
  Gene Symbol: CACNA1F
  Gene Name: calcium channel, voltage-dependent, L type, alpha 1F subunit
  Uniprot ID: O60840
  ENST ID: ENST00000376265
  CDS Start-End: 63-5996
ctccaaagctgggggaagagaggggggttgtgtgcagatggcccttcaatctcgaaagaaagatgtcggaatctgaaggcgggaaagacaccaccccagagcccagtccagccaatggggcaggccctggtcccgaatgggggctgtgccccgggcccccagctgtggaaggtgaaagcagtggggcatcaggcctagggacccctaagcgaagaaaccagcacagcaagcacaagacagtggcagtggccagtgcccagcggtcacctcgggcactcttctgcctcaccctggccaatcctctgcgacggtcctgcatcagcatcgtggagtggaagcccttcgacatcctcatcctgctgaccatctttgccaactgcgtggccctgggagtttacatccccttccctgaggacgactccaacactgccaaccacaacctggagcaggtggagtacgtattcctggtgattttcactgtggagacggtgctcaagatcgtggcctacgggctggtgctccaccccagcgcctacatccgcaatggctggaacctactcgacttcatcatcgtcgtggtcgggctgttcagcgttctgctggagcagggccccggacggccaggcgacgccccgcacaccgggggaaagccaggaggcttcgatgtgaaggcattgagggcgtttcgggtgctgcggccactgaggctggtgtctggggtcccgagcctgcacatagtgctcaattccatcatgaaggctctggtgccgctgctgcacattgcactgctcgtgctcttcgtcatcatcatttatgccatcattgggctcgagctgttccttggacgaatgcacaagacgtgctacttcctgggatccgacatggaagcggaggaggacccatcgccctgtgcgtcttcgggatcagggcgtgcgtgcacgctgaaccagactgagtgccgcgggcgctggccagggcccaatggaggcatcaccaactttgacaacttcttcttcgccatgctgacagtcttccagtgtgtcaccatggaaggctggaccgatgtgctctactggatgcaagatgccatggggtatgaactgccctgggtgtactttgtgagccttgtcatctttgggtccttcttcgtcctcaaccttgtgcttggcgtcctgagtggggagttctccaaggagagagagaaagcgaaagctcgcggggacttccagaagcagcgggagaagcagcagatggaggaagacctgcggggctacctggactggatcactcaagccgaagagctggacatggaggacccctccgccgatgacaaccttggttctatggctgaagagggccgggcgggccatcggccacagctggccgagctgaccaataggaggcgtggacgtctgcgctggttcagtcattctactcgctccacacactccaccagcagccatgccagcctcccagccagtgacaccggttccatgacagagacccaaggcgatgaggatgaggaggagggggctctggccagctgtacacgctgcctaaacaagatcatgaaaaccagagtctgccgccgcctccgccgagccaaccgggtccttcgggcacgctgccgtcgggcagtgaagtccaatgcctgctactgggctgtgctgttgctcgtcttcctcaacacgttgaccatcgcctctgagcaccacgggcagcctgtgtggctcacccagatccaggagtatgccaacaaagtgttgctctgtctgttcacggtggagatgcttctcaaattgtacggtctgggcccctctgcctatgtgtcttccttcttcaaccgctttgactgctttgtggtctgtgggggcatcctagagaccaccttggtggaggtgggtgccatgcagcccttgggcatctcagtgctccgatgtgtgcgcctcctcaggatctttaaggtcaccagacactgggcttctctgagcaatctggtggcatccctgctcaattcaatgaaatccatcgcatccttgctgcttctcctcttcctcttcatcattatcttctccctgcttggcatgcagctgtttgggggcaagttcaactttgaccagacccacaccaagcgaagcacctttgacacgttcccccaggccctcctcactgtctttcagatcctgacaggtgaggactggaacgtggtcatgtatgatggtatcatggcatatggtggccccttcttcccaggaatgttggtgtgcatctatttcatcattctcttcatctgtggcaactacatcctgttgaacgtgtttcttgccattgctgtggacaacctggccagtggagatgcaggcactgccaaggacaagggcggggagaagagcaatgagaaggatctcccacaggagaatgaaggcctggtgcctggtgtggagaaagaggaagaggagggtgcaaggagggaaggagcagacatggaggaggaggaggaggaggaagaagaggaagaagaggaagaagaggaagagggtgcagggggtgtggaactcctgcaggaagttgtacccaaggagaaggtggtacccatccctgagggcagcgccttcttctgcctcagccaaaccaacccgctgaggaagggctgccacaccctcatccaccatcatgtcttcaccaatcttatcctggtgttcatcatcctcagcagtgtgtccctggccgctgaggaccccatccgagcccactccttccgcaaccatattctgggttacttcgattatgccttcacctccattttcactgtggagattctactaaagatgacagtgtttggggccttcctgcaccgcggctccttctgccgtagctggtttaatatgttggatctgctggtggtcagtgtgtccctcatctcctttggcatccactccagcgccatctcggtggtgaagattctgcgagtactccgagtactgcggcccctccgagccatcaacagggccaagggactcaagcatgtggtgcagtgtgtatttgtggccatccggaccatcggaaacatcatgattgtcaccacacttctgcaatttatgttcgcctgcatcggggtgcagctcttcaaggggaaattctacacctgcacggacgaggccaaacacacccctcaagaatgcaagggctccttcctggtatacccagatggagacgtgtcacggcccctggtccgggagcggctctgggtcaacagtgatttcaactttgacaatgtcctttcagccatgatggccctgttcactgtctccacctttgaaggctggcctgcactgctatacaaggccatcgatgcatatgcagaggaccacggccccatctataattaccgtgtggagatctcagtgttcttcattgtctacatcatcatcattgcgttcttcatgatgaacatcttcgtgggcttcgtcatcatcactttccgtgcccagggcgagcaggagtaccaaaactgtgagctggacaagaaccagcgtcaatgtgtggaatatgccctcaaggcccagccactccgccgttacatccccaagaacccgcatcagtatcgtgtgtgggccactgtgaactctgctgcctttgagtacctgatgttcctgctcatcctgctcaacacagttgccctagccatgcagcactatgagcagactgctcccttcaactatgccatggacatcctcaacatggtcttcactggcctcttcactattgagatggtgctcaaaatcatcgccttcaagcccaagcattacttcactgatgcctggaacacgtttgacgctcttattgtggtgggcagcatagtggatattgccgtcactgaagtcaataatggtggccaccttggcgagagctctgaggacagctcccgcatttccattaccttctttcgcctcttccgagttatgcggctggtcaagcttctcagtaagggtgaagggatccgcacattgctctggacattcatcaagtccttccaggccttgccctatgtggctcttctcatcgcaatgatattcttcatctatgccgtcattggcatgcagatgttcggcaaggtggctcttcaggatggcacacagataaaccgaaacaacaacttccagacctttccacaggctgtgctgcttctgttcaggtgtgccactggtgaggcatggcaggagataatgcttgccagccttcccggaaatcggtgtgatcctgagtctgacttcggccctggtgaagagtttacctgtggtagcaattttgccatcgcctatttcatcagcttcttcatgctctgtgccttcctgatcataaatctctttgtggctgtgatcatggacaactttgattatctcaccagagattggtccatcctgggcccccatcaccttgatgaattcaagaggatctggtctgaatatgaccctggggccaagggccgcatcaaacacttggatgtggttgccctgctgagacgtatccagccccctctgggatttgggaagctgtgcccacaccgagtggcctgcaagagacttgtggcaatgaacatgcccctcaactcagatgggacggtgacattcaacgccacactctttgccctggtccggacatccctgaagatcaaaacagaagggaacctggagcaagccaaccaggagctgcggattgtcatcaaaaagatctggaagcggatgaaacagaagctgctagatgaggtcatccccccaccagacgaggaggaggtcaccgtgggcaaattctacgccacatttctgatccaggactatttccgcaaattccggcggaggaaagaaaaagggctactaggcaacgacgccgcccctagcacctcttccgcccttcaggctggtctgcggagcctgcaggacttgggtcctgagatgcggcaggccctcacctgtgacacagaggaggaggaagaagaggggcaggagggagtggaggaggaagatgaaaaggacttggaaactaacaaagccacgatggtctcccagccctcagctcgccggggctccgggatttctgtgtctctgcctgtcggggacagacttccagattcactctcctttgggcccagtgatgatgacagggggactcccacctccagtcagcccagtgtgccccaggctggatccaacacccacaggagaggctctggggctctcattttcaccatcccagaagaaggaaattctcagcccaagggaaccaaagggcaaaacaagcaagatgaggatgaggaagtccctgatcggctttcctacctagatgagcaggcagggactcccccgtgctcagtccttttgccacctcacagagctcagagatacatggatgggcacctggtaccacgccgccgtctgctgccccccacacctgcaggtcggaagccctccttcaccatccagtgtctgcagcgccagggcagttgtgaggatttacccatcccaggcacctatcatcgtgggcgaaattcagggcccaatagggctcagggttcctgggcaacaccacctcagcggggtcggctcctgtatgccccgctgttgttggtggaagagggcgcagcgggggaggggtacctcggcagatccagtggcccactgcgcaccttcacctgtctgcacgtgcctggaacccactcggaccccagccatgggaagaggggcagtgccgacagcttggtggaggctgtgcttatctcagagggtctgggcctctttgctcgagacccacgtttcgtggccctggccaagcaggagattgcagatgcgtgtcgcctgacgctggatgagatggacaatgctgccagtgacctgctggcacagggaaccagctctctctatagcgacgaggagtccatcctctcccgcttcgatgaggaggacttgggagacgagatggcctgcgtccacgccctctgaattcccacccctccccaactgctcaataaacctcctgccctcccctccccagcaggaggcaggcatggaccaca

SEQ ID NO: 113207 - DNA, 662 bp, Homo sapiens
  Payload ID: 2140
  Gene Symbol: CACNA1F
  Gene Name: calcium channel, voltage-dependent, L type, alpha 1F subunit
  ENST ID: ENST00000486943
  CDS Start-End: 1-351
gactatttccgcaaattccggcggaggaaagaaaaagggctactaggcaacgacgccgcccctagcacctcttccgcccttcaggctggtctgcggagcctgcaggacttgggtcctgagatgcggcaggccctcacctgtgacacagaggaggaggaagaagaggggcaggagggagtggaggaggaagatgaaaaggacttggaaactaacaaagtggggacaagttttcactctcccaggaacttgattgtaaaatacttcgtcaatcccctgagtgattttgacactgcttctgggaagaagctcccccagagaagccccctctgcaatagaaaaatatttatttgaggctgggagtggtggctcatgcctataatcccagcactttgggagtccagggtggaaggatcgcttgaaccctagggttcaagaccagtcctggcaaaatagtgaaaccgcctctctacaaaaaaatttaaaaattagctaggagtggtggtgcaagcctgtagtcccagctacttgggaggctgaggcaggaggattgcttgaacctgggaggatgaggccacagtgagctgtgatcatgccactgcactcccgcctggtgacaggacaagaccctatcgcaaatatttatttatttatttacgtattta

SEQ ID NO: 113208 - DNA, 6166 bp, Homo sapiens
  Payload ID: 2141
  Gene Symbol: CACNA1S
  Gene Name: calcium channel, voltage-dependent, L type, alpha 1S subunit
  Uniprot ID: Q13698
  ENST ID: ENST00000362061
  CDS Start-End: 228-5849
tcaggcccggcagcggggagccgagtggaggctaattttacttgctgggagcgaggagagtaatcctcctgcccccactcctgcccccgccccctggctggctcagcagggcaggctcagccgacagcctcagccagcctagtccccaaggcgggggcattggggacacagggaagggaaagcactggggtgggggagcaggagaaagccagattcccagggaagccatggagccatcctcaccccaggatgaaggcctgaggaagaaacagcccaagaagccagttcctgagattctgccaaggccaccccgggccttgttctgcctgaccctggagaaccccctgaggaaggcctgcatcagcattgtagaatggaagcccttcgagacgatcatcttgctcaccatctttgccaattgtgtggccctggccgtgtacctgcccatgccggaagatgacaacaactctctgaacctcggcctggagaagctggagtatttcttcctcattgtcttctcgattgaagccgccatgaagatcattgcctacggcttcttattccaccaggacgcttacctgcgcagtggctggaatgtgctggacttcaccattgtcttcctgggggtcttcaccgtgattctggaacaggttaacgtcatccaaagccacacagccccaatgagcagcaaaggagccggcttggatgtcaaggccctcagagccttccgagtgctcagacccctccggctggtgtcgggggtgcctagcctgcaggtggtcctgaactccatcttcaaggccatgctccccctctttcacatcgccctgctggtcctctttatggtcatcatctatgccatcatcgggctggagctcttcaagggcaagatgcacaagacctgctacttcattggtacagatatcgtggccacggtggagaatgaagagccatcgccctgcgccaggacgggctcagggcgccggtgcaccatcaatggcagtgagtgccggggcggctggccagggcccaaccatggcatcacccacttcgacaacttcggcttctccatgctcaccgtgtaccagtgcattaccatggagggatggactgacgtcctttactgggtcaatgatgccatcgggaatgagtggccctggatctattttgtcaccctcattttgctgggatccttcttcatcctcaacctggtgctgggtgtcctgagtggggaattcaccaaggagcgggagaaggccaagtccaggggaaccttccagaagctccgggagaagcagcaactagatgaggaccttcggggctacatgagctggatcacgcagggcgaggtcatggatgttgaggacttcagagaaggaaaactgtctttggatgaaggtggctctgacacagagagcctgtatgaaattgcaggcttgaacaaaatcatccagttcatccgacattggaggcagtggaaccgcatctttcgctggaagtgccatgacatcgtgaagtccaaggtcttctattggctggtgattctcatcgttgccctcaacaccctgtctatcgcctcagagcaccacaaccagcctctctggctgacccgtttgcaagacattgccaaccgggtgctgctgtccctcttcaccactgagatgctgatgaagatgtacgggctgggcctgcgccagtacttcatgtctatcttcaaccgcttcgactgcttcgtggtgtgtagcggtatcctggagatcctgctggtggagtcgggtgccatgacacccctgggcatctccgtgctccgctgcatccgcctcctgaggatcttcaagatcaccaaatattggacgtcgctgagcaacctggtggcatccctgctcaactccatccgctccatcgcctccctgctgctgctgctcttcctcttcatcgtcatcttcgccctcctgggcatgcagctctttggggggaggtatgactttgaagacacagaagtacggcgcagcaactttgacaactttccccaagccctcatcagcgtcttccaggtactgacaggggaagactggacctcaatgatgtacaatgggatcatggcctacggcgggccgtcctaccctggcatgcttgtgtgcatttacttcatcatccttttcgtctgtggcaactacatcctgctcaatgtcttcctggccattgccgtggacaacctggccgaggcggagagcctgacttctgcccagaaggccaaggctgaggagaaaaaacgcaggaagatgtccaagggtctcccagacaagtcagaagaggagaagtcaacgatggccaagaagctggagcagaaacccaagggtgagggcatccccaccactgccaagctgaaaatcgatgagtttgaatctaatgtcaatgaggtgaaggatccctacccctcagccgacttcccaggggatgacgaggaagatgagcctgagatcccgctgagcccccgaccacgtcccctggctgagctgcagctgaaagagaaggccgtgcccattccagaagccagctccttcttcatcttcagccccaccaataagatccgtgtcctgtgtcaccgcatcgtcaatgccacctggtttaccaacttcatcctgctcttcatcctgctcagcagcgctgcactggctgcggaagaccccatccgggctgattccatgagaaatcagatccttaaacactttgacatcgggttcacctctgtcttcactgtggagattgtcctcaagatgacgacctacggagccttcctgcacaagggttccttctgccgcaattacttcaacatgctggacctgctggtggtggccgtgtccctcatctccatgggacttgagtccagtgccatctccgtggtgaagatcctgagggtgctgagggtgctccgaccactcagagccatcaacagagccaaggggttgaagcacgtggtgcagtgcatgttcgtggccatcagcaccatcgggaacatcgtgctggtcactaccctcctacagttcatgtttgcctgcatcggcgtccagctcttcaaggggaagttcttcaggtgcaccgacttgtccaagatgacagaggaggagtgcaggggctactactacgtgtacaaggacggggaccccatgcagatagagctgcgtcaccgcgagtgggtacacagcgacttccacttcgacaatgtgctctcagccatgatgtccctcttcacggtctccaccttcgagggatggcctcagctgctgtacaaggccatagactccaatgcggaggacgtgggtcccatctacaacaaccgtgtggagatggccatcttcttcatcatctacatcatcctcattgccttcttcatgatgaacatctttgtgggcttcgtcattgtcaccttccaggagcagggagagactgagtacaagaactgtgagctggacaagaaccagcgccaatgtgtacagtatgccctgaaggcccgcccactgaggtgctacattcccaaaaacccataccagtaccaggtgtggtacattgtcacctcctcctactttgaatacctgatgtttgccctcatcatgctcaacaccatctgcctcggcatgcagcactacaaccagtcggagcagatgaaccacatctcagacatcctcaatgtggccttcactatcatcttcaccctggagatgatcctcaagctcatggccttcaaggccaggggctactttggagacccctggaatgtgtttgacttcctgattgtcattggcagcatcattgatgtcatcctcagtgagatcgacactttcctggcctccagcgggggactgtattgcctgggtggaggctgcgggaacgttgacccagatgagagtgcccgcatctccagcgccttcttccgcctgttccgtgtcatgaggctgatcaagctgctgagccgggcagaaggagtgcgaaccctcctgtggacgttcatcaagtccttccaggccctaccctacgtggctctgctcatcgtcatgctcttcttcatctacgctgtcatcggcatgcagatgtttgggaagatcgccttggtggatgggacccaaataaaccggaacaacaacttccagaccttcccacaagctgtgctactgctcttcaggtgtgcaacaggtgaggcctggcaggagatcctactggcctgcagctatgggaagctgtgtgacccagagtcggactatgccccaggggaggagtacacatgtggcaccaactttgcatactactacttcatcagcttctacatgctctgtgccttcctggtcatcaacctctttgtggctgtcatcatggacaattttgactacctcacccgggactggtccatcctgggccctcatcacctggatgagttcaaggccatctgggcagagtatgacccagaggctaaggggagaatcaaacacctggacgtggtgaccctgctgagaaggattcagccccctctgggctttgggaagttctgcccacatcgggtagcttgtaagcggctggtgggcatgaacatgcccctgaacagcgacggcacagtcaccttcaatgccacactctttgccctggtccgcacggcactcaagatcaagacggaaggtaactttgagcaggccaacgaggagctgagggccatcatcaagaagatctggaagagaaccagcatgaagctcttggaccaggtcatccctccaataggagatgatgaggtgacagtggggaagttctacgccacattcctcatccaggagcacttccggaagttcatgaaacgccaagaggagtattatggctatcggcccaagaaggacattgtacagatccaggcagggctgcggaccattgaggaagaggcagcccccgagatctgtcgcacggtctcaggagacctggctgctgaggaggagctggagagagccatggtggaggctgcgatggaggagggaatattccggaggactggaggcctgtttggccaggtggacaacttcctggaaaggaccaactccctgccccccgtcatggccaatcagagacccctccagtttgctgagatagagatggaagagatggagtcacctgtcttcttggaggacttcccacaagatccacgcaccaaccccctggctcgtgccaataccaacaatgccaacgccaatgtcgcctatggcaacagcaaccatagcaacagccatgtgttttccagtgtccactatgaaagggagttcccagaagagacagagacgcctgctaccagaggacgagcccttggccaaccctgcagggtcctgggaccccacagcaaaccctgtgtggagatgctgaagggactgctgacccagagggcaatgcccagaggccaggcacctcctgccccctgccagtgccccagggtggagtcctccatgcctgaggacagaaagagctccacaccagggtctcttcatgaggagacaccccacagcaggagcaccagggagaatacttccaggtgctcagcaccagctacagccctgctgatccaaaaggctctggttcgagggggcctgggcaccttggcagctgatgcaaacttcatcatggcaacaggccaggccctggcagatgcctgccaaatggaaccagaggaagtggagatcatggcaacagagctactgaaaggacgagaggccccagagggcatggccagctccctgggatgcctgaacctcgggtcctccctgggcagcctcgaccaacaccagggctcccaggagacccttattcctccaaggctgtgatgcccacacagcatcagcatgggcttagagctggcatgaccaatgggggtggggaagttgctggggtggagaagggctagcccaccgcagcagcctccctccctctcagcagctagatgcatggcctgaggcagggtggtcaggaaccacctcaaaaagtgcggaggaagtagctggacaggccctgcccctcaccagcaagaggcatgattggatggagcttctaatgtcattcaaaaaggcctggtcagtgcctgtctggcctagggccactcccacctgcaggacattaaaatctccaggcctgtgacactggc

SEQ ID NO: 113209 - DNA, 5996 bp, Homo sapiens
  Payload ID: 2141
  Gene Symbol: CACNA1S
  Gene Name: calcium channel, voltage-dependent, L type, alpha 1S subunit
  ENST ID: ENST00000367338
  CDS Start-End: 113-5677
ctcagccgacagcctcagccagcctagtccccaaggcgggggcattggggacacagggaagggaaagcactggggtgggggagcaggagaaagccagattcccagggaagccatggagccatcctcaccccaggatgaaggcctgaggaagaaacagcccaagaagccagttcctgagattctgccaaggccaccccgggccttgttctgcctgaccctggagaaccccctgaggaaggcctgcatcagcattgtagaatggaagcccttcgagacgatcatcttgctcaccatctttgccaattgtgtggccctggccgtgtacctgcccatgccggaagatgacaacaactctctgaacctcggcctggagaagctggagtatttcttcctcattgtcttctcgattgaagccgccatgaagatcattgcctacggcttcttattccaccaggacgcttacctgcgcagtggctggaatgtgctggacttcaccattgtcttcctgggggtcttcaccgtgattctggaacaggttaacgtcatccaaagccacacagccccaatgagcagcaaaggagccggcttggatgtcaaggccctcagagccttccgagtgctcagacccctccggctggtgtcgggggtgcctagcctgcaggtggtcctgaactccatcttcaaggccatgctccccctctttcacatcgccctgctggtcctctttatggtcatcatctatgccatcatcgggctggagctcttcaagggcaagatgcacaagacctgctacttcattggtacagatatcgtggccacggtggagaatgaagagccatcgccctgcgccaggacgggctcagggcgccggtgcaccatcaatggcagtgagtgccggggcggctggccagggcccaaccatggcatcacccacttcgacaacttcggcttctccatgctcaccgtgtaccagtgcattaccatggagggatggactgacgtcctttactgggtcaatgatgccatcgggaatgagtggccctggatctattttgtcaccctcattttgctgggatccttcttcatcctcaacctggtgctgggtgtcctgagtggggaattcaccaaggagcgggagaaggccaagtccaggggaaccttccagaagctccgggagaagcagcaactagatgaggaccttcggggctacatgagctggatcacgcagggcgaggtcatggatgttgaggacttcagagaaggaaaactgtctttggatgaaggtggctctgacacagagagcctgtatgaaattgcaggcttgaacaaaatcatccagttcatccgacattggaggcagtggaaccgcatctttcgctggaagtgccatgacatcgtgaagtccaaggtcttctattggctggtgattctcatcgttgccctcaacaccctgtctatcgcctcagagcaccacaaccagcctctctggctgacccgtttgcaagacattgccaaccgggtgctgctgtccctcttcaccactgagatgctgatgaagatgtacgggctgggcctgcgccagtacttcatgtctatcttcaaccgcttcgactgcttcgtggtgtgtagcggtatcctggagatcctgctggtggagtcgggtgccatgacacccctgggcatctccgtgctccgctgcatccgcctcctgaggatcttcaagatcaccaaatattggacgtcgctgagcaacctggtggcatccctgctcaactccatccgctccatcgcctccctgctgctgctgctcttcctcttcatcgtcatcttcgccctcctgggcatgcagctctttggggggaggtatgactttgaagacacagaagtacggcgcagcaactttgacaactttccccaagccctcatcagcgtcttccaggtactgacaggggaagactggacctcaatgatgtacaatgggatcatggcctacggcgggccgtcctaccctggcatgcttgtgtgcatttacttcatcatccttttcgtctgtggcaactacatcctgctcaatgtcttcctggccattgccgtggacaacctggccgaggcggagagcctgacttctgcccagaaggccaaggctgaggagaaaaaacgcaggaagatgtccaagggtctcccagacaagtcagaagaggagaagtcaacgatggccaagaagctggagcagaaacccaagggtgagggcatccccaccactgccaagctgaaaatcgatgagtttgaatctaatgtcaatgaggtgaaggatccctacccctcagccgacttcccaggggatgacgaggaagatgagcctgagatcccgctgagcccccgaccacgtcccctggctgagctgcagctgaaagagaaggccgtgcccattccagaagccagctccttcttcatcttcagccccaccaataagatccgtgtcctgtgtcaccgcatcgtcaatgccacctggtttaccaacttcatcctgctcttcatcctgctcagcagcgctgcactggctgcggaagaccccatccgggctgattccatgagaaatcagatccttaaacactttgacatcgggttcacctctgtcttcactgtggagattgtcctcaagatgacgacctacggagccttcctgcacaagggttccttctgccgcaattacttcaacatgctggacctgctggtggtggccgtgtccctcatctccatgggacttgagtccagtgccatctccgtggtgaagatcctgagggtgctgagggtgctccgaccactcagagccatcaacagagccaaggggttgaagcacgtggtgcagtgcatgttcgtggccatcagcaccatcgggaacatcgtgctggtcactaccctcctacagttcatgtttgcctgcatcggcgtccagctcttcaaggggaagttcttcaggtgcaccgacttgtccaagatgacagaggaggagtgcaggggctactactacgtgtacaaggacggggaccccatgcagatagagctgcgtcaccgcgagtgggtacacagcgacttccacttcgacaatgtgctctcagccatgatgtccctcttcacggtctccaccttcgagggatggcctcagctgctgtacaaggccatagactccaatgcggaggacgtgggtcccatctacaacaaccgtgtggagatggccatcttcttcatcatctacatcatcctcattgccttcttcatgatgaacatctttgtgggcttcgtcattgtcaccttccaggagcagggagagactgagtacaagaactgtgagctggacaagaaccagcgccaatgtgtacagtatgccctgaaggcccgcccactgaggtgctacattcccaaaaacccataccagtaccaggtgtggtacattgtcacctcctcctactttgaatacctgatgtttgccctcatcatgctcaacaccatctgcctcggcatgcagcactacaaccagtcggagcagatgaaccacatctcagacatcctcaatgtggccttcactatcatcttcaccctggagatgatcctcaagctcatggccttcaaggccaggggctactttggagacccctggaatgtgtttgacttcctgattgtcattggcagcatcattgatgtcatcctcagtgagatcgacgacccagatgagagtgcccgcatctccagcgccttcttccgcctgttccgtgtcatgaggctgatcaagctgctgagccgggcagaaggagtgcgaaccctcctgtggacgttcatcaagtccttccaggccctaccctacgtggctctgctcatcgtcatgctcttcttcatctacgctgtcatcggcatgcagatgtttgggaagatcgccttggtggatgggacccaaataaaccggaacaacaacttccagaccttcccacaagctgtgctactgctcttcaggtgtgcaacaggtgaggcctggcaggagatcctactggcctgcagctatgggaagctgtgtgacccagagtcggactatgccccaggggaggagtacacatgtggcaccaactttgcatactactacttcatcagcttctacatgctctgtgccttcctggtcatcaacctctttgtggctgtcatcatggacaattttgactacctcacccgggactggtccatcctgggccctcatcacctggatgagttcaaggccatctgggcagagtatgacccagaggctaaggggagaatcaaacacctggacgtggtgaccctgctgagaaggattcagccccctctgggctttgggaagttctgcccacatcgggtagcttgtaagcggctggtgggcatgaacatgcccctgaacagcgacggcacagtcaccttcaatgccacactctttgccctggtccgcacggcactcaagatcaagacggaaggtaactttgagcaggccaacgaggagctgagggccatcatcaagaagatctggaagagaaccagcatgaagctcttggaccaggtcatccctccaataggagatgatgaggtgacagtggggaagttctacgccacattcctcatccaggagcacttccggaagttcatgaaacgccaagaggagtattatggctatcggcccaagaaggacattgtacagatccaggcagggctgcggaccattgaggaagaggcagcccccgagatctgtcgcacggtctcaggagacctggctgctgaggaggagctggagagagccatggtggaggctgcgatggaggagggaatattccggaggactggaggcctgtttggccaggtggacaacttcctggaaaggaccaactccctgccccccgtcatggccaatcagagacccctccagtttgctgagatagagatggaagagatggagtcacctgtcttcttggaggacttcccacaagatccacgcaccaaccccctggctcgtgccaataccaacaatgccaacgccaatgtcgcctatggcaacagcaaccatagcaacagccatgtgttttccagtgtccactatgaaagggagttcccagaagagacagagacgcctgctaccagaggacgagcccttggccaaccctgcagggtcctgggaccccacagcaaaccctgtgtggagatgctgaagggactgctgacccagagggcaatgcccagaggccaggcacctcctgccccctgccagtgccccagggtggagtcctccatgcctgaggacagaaagagctccacaccagggtctcttcatgaggagacaccccacagcaggagcaccagggagaatacttccaggtgctcagcaccagctacagccctgctgatccaaaaggctctggttcgagggggcctgggcaccttggcagctgatgcaaacttcatcatggcaacaggccaggccctggcagatgcctgccaaatggaaccagaggaagtggagatcatggcaacagagctactgaaaggacgagaggccccagagggcatggccagctccctgggatgcctgaacctcgggtcctccctgggcagcctcgaccaacaccagggctcccaggagacccttattcctccaaggctgtgatgcccacacagcatcagcatgggcttagagctggcatgaccaatgggggtggggaagttgctggggtggagaagggctagcccaccgcagcagcctccctccctctcagcagctagatgcatggcctgaggcagggtggtcaggaaccacctcaaaaagtgcggaggaagtagctggacaggccctgcccctcaccagcaagaggcatgattggatggagcttctaatgtcattcaaaaaggcctggtcagtgcctgtctggcctagggccactcccacctgcaggacattaaaatctccaggcctgtgacactggcaa

SEQ ID NO: 113210 - DNA, 7158 bp, Homo sapiens
  Payload ID: 2142
  Gene Symbol: CACNA1B
  Gene Name: calcium channel, voltage-dependent, N type, alpha 1B subunit
  ENST ID: ENST00000277549
  CDS Start-End: 146-6859
gcggcggcggctgcggcggtggggccgggcgaggtccgctgcggtcccggcggctccgtggctgctccgctctgagcgcctggcgcgccccgcgccctccctgccggggccgctgggccggggatgcacgcggggcccgggagccatggtccgcttcggggacgagctgggcggccgctatgggggccccggcggcggagagcgggcccggggcggcggggccggcggggcggggggcccgggtcccggggggctgcagcccggccagcgggtcctctacaagcaatcgatcgcgcagcgcgcgcggaccatggcgctgtacaaccccatcccggtcaagcagaactgcttcaccgtcaaccgctcgctcttcgtcttcagcgaggacaacgtcgtccgcaaatacgcgaagcgcatcaccgagtggcctccattcgagtatatgatcctggccaccatcatcgccaactgcatcgtgctggccctggagcagcacctccctgatggggacaaaacgcccatgtccgagcggctggacgacacggagccctatttcatcgggatcttttgcttcgaggcagggatcaaaatcatcgctctgggctttgtcttccacaagggctcttacctgcggaacggctggaacgtcatggacttcgtggtcgtcctcacagggatccttgccacggctggaactgacttcgacctgcgaacactgagggctgtgcgtgtgctgaggcccctgaagctggtgtctgggattccaagtttgcaggtggtgctcaagtccatcatgaaggccatggttccactcctgcagattgggctgcttctcttctttgccatcctcatgtttgccatcattggcctggagttctacatgggcaagttccacaaggcctgtttccccaacagcacagatgcggagcccgtgggtgacttcccctgtggcaaggaggccccagcccggctgtgcgagggcgacactgagtgccgggagtactggccaggacccaactttggcatcaccaactttgacaatatcctgtttgccatcttgacggtgttccagtgcatcaccatggagggctggactgacatcctctataatacaaacgatgcggccggcaacacctggaactggctctacttcatccctctcatcatcatcggctccttcttcatgctcaacctggtgctgggcgtgctctcgggggagtttgccaaggagcgagagagggtggagaaccgccgcgccttcctgaagctgcgccggcagcagcagatcgagcgagagctcaacgggtacctggagtggatcttcaaggcggaggaagtcatgctggccgaggaggacaggaatgcagaggagaagtcccctttggacgtgctgaagagagcggccaccaagaagagcagaaatgacctgatccacgcagaggagggagaggaccggtttgcagatctctgtgctgttggatcccccttcgcccgcgccagcctcaagagcgggaagacagagagctcgtcatacttccggaggaaggagaagatgttccggttttttatccggcgcatggtgaaggctcagagcttctactgggtggtgctgtgcgtggtggccctgaacacactgtgtgtggccatggtgcattacaaccagccgcggcggcttaccacgaccctgtattttgcagagtttgttttcctgggtctcttcctcacagagatgtccctgaagatgtatggcctggggcccagaagctacttccggtcctccttcaactgcttcgactttggggtcatcgtggggagcgtctttgaagtggtctgggcggccatcaagccgggaagctcctttgggatcagtgtgctgcgggccctccgcctgctgaggatcttcaaagtcacgaagtactggagctccctgcggaacctggtggtgtccctgctgaactccatgaagtccatcatcagcctgctcttcttgctcttcctgttcattgtggtcttcgccctgctggggatgcagctgtttgggggacagttcaacttccaggatgagactcccacaaccaacttcgacaccttccctgccgccatcctcactgtcttccagatcctgacgggagaggactggaatgcagtgatgtatcacgggatcgaatcgcaaggcggcgtcagcaaaggcatgttctcgtccttttacttcattgtcctgacactgttcggaaactacactctgctgaatgtctttctggccatcgctgtggacaacctggccaacgcccaagagctgaccaaggatgaagaggagatggaagaagcagccaatcagaagcttgctctgcaaaaggccaaagaagtggctgaagtcagccccatgtctgccgcgaacatctccatcgccgccaggcagcagaactcggccaaggcgcgctcggtgtgggagcagcgggccagccagctacggctgcagaacctgcgggccagctgcgaggcgctgtacagcgagatggaccccgaggagcggctgcgcttcgccactacgcgccacctgcggcccgacatgaagacgcacctggaccggccgctggtggtggagctgggccgcgacggcgcgcgggggcccgtgggaggcaaagcccgacctgaggctgcggaggcccccgagggcgtcgaccctccgcgcaggcaccaccggcaccgcgacaaggacaagacccccgcggcgggggaccaggaccgagcagaggccccgaaggcggagagcggggagcccggtgcccgggaggagcggccgcggccgcaccgcagccacagcaaggaggccgcggggcccccggaggcgcggagcgagcgcggccgaggcccaggccccgagggcggccggcggcaccaccggcgcggctccccggaggaggcggccgagcgggagccccgacgccaccgcgcgcaccggcaccaggatccgagcaaggagtgcgccggcgccaagggcgagcggcgcgcgcggcaccgcggcggcccccgagcggggccccgggaggcggagagcggggaggagccggcgcggcggcaccgggcccggcacaaggcgcagcctgctcacgaggctgtggagaaggagaccacggagaaggaggccacggagaaggaggctgagatagtggaagccgacaaggaaaaggagctccggaaccaccagccccgggagccacactgtgacctggagaccagtgggactgtgactgtgggtcccatgcacacactgcccagcacctgtctccagaaggtggaggaacagccagaggatgcagacaatcagcggaacgtcactcgcatgggcagtcagcccccagacccgaacactattgtacatatcccagtgatgctgacgggccctcttggggaagccacggtcgttcccagtggtaacgtggacctggaaagccaagcagaggggaagaaggaggtggaagcggatgacgtgatgaggagcggcccccggcctatcgtcccatacagctccatgttctgtttaagccccaccaacctgctccgccgcttctgccactacatcgtgaccatgaggtacttcgaggtggtcattctcgtggtcatcgccttgagcagcatcgccctggctgctgaggacccagtgcgcacagactcgcccaggaacaacgctctgaaatacctggattacattttcactggtgtctttacctttgagatggtgataaagatgatcgacttgggactgctgcttcaccctggagcctatttccgggacttgtggaacattctggacttcattgtggtcagtggcgccctggtggcgtttgctttctcaggatccaaagggaaagacatcaataccatcaagtctctgagagtccttcgtgtcctgcggcccctcaagaccatcaaacggctgcccaagctcaaggctgtgtttgactgtgtggtgaactccctgaagaatgtcctcaacatcttgattgtctacatgctcttcatgttcatatttgccgtcattgcggtgcagctcttcaaagggaagtttttctactgcacagatgaatccaaggagctggagagggactgcaggggtcagtatttggattatgagaaggaggaagtggaagctcagcccaggcagtggaagaaatacgactttcactacgacaatgtgctctgggctctgctgacgctgttcacagtgtccacgggagaaggctggcccatggtgctgaaacactccgtggatgccacctatgaggagcagggtccaagccctgggtaccgcatggagctgtccatcttctacgtggtctactttgtggtctttcccttcttcttcgtcaacatctttgtggctttgatcatcatcaccttccaggagcagggggacaaggtgatgtctgaatgcagcctggagaagaacgagagggcttgcattgacttcgccatcagcgccaaacccctgacacggtacatgccccaaaaccggcagtcgttccagtataagacgtggacatttgtggtctccccgccctttgaatacttcatcatggccatgatagccctcaacactgtggtgctgatgatgaagttctatgatgcaccctatgagtacgagctgatgctgaaatgcctgaacatcgtgttcacatccatgttctccatggaatgcgtgctgaagatcatcgcctttggggtgctgaactatttcagagatgcctggaatgtctttgactttgtcactgtgttgggaagtattactgatattttagtaacagagattgcggtaaagaacaatttcatcaacctcagcttcctccgcctctttcgagctgcgcggctgatcaagctgctccgccagggctacaccatccgcatcctgctgtggacctttgtccagtccttcaaggccctgccctacgtgtgtctgctcattgccatgctgttcttcatctacgccatcatcggcatgcaggtgtttgggaatattgccctggatgatgacaccagcatcaaccgccacaacaacttccggacgtttttgcaagccctgatgctgctgttcaggagcgccacgggggaggcctggcacgagatcatgctgtcctgcctgagcaaccaggcctgtgatgagcaggccaatgccaccgagtgtggaagtgactttgcctacttctacttcgtctccttcatcttcctgtgctcctttctgatgttgaacctctttgtggctgtgatcatggacaattttgagtacctcacgcgggactcttccatcctaggtcctcaccacttggatgagttcatccgggtctgggctgaatacgacccggctgcgtgtgggcgcatcagttacaatgacatgtttgagatgctgaaacacatgtccccgcctctggggctggggaagaaatgccctgctcgagttgcttacaagcgcctggttcgcatgaacatgcccatctccaacgaggacatgactgttcacttcacgtccacgctgatggccctcatccggacggcactggagatcaagctggccccagctgggacaaagcagcatcagtgtgacgcggagttgaggaaggagatttccgttgtgtgggccaatctgccccagaagactttggacttgctggtaccaccccataagcctgatgagatgacagtggggaaggtttatgcagctctgatgatattcgacttctacaagcagaacaaaaccaccagagaccagatgcagcaggctcctggaggcctctcccagatgggtcctgtgtccctgttccaccctctgaaggccaccctggagcagacacagccggctgtgctccgaggagcccgggttttccttcgacagaagagttccacctccctcagcaatggcggggccatacaaaaccaagagagtggcatcaaagagtctgtctcctggggcactcaaaggacccaggatgcaccccatgaggccaggccacccctggagcgtggccactccacagagatccctgtggggcggtcaggagcactggctgtggacgttcagatgcagagcataacccggaggggccctgatggggagccccagcctgggctggagagccagggtcgagcggcctccatgccccgccttgcggccgagactcagcccgtcacagatgccagccccatgaagcgctccatctccacgctggcccagcggccccgtgggactcatctttgcagcaccaccccggaccgcccaccccctagccaggcgtcgtcgcaccaccaccaccaccgctgccaccgccgcagggacaggaagcagaggtccctggagaaggggcccagcctgtctgccgatatggatggcgcaccaagcagtgctgtggggccggggctgcccccgggagaggggcctacaggctgccggcgggaacgagagcgccggcaggagcggggccggtcccaggagcggaggcagccctcatcctcctcctcggagaagcagcgcttctactcctgcgaccgctttgggggccgtgagcccccgaagcccaagccctccctcagcagccacccaacgtcgccaacagctggccaggagccgggaccccacccacaggccggctcagccgtgggctttccgaacacaacgccctgctgcagagagaccccctcagccagcccctggcccctggctctcgaattggctctgacccttacctggggcagcgtctggacagtgaggcctctgtccacgccctgcctgaggacactctcactttcgaggaggctgtggccaccaactcgggccgctcctccaggacttcctacgtgtcctccctgacctcccagtctcaccctctccgccgcgtgcccaacggttaccactgcaccctgggactcagctcgggtggccgagcacggcacagctaccaccaccctgaccaagaccactggtgctagctgcaccgtgaccgctcagacgcctgcatgcagcaggcgtgtgttccagtggatgagttttatcatccacacggggcagccggccctcgggggaggccttgcccaccttggtgaggctcctgtggcccctccctccccctcctcccctcttttactctagacgacgaataaagccctgtt

SEQ ID NO: 113211 - DNA, 7158 bp, Homo sapiens
  Payload ID: 2142
  Gene Symbol: CACNA1B
  Gene Name: calcium channel, voltage-dependent, N type, alpha 1B subunit
  Uniprot ID: Q00975
  ENST ID: ENST00000277551
  CDS Start-End: 146-6859
gcggcggcggctgcggcggtggggccgggcgaggtccgctgcggtcccggcggctccgtggctgctccgctctgagcgcctggcgcgccccgcgccctccctgccggggccgctgggccggggatgcacgcggggcccgggagccatggtccgcttcggggacgagctgggcggccgctatgggggccccggcggcggagagcgggcccggggcggcggggccggcggggcggggggcccgggtcccggggggctgcagcccggccagcgggtcctctacaagcaatcgatcgcgcagcgcgcgcggaccatggcgctgtacaaccccatcccggtcaagcagaactgcttcaccgtcaaccgctcgctcttcgtcttcagcgaggacaacgtcgtccgcaaatacgcgaagcgcatcaccgagtggcctccattcgagtatatgatcctggccaccatcatcgccaactgcatcgtgctggccctggagcagcacctccctgatggggacaaaacgcccatgtccgagcggctggacgacacggagccctatttcatcgggatcttttgcttcgaggcagggatcaaaatcatcgctctgggctttgtcttccacaagggctcttacctgcggaacggctggaacgtcatggacttcgtggtcgtcctcacagggatccttgccacggctggaactgacttcgacctgcgaacactgagggctgtgcgtgtgctgaggcccctgaagctggtgtctgggattccaagtttgcaggtggtgctcaagtccatcatgaaggccatggttccactcctgcagattgggctgcttctcttctttgccatcctcatgtttgccatcattggcctggagttctacatgggcaagttccacaaggcctgtttccccaacagcacagatgcggagcccgtgggtgacttcccctgtggcaaggaggccccagcccggctgtgcgagggcgacactgagtgccgggagtactggccaggacccaactttggcatcaccaactttgacaatatcctgtttgccatcttgacggtgttccagtgcatcaccatggagggctggactgacatcctctataatacaaacgatgcggccggcaacacctggaactggctctacttcatccctctcatcatcatcggctccttcttcatgctcaacctggtgctgggcgtgctctcgggggagtttgccaaggagcgagagagggtggagaaccgccgcgccttcctgaagctgcgccggcagcagcagatcgagcgagagctcaacgggtacctggagtggatcttcaaggcggaggaagtcatgctggccgaggaggacaggaatgcagaggagaagtcccctttggacgtgctgaagagagcggccaccaagaagagcagaaatgacctgatccacgcagaggagggagaggaccggtttgcagatctctgtgctgttggatcccccttcgcccgcgccagcctcaagagcgggaagacagagagctcgtcatacttccggaggaaggagaagatgttccggttttttatccggcgcatggtgaaggctcagagcttctactgggtggtgctgtgcgtggtggccctgaacacactgtgtgtggccatggtgcattacaaccagccgcggcggcttaccacgaccctgtattttgcagagtttgttttcctgggtctcttcctcacagagatgtccctgaagatgtatggcctggggcccagaagctacttccggtcctccttcaactgcttcgactttggggtcatcgtggggagcgtctttgaagtggtctgggcggccatcaagccgggaagctcctttgggatcagtgtgctgcgggccctccgcctgctgaggatcttcaaagtcacgaagtactggagctccctgcggaacctggtggtgtccctgctgaactccatgaagtccatcatcagcctgctcttcttgctcttcctgttcattgtggtcttcgccctgctggggatgcagctgtttgggggacagttcaacttccaggatgagactcccacaaccaacttcgacaccttccctgccgccatcctcactgtcttccagatcctgacgggagaggactggaatgcagtgatgtatcacgggatcgaatcgcaaggcggcgtcagcaaaggcatgttctcgtccttttacttcattgtcctgacactgttcggaaactacactctgctgaatgtctttctggccatcgctgtggacaacctggccaacgcccaagagctgaccaaggatgaagaggagatggaagaagcagccaatcagaagcttgctctgcaaaaggccaaagaagtggctgaagtcagccccatgtctgccgcgaacatctccatcgccgccaggcagcagaactcggccaaggcgcgctcggtgtgggagcagcgggccagccagctacggctgcagaacctgcgggccagctgcgaggcgctgtacagcgagatggaccccgaggagcggctgcgcttcgccactacgcgccacctgcggcccgacatgaagacgcacctggaccggccgctggtggtggagctgggccgcgacggcgcgcgggggcccgtgggaggcaaagcccgacctgaggctgcggaggcccccgagggcgtcgaccctccgcgcaggcaccaccggcaccgcgacaaggacaagacccccgcggcgggggaccaggaccgagcagaggccccgaaggcggagagcggggagcccggtgcccgggaggagcggccgcggccgcaccgcagccacagcaaggaggccgcggggcccccggaggcgcggagcgagcgcggccgaggcccaggccccgagggcggccggcggcaccaccggcgcggctccccggaggaggcggccgagcgggagccccgacgccaccgcgcgcaccggcaccaggatccgagcaaggagtgcgccggcgccaagggcgagcggcgcgcgcggcaccgcggcggcccccgagcggggccccgggaggcggagagcggggaggagccggcgcggcggcaccgggcccggcacaaggcgcagcctgctcacgaggctgtggagaaggagaccacggagaaggaggccacggagaaggaggctgagatagtggaagccgacaaggaaaaggagctccggaaccaccagccccgggagccacactgtgacctggagaccagtgggactgtgactgtgggtcccatgcacacactgcccagcacctgtctccagaaggtggaggaacagccagaggatgcagacaatcagcggaacgtcactcgcatgggcagtcagcccccagacccgaacactattgtacatatcccagtgatgctgacgggccctcttggggaagccacggtcgttcccagtggtaacgtggacctggaaagccaagcagaggggaagaaggaggtggaagcggatgacgtgatgaggagcggcccccggcctatcgtcccatacagctccatgttctgtttaagccccaccaacctgctccgccgcttctgccactacatcgtgaccatgaggtacttcgaggtggtcattctcgtggtcatcgccttgagcagcatcgccctggctgctgaggacccagtgcgcacagactcgcccaggaacaacgctctgaaatacctggattacattttcactggtgtctttacctttgagatggtgataaagatgatcgacttgggactgctgcttcaccctggagcctatttccgggacttgtggaacattctggacttcattgtggtcagtggcgccctggtggcgtttgctttctcaggatccaaagggaaagacatcaataccatcaagtctctgagagtccttcgtgtcctgcggcccctcaagaccatcaaacggctgcccaagctcaaggctgtgtttgactgtgtggtgaactccctgaagaatgtcctcaacatcttgattgtctacatgctcttcatgttcatatttgccgtcattgcggtgcagctcttcaaagggaagtttttctactgcacagatgaatccaaggagctggagagggactgcaggggtcagtatttggattatgagaaggaggaagtggaagctcagcccaggcagtggaagaaatacgactttcactacgacaatgtgctctgggctctgctgacgctgttcacagtgtccacgggagaaggctggcccatggtgctgaaacactccgtggatgccacctatgaggagcagggtccaagccctgggtaccgcatggagctgtccatcttctacgtggtctactttgtggtctttcccttcttcttcgtcaacatctttgtggctttgatcatcatcaccttccaggagcagggggacaaggtgatgtctgaatgcagcctggagaagaacgagagggcttgcattgacttcgccatcagcgccaaacccctgacacggtacatgccccaaaaccggcagtcgttccagtataagacgtggacatttgtggtctccccgccctttgaatacttcatcatggccatgatagccctcaacactgtggtgctgatgatgaagttctatgatgcaccctatgagtacgagctgatgctgaaatgcctgaacatcgtgttcacatccatgttctccatggaatgcgtgctgaagatcatcgcctttggggtgctgaactatttcagagatgcctggaatgtctttgactttgtcactgtgttgggaagtattactgatattttagtaacagagattgcggaaacgaacaatttcatcaacctcagcttcctccgcctctttcgagctgcgcggctgatcaagctgctccgccagggctacaccatccgcatcctgctgtggacctttgtccagtccttcaaggccctgccctacgtgtgtctgctcattgccatgctgttcttcatctacgccatcatcggcatgcaggtgtttgggaatattgccctggatgatgacaccagcatcaaccgccacaacaacttccggacgtttttgcaagccctgatgctgctgttcaggagcgccacgggggaggcctggcacgagatcatgctgtcctgcctgagcaaccaggcctgtgatgagcaggccaatgccaccgagtgtggaagtgactttgcctacttctacttcgtctccttcatcttcctgtgctcctttctgatgttgaacctctttgtggctgtgatcatggacaattttgagtacctcacgcgggactcttccatcctaggtcctcaccacttggatgagttcatccgggtctgggctgaatacgacccggctgcgtgtgggcgcatcagttacaatgacatgtttgagatgctgaaacacatgtccccgcctctggggctggggaagaaatgccctgctcgagttgcttacaagcgcctggttcgcatgaacatgcccatctccaacgaggacatgactgttcacttcacgtccacgctgatggccctcatccggacggcactggagatcaagctggccccagctgggacaaagcagcatcagtgtgacgcggagttgaggaaggagatttccgttgtgtgggccaatctgccccagaagactttggacttgctggtaccaccccataagcctgatgagatgacagtggggaaggtttatgcagctctgatgatattcgacttctacaagcagaacaaaaccaccagagaccagatgcagcaggctcctggaggcctctcccagatgggtcctgtgtccctgttccaccctctgaaggccaccctggagcagacacagccggctgtgctccgaggagcccgggttttccttcgacagaagagttccacctccctcagcaatggcggggccatacaaaaccaagagagtggcatcaaagagtctgtctcctggggcactcaaaggacccaggatgcaccccatgaggccaggccacccctggagcgtggccactccacagagatccctgtggggcggtcaggagcactggctgtggacgttcagatgcagagcataacccggaggggccctgatggggagccccagcctgggctggagagccagggtcgagcggcctccatgccccgccttgcggccgagactcagcccgtcacagatgccagccccatgaagcgctccatctccacgctggcccagcggccccgtgggactcatctttgcagcaccaccccggaccgcccaccccctagccaggcgtcgtcgcaccaccaccaccaccgctgccaccgccgcagggacaggaagcagaggtccctggagaaggggcccagcctgtctgccgatatggatggcgcaccaagcagtgctgtggggccggggctgcccccgggagaggggcctacaggctgccggcgggaacgagagcgccggcaggagcggggccggtcccaggagcggaggcagccctcatcctcctcctcggagaagcagcgcttctactcctgcgaccgctttgggggccgtgagcccccgaagcccaagccctccctcagcagccacccaacgtcgccaacagctggccaggagccgggaccccacccacaggccggctcagccgtgggctttccgaacacaacgccctgctgcagagagaccccctcagccagcccctggcccctggctctcgaattggctctgacccttacctggggcagcgtctggacagtgaggcctctgtccacgccctgcctgaggacactctcactttcgaggaggctgtggccaccaactcgggccgctcctccaggacttcctacgtgtcctccctgacctcccagtctcaccctctccgccgcgtgcccaacggttaccactgcaccctgggactcagctcgggtggccgagcacggcacagctaccaccaccctgaccaagaccactggtgctagctgcaccgtgaccgctcagacgcctgcatgcagcaggcgtgtgttccagtggatgagttttatcatccacacggggcagccggccctcgggggaggccttgcccaccttggtgaggctcctgtggcccctccctccccctcctcccctcttttactctagacgacgaataaagccctgtt

SEQ ID NO: 113212 - DNA, 9647 bp, Homo sapiens
  Payload ID: 2142
  Gene Symbol: CACNA1B
  Gene Name: calcium channel, voltage-dependent, N type, alpha 1B subunit
  ENST ID: ENST00000371355
  CDS Start-End: 1-7023
atggtccgcttcggggacgagctgggcggccgctatgggggccccggcggcggagagcgggcccggggcggcggggccggcggggcggggggcccgggtcccggggggctgcagcccggccagcgggtcctctacaagcaatcgatcgcgcagcgcgcgcggaccatggcgctgtacaaccccatcccggtcaagcagaactgcttcaccgtcaaccgctcgctcttcgtcttcagcgaggacaacgtcgtccgcaaatacgcgaagcgcatcaccgagtggccaccattcgagtatatgatcctggccaccatcatcgccaactgcatcgtgctggccctggagcagcacctccctgatggggacaaaacgcccatgtccgagcggctggacgacacggagccctatttcatcgggatcttttgcttcgaggcagggatcaaaatcatcgctctgggctttgtcttccacaagggctcttacctgcggaacggctggaacgtcatggacttcgtggtcgtcctcacagggatccttgccacggctggaactgacttcgacctgcgaacactgagggctgtgcgtgtgctgaggcccctgaagctggtgtctgggattccaagtttgcaggtggtgctcaagtccatcatgaaggccatggttccactcctgcagattgggctgcttctcttctttgccatcctcatgtttgccatcattggcctggagttctacatgggcaagttccacaaggcctgtttccccaacagcacagatgcggagcccgtgggtgacttcccctgtggcaaggaggccccagcccggctgtgcgagggcgacactgagtgccgggagtactggccaggacccaactttggcatcaccaactttgacaatatcctgtttgccatcttgacggtgttccagtgcatcaccatggagggctggactgacatcctctataatacaaacgatgcggccggcaacacctggaactggctctacttcatccctctcatcatcatcggctccttcttcatgctcaacctggtgctgggcgtgctctcgggggagtttgccaaggagcgagagagggtggagaaccgccgcgccttcctgaagctgcgccggcagcagcagatcgagcgagagctcaacgggtacctggagtggatcttcaaggcggaggaagtcatgctggccgaggaggacaggaatgcagaggagaagtcccctttggacgcagtgctgaagagagcggccaccaagaagagcagaaatgacctgatccacgcagaggagggagaggaccggtttgcagatctctgtgctgttggatcccccttcgcccgcgccagcctcaagagcgggaagacagagagctcgtcatacttccggaggaaggagaagatgttccggttttttatccggcgcatggtgaaggctcagagcttctactgggtggtgctgtgcgtggtggccctgaacacactgtgtgtggccatggtgcattacaaccagccgcggcggcttaccacgaccctgtattttgcagagtttgttttcctgggtctcttcctcacagagatgtccctgaagatgtatggcctggggcccagaagctacttccggtcctccttcaactgcttcgactttggggtcatcgtggggagcgtctttgaagtggtctgggcggccatcaagccgggaagctcctttgggatcagtgtgctgcgggccctccgcctgctgaggatcttcaaagtcacgaagtactggagctccctgcggaacctggtggtgtccctgctgaactccatgaagtccatcatcagcctgctcttcttgctcttcctgttcattgtggtcttcgccctgctggggatgcagctgtttgggggacagttcaacttccaggatgagactcccacaaccaacttcgacaccttccctgccgccatcctcactgtcttccagatcctgacgggagaggactggaatgcagtgatgtatcacgggatcgaatcgcaaggcggcgtcagcaaaggcatgttctcgtccttttacttcattgtcctgacactgttcggaaactacactctgctgaatgtctttctggccatcgctgtggacaacctggccaacgcccaagagctgaccaaggatgaagaggagatggaagaagcagccaatcagaagcttgctctgcaaaaggccaaagaagtggctgaagtcagccccatgtctgccgcgaacatctccatcgccgccaggcagcagaactcggccaaggcgcgctcggtgtgggagcagcgggccagccagctacggctgcagaacctgcgggccagctgcgaggcgctgtacagcgagatggaccccgaggagcggctgcgcttcgccactacgcgccacctgcggcccgacatgaagacgcacctggaccggccgctggtggtggagctgggccgcgacggcgcgcgggggcccgtgggaggcaaagcccgacctgaggctgcggaggcccccgagggcgtcgaccctccgcgcaggcaccaccggcaccgcgacaaggacaagacccccgcggcgggggaccaggaccgagcagaggccccgaaggcggagagcggggagcccggtgcccgggaggagcggccgcggccgcaccgcagccacagcaaggaggccgcggggcccccggaggcgcggagcgagcgcggccgaggcccaggccccgagggcggccggcggcaccaccggcgcggctccccggaggaggcggccgagcgggagccccgacgccaccgcgcgcaccggcaccaggatccgagcaaggagtgcgccggcgccaagggcgagcggcgcgcgcggcaccgcggcggcccccgagcggggccccgggaggcggagagcggggaggagccggcgcggcggcaccgggcccggcacaaggcgcagcctgctcacgaggctgtggagaaggagaccacggagaaggaggccacggagaaggaggctgagatagtggaagccgacaaggaaaaggagctccggaaccaccagccccgggagccacactgtgacctggagaccagtgggactgtgactgtgggtcccatgcacacactgcccagcacctgtctccagaaggtggaggaacagccagaggatgcagacaatcagcggaacgtcactcgcatgggcagtcagcccccagacccgaacactattgtacatatcccagtgatgctgacgggccctcttggggaagccacggtcgttcccagtggtaacgtggacctggaaagccaagcagaggggaagaaggaggtggaagcggatgacgtgatgaggagcggcccccggcctatcgtcccatacagctccatgttctgtttaagccccaccaacctgctccgccgcttctgccactacatcgtgaccatgaggtacttcgaggtggtcattctcgtggtcatcgccttgagcagcatcgccctggctgctgaggacccagtgcgcacagactcgcccaggaacaacgctctgaaatacctggattacattttcactggtgtctttacctttgagatggtgataaagatgatcgacttgggactgctgcttcaccctggagcctatttccgggacttgtggaacattctggacttcattgtggtcagtggcgccctggtggcgtttgctttctcaggatccaaagggaaagacatcaataccatcaagtctctgagagtccttcgtgtcctgcggcccctcaagaccatcaaacggctgcccaagctcaaggctgtgtttgactgtgtggtgaactccctgaagaatgtcctcaacatcttgattgtctacatgctcttcatgttcatatttgccgtcattgcggtgcagctcttcaaagggaagtttttctactgcacagatgaatccaaggagctggagagggactgcaggggtcagtatttggattatgagaaggaggaagtggaagctcagcccaggcagtggaagaaatacgactttcactacgacaatgtgctctgggctctgctgacgctgttcacagtgtccacgggagaaggctggcccatggtgctgaaacactccgtggatgccacctatgaggagcagggtccaagccctgggtaccgcatggagctgtccatcttctacgtggtctactttgtggtctttcccttcttcttcgtcaacatctttgtggctttgatcatcatcaccttccaggagcagggggacaaggtgatgtctgaatgcagcctggagaagaacgagagggcttgcattgacttcgccatcagcgccaaacccctgacacggtacatgccccaaaaccggcagtcgttccagtataagacgtggacatttgtggtctccccgccctttgaatacttcatcatggccatgatagccctcaacactgtggtgctgatgatgaagttctatgatgcaccctatgagtacgagctgatgctgaaatgcctgaacatcgtgttcacatccatgttctccatggaatgcgtgctgaagatcatcgcctttggggtgctgaactatttcagagatgcctggaatgtctttgactttgtcactgtgttgggaagtattactgatattttagtaacagagattgcggaaacgaacaatttcatcaacctcagcttcctccgcctctttcgagctgcgcggctgatcaagctgctccgccagggctacaccatccgcatcctgctgtggacctttgtccagtccttcaaggccctgccctacgtgtgtctgctcattgccatgctgttcttcatctacgccatcatcggcatgcaggtgtttgggaatattgccctggatgatgacaccagcatcaaccgccacaacaacttccggacgtttttgcaagccctgatgctgctgttcaggagcgccacgggggaggcctggcacgagatcatgctgtcctgcctgagcaaccaggcctgtgatgagcaggccaatgccaccgagtgtggaagtgactttgcctacttctacttcgtctccttcatcttcctgtgctcctttctgatgttgaacctctttgtggctgtgatcatggacaattttgagtacctcacgcgggactcttccatcctaggtcctcaccacttggatgagttcatccgggtctgggctgaatacgacccggctgcgtgtgggcgcatcagttacaatgacatgtttgagatgctgaaacacatgtccccgcctctggggctggggaagaaatgccctgctcgagttgcttacaagcgcctggttcgcatgaacatgcccatctccaacgaggacatgactgttcacttcacgtccacgctgatggccctcatccggacggcactggagatcaagctggccccagctgggacaaagcagcatcagtgtgacgcggagttgaggaaggagatttccgttgtgtgggccaatctgccccagaagactttggacttgctggtaccaccccataagcctgatgagatgacagtggggaaggtttatgcagctctgatgatattcgacttctacaagcagaacaaaaccaccagagaccagatgcagcaggctcctggaggcctctcccagatgggtcctgtgtccctgttccaccctctgaaggccaccctggagcagacacagccggctgtgctccgaggagcccgggttttccttcgacagaagagttccacctccctcagcaatggcggggccatacaaaaccaagagagtggcatcaaagagtctgtctcctggggcactcaaaggacccaggatgcaccccatgaggccaggccacccctggagcgtggccactccacagagatccctgtggggcggtcaggagcactggctgtggacgttcagatgcagagcataacccggaggggccctgatggggagccccagcctgggctggagagccagggtcgagcggcctccatgccccgccttgcggccgagactcagcccgtcacagatgccagccccatgaagcgctccatctccacgctggcccagcggccccgtgggactcatctttgcagcaccaccccggaccgcccaccccctagccaggcgtcgtcgcaccaccaccaccaccgctgccaccgccgcagggacaggaagcagaggtccctggagaaggggcccagcctgtctgccgatatggatggcgcaccaagcagtgctgtggggccggggctgcccccgggagaggggcctacaggctgccggcgggaacgagagcgccggcaggagcggggccggtcccaggagcggaggcagccctcatcctcctcctcggagaagcagcgcttctactcctgcgaccgctttgggggccgtgagcccccgaagcccaagccctccctcagcagccacccaacgtcgccaacagctggccaggagccgggaccccacccacagggcagtggttccgtgaatgggagccccttgctgtcaacatctggtgctagcacccccggccgcggtgggcggaggcagctcccccagacgcccctgactccccgccccagcatcacctacaagacggccaactcctcacccatccacttcgccggggctcagaccagcctccctgccttctccccaggccggctcagccgtgggctttccgaacacaacgccctgctgcagagagaccccctcagccagcccctggcccctggctctcgaattggctctgacccttacctggggcagcgtctggacagtgaggcctctgtccacgccctgcctgaggacactctcactttcgaggaggctgtggccaccaactcgggccgctcctccaggacttcctacgtgtcctccctgacctcccagtctcaccctctccgccgcgtgcccaacggttaccactgcaccctgggactcagctcgggtggccgagcacggcacagctaccaccaccctgaccaagaccactggtgctagctgcaccgtgaccgctcagacgcctgcatgcagcaggcgtgtgttccagtggatgagttttatcatccacacggggcagccggccctcgggggaggccttgcccaccttggtgaggctcctgtggcccctccctccccctcctcccctcttttactctagacgacgaataaagccctgttagaggatgcggctctctctgtccccttcctgtcctgccttcctgggtctcgtaccacacaccagaccctaaaccgcaggctgctgtgtgtggctgagaaggacccaggagtccaaatcccgtgtcctgggactcagcatccagcatgggtgcttggagccgttgtgaggagctctgcgtcctgtggggagcacccttcacgtggccgtgcggcacagagaagcagggcccacctgaaagtgcgccgagacctcgggacggaggggatggggagggggacacagtcgtggcttgtgcagcccgccagtgtcagcgaatgctcactcaggcaagctctgtcctccctggacaccgtcagccccacaggaaccgagctgggaagtgttcttgctgtggttgtgatttttaattgcaacacctctcattcttgtcacttctatatacgtgatgtagaaaaaatggaaaaccagaaaaatggggaaggaaatgttcacataactttaaaaaatcaaacctgtgaaagaaagatgtcagctttttgccacgtgtctttgtggcttatgcgaggagactccctgtgcagccctgtccggtccaggtggacgtagacggcccctggctctgctgctcttgaccaagtgcctgaccgccaggccctcacacccaggctcctgggcactgtggtgtgaggcgaggcctcgggatccatcaccgcaggatgctgtgaaaagtactcgcgatggcagccaggtagcaagcccttgccagtggagagcactggatgtcatggtggcaaacaaggcagccatttgctgtcctcctcccacgagtggaaggggtttccaaggaagccacagggcagctgaccacgtgcttgtgtgaggcattttcagtctgttctgcatatgattctcagggcacactctgtggtatgtgaaataggtttccttccacatacagcagaagagaggcaaaggctggtaggaaggaggaagacattggctgggggcttggatgtggggccgtcagggcaggagggaggaagccccagctggaatgaaactcagagcaagtgaccgagggaggacacggctcctgccactgaggccgggcacctgatgcccagcactgtcctggcgccagacacagggagcaggcagtcaagtgaggtctgacccccatggccacgctcaggagagaaagaccatgctcaggacactgtccaaggtgcacaagatgctgggaggtcccttgtttggtgaagaaagggagcatttagagcagttgatggtggtgtgtcctccgtgttctgaaattccagatgatctgtgttggattcttggcttctaccccatgattctcctcaaagaaattgtgtgtgatgtgtgtgtgtgtgtgtgtgtgtgtgtgtctgtgtcacaggagatgcagtgcctgtacaggtgtgttcagtgtgtggatgtcattaacccatagggctatgcaacaaaagacacatttaatagaagtaaaacacacaagaccgctgcctggtctcggggttcagcatgattgtgaccaaacctttttatagaatttccttacctgaaggcacaacactctgaaactttaaagataacagagtattttattccaatagaataaaccaggaatctcggactgtgcatgtgatcactgtgctcctgttgcaaagtagaaggatgtgtattttgacactgacgttttgtctcttgttccccagcccccagcccatgttatcttgggtgtcgaatgtgtccattccatgcagaaccacagccatttccccaggcagtgttgggtcgagaatccacttttctaaacccacacagcctagctggcttgtctagactcttctaggcattggaattgatgaaaactacagggagcggggaaaggagacattatgtcttgttttcctgactttgggttttgtttctcactgtgtcttctccggctatcatatatgtcccctgaatctcatagtgagctgccaaatttgaagtgcatcacccagttgtctgcatctggaaccagtcaagcagtggctgtagtttgaacaagttatgtgtgcatgtaacatatatacatatatacatatatacaagtatgtgcatgataatgtatatcttcgtactttttgatacaatgtattcatttgttaatttttaattatatttgatataaatcaaaggtttgttgcaaaactttatatttaagaagtgttaaaaaaaaaaaaaagtcccaaccatgcaacacaactgggacctacttaaaaagaaattctgtgattgactagtttgctgcctgagtcatatttatcagccaaactttggattctgctgttgtttctacaatgacattttgtatgaagcaaagtccttgaattaaaataaaaacttagcaaaaaatcaaaaacaaaacccc

SEQ ID NO: 113213 - DNA, 9642 bp, Homo sapiens
  Payload ID: 2142
  Gene Symbol: CACNA1B
  Gene Name: calcium channel, voltage-dependent, N type, alpha 1B subunit
  ENST ID: ENST00000371357
  CDS Start-End: 1-7017
atggtccgcttcggggacgagctgggcggccgctatgggggccccggcggcggagagcgggcccggggcggcggggccggcggggcggggggcccgggtcccggggggctgcagcccggccagcgggtcctctacaagcaatcgatcgcgcagcgcgcgcggaccatggcgctgtacaaccccatcccggtcaagcagaactgcttcaccgtcaaccgctcgctcttcgtcttcagcgaggacaacgtcgtccgcaaatacgcgaagcgcatcaccgagtggcctccattcgagtatatgatcctggccaccatcatcgccaactgcatcgtgctggccctggagcagcacctccctgatggggacaaaacgcccatgtccgagcggctggacgacacggagccctatttcatcgggatcttttgcttcgaggcagggatcaaaatcatcgctctgggctttgtcttccacaagggctcttacctgcggaacggctggaacgtcatggacttcgtggtcgtcctcacagggatccttgccacggctggaactgacttcgacctgcgaacactgagggctgtgcgtgtgctgaggcccctgaagctggtgtctgggattccaagtttgcaggtggtgctcaagtccatcatgaaggccatggttccactcctgcagattgggctgcttctcttctttgccatcctcatgtttgccatcattggcctggagttctacatgggcaagttccacaaggcctgtttccccaacagcacagatgcggagcccgtgggtgacttcccctgtggcaaggaggccccagcccggctgtgcgagggcgacactgagtgccgggagtactggccaggacccaactttggcatcaccaactttgacaatatcctgtttgccatcttgacggtgttccagtgcatcaccatggagggctggactgacatcctctataatacaaacgatgcggccggcaacacctggaactggctctacttcatccctctcatcatcatcggctccttcttcatgctcaacctggtgctgggcgtgctctcgggggagtttgccaaggagcgagagagggtggagaaccgccgcgccttcctgaagctgcgccggcagcagcagatcgagcgagagctcaacgggtacctggagtggatcttcaaggcggaggaagtcatgctggccgaggaggacaggaatgcagaggagaagtcccctttggacgcagtgctgaagagagcggccaccaagaagagcagaaatgacctgatccacgcagaggagggagaggaccggtttgcagatctctgtgctgttggatcccccttcgcccgcgccagcctcaagagcgggaagacagagagctcgtcatacttccggaggaaggagaagatgttccggttttttatccggcgcatggtgaaggctcagagcttctactgggtggtgctgtgcgtggtggccctgaacacactgtgtgtggccatggtgcattacaaccagccgcggcggcttaccacgaccctgtattttgcagagtttgttttcctgggtctcttcctcacagagatgtccctgaagatgtatggcctggggcccagaagctacttccggtcctccttcaactgcttcgactttggggtcatcgtggggagcgtctttgaagtggtctgggcggccatcaagccgggaagctcctttgggatcagtgtgctgcgggccctccgcctgctgaggatcttcaaagtcacgaagtactggagctccctgcggaacctggtggtgtccctgctgaactccatgaagtccatcatcagcctgctcttcttgctcttcctgttcattgtggtcttcgccctgctggggatgcagctgtttgggggacagttcaacttccaggatgagactcccacaaccaacttcgacaccttccctgccgccatcctcactgtcttccagatcctgacgggagaggactggaatgcagtgatgtatcacgggatcgaatcgcaaggcggcgtcagcaaaggcatgttctcgtccttttacttcattgtcctgacactgttcggaaactacactctgctgaatgtctttctggccatcgctgtggacaacctggccaacgcccaagagctgaccaaggatgaagaggagatggaagaagcagccaatcagaagcttgctctgcaaaaggccaaagaagtggctgaagtcagccccatgtctgccgcgaacatctccatcgccgccaggcagcagaactcggccaaggcgcgctcggtgtgggagcagcgggccagccagctacggctgcagaacctgcgggccagctgcgaggcgctgtacagcgagatggaccccgaggagcggctgcgcttcgccactacgcgccacctgcggcccgacatgaagacgcacctggaccggccgctggtggtggagctgggccgcgacggcgcgcgggggcccgtgggaggcaaagcccgacctgaggctgcggaggcccccgagggcgtcgaccctccgcgcaggcaccaccggcaccgcgacaaggacaagacccccgcggcgggggaccaggaccgagcagaggccccgaaggcggagagcggggagcccggtgcccgggaggagcggccgcggccgcaccgcagccacagcaaggaggccgcggggcccccggaggcgcggagcgagcgcggccgaggcccaggccccgagggcggccggcggcaccaccggcgcggctccccggaggaggcggccgagcgggagccccgacgccaccgcgcgcaccggcaccaggatccgagcaaggagtgcgccggcgccaagggcgagcggcgcgcgcggcaccgcggcggcccccgagcggggccccgggaggcggagagcggggaggagccggcgcggcggcaccgggcccggcacaaggcgcagcctgctcacgaggctgtggagaaggagaccacggagaaggaggccacggagaaggaggctgagatagtggaagccgacaaggaaaaggagctccggaaccaccagccccgggagccacactgtgacctggagaccagtgggactgtgactgtgggtcccatgcacacactgcccagcacctgtctccagaaggtggaggaacagccagaggatgcagacaatcagcggaacgtcactcgcatgggcagtcagcccccagacccgaacactattgtacatatcccagtgatgctgacgggccctcttggggaagccacggtcgttcccagtggtaacgtggacctggaaagccaagcagaggggaagaaggaggtggaagcggatgacgtgatgaggagcggcccccggcctatcgtcccatacagctccatgttctgtttaagccccaccaacctgctccgccgcttctgccactacatcgtgaccatgaggtacttcgaggtggtcattctcgtggtcatcgccttgagcagcatcgccctggctgctgaggacccagtgcgcacagactcgcccaggaacaacgctctgaaatacctggattacattttcactggtgtctttacctttgagatggtgataaagatgatcgacttgggactgctgcttcaccctggagcctatttccgggacttgtggaacattctggacttcattgtggtcagtggcgccctggtggcgtttgctttctcaggatccaaagggaaagacatcaataccatcaagtctctgagagtccttcgtgtcctgcggcccctcaagaccatcaaacggctgcccaagctcaaggctgtgtttgactgtgtggtgaactccctgaagaatgtcctcaacatcttgattgtctacatgctcttcatgttcatatttgccgtcattgcggtgcagctcttcaaagggaagtttttctactgcacagatgaatccaaggagctggagagggactgcaggggtcagtatttggattatgagaaggaggaagtggaagctcagcccaggcagtggaagaaatacgactttcactacgacaatgtgctctgggctctgctgacgctgttcacagtgtccacgggagaaggctggcccatggtgctgaaacactccgtggatgccacctatgaggagcagggtccaagccctgggtaccgcatggagctgtccatcttctacgtggtctactttgtggtctttcccttcttcttcgtcaacatctttgtggctttgatcatcatcaccttccaggagcagggggacaaggtgatgtctgaatgcagcctggagaagaacgagagggcttgcattgacttcgccatcagcgccaaacccctgacacggtacatgccccaaaaccggcagtcgttccagtataagacgtggacatttgtggtctccccgccctttgaatacttcatcatggccatgatagccctcaacactgtggtgctgatgatgaagttctatgatgcaccctatgagtacgagctgatgctgaaatgcctgaacatcgtgttcacatccatgttctccatggaatgcgtgctgaagatcatcgcctttggggtgctgaactatttcagagatgcctggaatgtctttgactttgtcactgtgttgggaagtattactgatattttagtaacagagattgcgaacaatttcatcaacctcagcttcctccgcctctttcgagctgcgcggctgatcaagctgctccgccagggctacaccatccgcatcctgctgtggacctttgtccagtccttcaaggccctgccctacgtgtgtctgctcattgccatgctgttcttcatctacgccatcatcggcatgcaggtgtttgggaatattgccctggatgatgacaccagcatcaaccgccacaacaacttccggacgtttttgcaagccctgatgctgctgttcaggagcgccacgggggaggcctggcacgagatcatgctgtcctgcctgagcaaccaggcctgtgatgagcaggccaatgccaccgagtgtggaagtgactttgcctacttctacttcgtctccttcatcttcctgtgctcctttctgatgttgaacctctttgtggctgtgatcatggacaattttgagtacctcacgcgggactcttccatcctaggtcctcaccacttggatgagttcatccgggtctgggctgaatacgacccggctgcgtgtgggcgcatcagttacaatgacatgtttgagatgctgaaacacatgtccccgcctctggggctggggaagaaatgccctgctcgagttgcttacaagcgcctggttcgcatgaacatgcccatctccaacgaggacatgactgttcacttcacgtccacgctgatggccctcatccggacggcactggagatcaagctggccccagctgggacaaagcagcatcagtgtgacgcggagttgaggaaggagatttccgttgtgtgggccaatctgccccagaagactttggacttgctggtaccaccccataagcctgatgagatgacagtggggaaggtttatgcagctctgatgatattcgacttctacaagcagaacaaaaccaccagagaccagatgcagcaggctcctggaggcctctcccagatgggtcctgtgtccctgttccaccctctgaaggccaccctggagcagacacagccggctgtgctccgaggagcccgggttttccttcgacagaagagttccacctccctcagcaatggcggggccatacaaaaccaagagagtggcatcaaagagtctgtctcctggggcactcaaaggacccaggatgcaccccatgaggccaggccacccctggagcgtggccactccacagagatccctgtggggcggtcaggagcactggctgtggacgttcagatgcagagcataacccggaggggccctgatggggagccccagcctgggctggagagccagggtcgagcggcctccatgccccgccttgcggccgagactcagcccgtcacagatgccagccccatgaagcgctccatctccacgctggcccagcggccccgtgggactcatctttgcagcaccaccccggaccgcccaccccctagccaggcgtcgtcgcaccaccaccaccaccgctgccaccgccgcagggacaggaagcagaggtccctggagaaggggcccagcctgtctgccgatatggatggcgcaccaagcagtgctgtggggccggggctgcccccgggagaggggcctacaggctgccggcgggaacgagagcgccggcaggagcggggccggtcccaggagcggaggcagccctcatcctcctcctcggagaagcagcgcttctactcctgcgaccgctttgggggccgtgagcccccgaagcccaagccctccctcagcagccacccaacgtcgccaacagctggccaggagccgggaccccacccacagggcagtggttccgtgaatgggagccccttgctgtcaacatctggtgctagcacccccggccgcggtgggcggaggcagctcccccagacgcccctgactccccgccccagcatcacctacaagacggccaactcctcacccatccacttcgccggggctcagaccagcctccctgccttctccccaggccggctcagccgtgggctttccgaacacaacgccctgctgcagagagaccccctcagccagcccctggcccctggctctcgaattggctctgacccttacctggggcagcgtctggacagtgaggcctctgtccacgccctgcctgaggacactctcactttcgaggaggctgtggccaccaactcgggccgctcctccaggacttcctacgtgtcctccctgacctcccagtctcaccctctccgccgcgtgcccaacggttaccactgcaccctgggactcagctcgggtggccgagcacggcacagctaccaccaccctgaccaagaccactggtgctagctgcaccgtgaccgctcagacgcctgcatgcagcaggcgtgtgttccagtggatgagttttatcatccacacggggcagccggccctcgggggaggccttgcccaccttggtgaggctcctgtggcccctccctccccctcctcccctcttttactctagacgacgaataaagccctgttagaggatgcggctctctctgtccccttcctgtcctgccttcctgggtctcgtaccacacaccagaccctaaaccgcaggctgctgtgtgtggctgagaaggacccaggagtccaaatcccgtgtcctgggactcagcatccagcatgggtgcttggagccgttgtgaggagctctgcgtcctgtggggagcacccttcacgtggccgtgcggcacagagaagcagggcccacctgaaagtgcgccgagacctcgggacggaggggatggggagggggacacagtcgtggcttgtgcagcccgccagtgtcagcgaatgctcactcaggcaagctctgtcctccctggacaccgtcagccccacaggaaccgagctgggaagtgttcttgctgtggttgtgatttttaattgcaacacctctcattcttgtcacttctatatacgtgatgtagaaaaaatggaaaaccagaaaaatggggaaggaaatgttcacataactttaaaaaatcaaacctgtgaaagaaagatgtcagctttttgccacgtgtctttgtggcttatgcgaggagactccctgtgcagccctgtccggtccaggtggacgtagacggcccctggctctgctgctcttgaccaagtgcctgaccgccaggccctcacacccaggctcctgggcactgtggtgtgaggcgaggcctcgggatccatcaccgcaggatgctgtgaaaagtactcgcgatggcagccaggtagcaagcccttgccagtggagagcactggatgtcatggtggcaaacaaggcagccatttgctgtcctcctcccacgagtggaaggggtttccaaggaagccacagggcagctgaccacgtgcttgtgtgaggcattttcagtctgttctgcatatgattctcagggcacactctgtggtatgtgaaataggtttccttccacatacagcagaagagaggcaaaggctggtaggaaggaggaagacattggctgggggcttggatgtggggccgtcagggcaggagggaggaagccccagctggaatgaaactcagagcaagtgaccgagggaggacacggctcctgccactgaggccgggcacctgatgcccagcactgtcctggcgccagacacagggagcaggcagtcaagtgaggtctgacccccatggccacgctcaggagagaaagaccatgctcaggacactgtccaaggtgcacaagatgctgggaggtcccttgtttggtgaagaaagggagcatttagagcagttgatggtggtgtgtcctccgtgttctgaaattccagatgatctgtgttggattcttggcttctaccccatgattctcctcaaagaaattgtgtgtgatgtgtgtgtgtgtgtgtgtgtgtgtgtgtctgtgtcacaggagatgcagtgcctgtacaggtgtgttcagtgtgtggatgtcattaacccatagggctatgcaacaaaagacacatttaatagaagtaaaacacacaagaccgctgcctggtctcggggttcagcatgattgtgaccaaacctttttatagaatttccttacctgaaggcacaacactctgaaactttaaagataacagagtattttattccaatagaataaaccaggaatctcggactgtgcatgtgatcactgtgctcctgttgcaaagtagaaggatgtgtattttgacactgacgttttgtctcttgttccccagcccccagcccatgttatcttgggtgtcgaatgtgtccattccatgcagaaccacagccatttccccaggcagtgttgggtcgagaatccacttttctaaacccacacagcctagctggcttgtctagactcttctaggcattggaattgatgaaaactacagggagcggggaaaggagacattatgtcttgttttcctgactttgggttttgtttctcactgtgtcttctccggctatcatatatgtcccctgaatctcatagtgagctgccaaatttgaagtgcatcacccagttgtctgcatctggaaccagtcaagcagtggctgtagtttgaacaagttatgtgtgcatgtaacatatatacatatatacatatatacaagtatgtgcatgataatgtatatcttcgtactttttgatacaatgtattcatttgttaatttttaattatatttgatataaatcaaaggtttgttgcaaaactttatatttaagaagtgttaaaaaaaaaaaaaagtcccaaccatgcaacacaactgggacctacttaaaaagaaattctgtgattgactagtttgctgcctgagtcatatttatcagccaaactttggattctgctgttgtttctacaatgacattttgtatgaagcaaagtccttgaattaaaataaaaacttagcaaaaaatcaaaaacaaaacccca

SEQ ID NO: 113214 - DNA, 9758 bp, Homo sapiens
  Payload ID: 2142
  Gene Symbol: CACNA1B
  Gene Name: calcium channel, voltage-dependent, N type, alpha 1B subunit
  ENST ID: ENST00000371363
  CDS Start-End: 120-7133
gggcgaggtccgctgcggtcccggcggctccgtggctgctccgctctgagcgcctggcgcgccccgcgccctccctgccggggccgctgggccggggatgcacgcggggcccgggagccatggtccgcttcggggacgagctgggcggccgctatgggggccccggcggcggagagcgggcccggggcggcggggccggcggggcggggggcccgggtcccggggggctgcagcccggccagcgggtcctctacaagcaatcgatcgcgcagcgcgcgcggaccatggcgctgtacaaccccatcccggtcaagcagaactgcttcaccgtcaaccgctcgctcttcgtcttcagcgaggacaacgtcgtccgcaaatacgcgaagcgcatcaccgagtggcctccattcgagtatatgatcctggccaccatcatcgccaactgcatcgtgctggccctggagcagcacctccctgatggggacaaaacgcccatgtccgagcggctggacgacacggagccctatttcatcgggatcttttgcttcgaggcagggatcaaaatcatcgctctgggctttgtcttccacaagggctcttacctgcggaacggctggaacgtcatggacttcgtggtcgtcctcacagggatccttgccacggctggaactgacttcgacctgcgaacactgagggctgtgcgtgtgctgaggcccctgaagctggtgtctgggattccaagtttgcaggtggtgctcaagtccatcatgaaggccatggttccactcctgcagattgggctgcttctcttctttgccatcctcatgtttgccatcattggcctggagttctacatgggcaagttccacaaggcctgtttccccaacagcacagatgcggagcccgtgggtgacttcccctgtggcaaggaggccccagcccggctgtgcgagggcgacactgagtgccgggagtactggccaggacccaactttggcatcaccaactttgacaatatcctgtttgccatcttgacggtgttccagtgcatcaccatggagggctggactgacatcctctataatacaaacgatgcggccggcaacacctggaactggctctacttcatccctctcatcatcatcggctccttcttcatgctcaacctggtgctgggcgtgctctcgggggagtttgccaaggagcgagagagggtggagaaccgccgcgccttcctgaagctgcgccggcagcagcagatcgagcgagagctcaacgggtacctggagtggatcttcaaggcggaggaagtcatgctggccgaggaggacaggaatgcagaggagaagtcccctttggacgtgctgaagagagcggccaccaagaagagcagaaatgacctgatccacgcagaggagggagaggaccggtttgcagatctctgtgctgttggatcccccttcgcccgcgccagcctcaagagcgggaagacagagagctcgtcatacttccggaggaaggagaagatgttccggttttttatccggcgcatggtgaaggctcagagcttctactgggtggtgctgtgcgtggtggccctgaacacactgtgtgtggccatggtgcattacaaccagccgcggcggcttaccacgaccctgtattttgcagagtttgttttcctgggtctcttcctcacagagatgtccctgaagatgtatggcctggggcccagaagctacttccggtcctccttcaactgcttcgactttggggtcatcgtggggagcgtctttgaagtggtctgggcggccatcaagccgggaagctcctttgggatcagtgtgctgcgggccctccgcctgctgaggatcttcaaagtcacgaagtactggagctccctgcggaacctggtggtgtccctgctgaactccatgaagtccatcatcagcctgctcttcttgctcttcctgttcattgtggtcttcgccctgctggggatgcagctgtttgggggacagttcaacttccaggatgagactcccacaaccaacttcgacaccttccctgccgccatcctcactgtcttccagatcctgacgggagaggactggaatgcagtgatgtatcacgggatcgaatcgcaaggcggcgtcagcaaaggcatgttctcgtccttttacttcattgtcctgacactgttcggaaactacactctgctgaatgtctttctggccatcgctgtggacaacctggccaacgcccaagagctgaccaaggatgaagaggagatggaagaagcagccaatcagaagcttgctctgcaaaaggccaaagaagtggctgaagtcagccccatgtctgccgcgaacatctccatcgccgccaggcagcagaactcggccaaggcgcgctcggtgtgggagcagcgggccagccagctacggctgcagaacctgcgggccagctgcgaggcgctgtacagcgagatggaccccgaggagcggctgcgcttcgccactacgcgccacctgcggcccgacatgaagacgcacctggaccggccgctggtggtggagctgggccgcgacggcgcgcgggggcccgtgggaggcaaagcccgacctgaggctgcggaggcccccgagggcgtcgaccctccgcgcaggcaccaccggcaccgcgacaaggacaagacccccgcggcgggggaccaggaccgagcagaggccccgaaggcggagagcggggagcccggtgcccgggaggagcggccgcggccgcaccgcagccacagcaaggaggccgcggggcccccggaggcgcggagcgagcgcggccgaggcccaggccccgagggcggccggcggcaccaccggcgcggctccccggaggaggcggccgagcgggagccccgacgccaccgcgcgcaccggcaccaggatccgagcaaggagtgcgccggcgccaagggcgagcggcgcgcgcggcaccgcggcggcccccgagcggggccccgggaggcggagagcggggaggagccggcgcggcggcaccgggcccggcacaaggcgcagcctgctcacgaggctgtggagaaggagaccacggagaaggaggccacggagaaggaggctgagatagtggaagccgacaaggaaaaggagctccggaaccaccagccccgggagccacactgtgacctggagaccagtgggactgtgactgtgggtcccatgcacacactgcccagcacctgtctccagaaggtggaggaacagccagaggatgcagacaatcagcggaacgtcactcgcatgggcagtcagcccccagacccgaacactattgtacatatcccagtgatgctgacgggccctcttggggaagccacggtcgttcccagtggtaacgtggacctggaaagccaagcagaggggaagaaggaggtggaagcggatgacgtgatgaggagcggcccccggcctatcgtcccatacagctccatgttctgtttaagccccaccaacctgctccgccgcttctgccactacatcgtgaccatgaggtacttcgaggtggtcattctcgtggtcatcgccttgagcagcatcgccctggctgctgaggacccagtgcgcacagactcgcccaggaacaacgctctgaaatacctggattacattttcactggtgtctttacctttgagatggtgataaagatgatcgacttgggactgctgcttcaccctggagcctatttccgggacttgtggaacattctggacttcattgtggtcagtggcgccctggtggcgtttgctttctcaggatccaaagggaaagacatcaataccatcaagtctctgagagtccttcgtgtcctgcggcccctcaagaccatcaaacggctgcccaagctcaaggctgtgtttgactgtgtggtgaactccctgaagaatgtcctcaacatcttgattgtctacatgctcttcatgttcatatttgccgtcattgcggtgcagctcttcaaagggaagtttttctactgcacagatgaatccaaggagctggagagggactgcaggggtcagtatttggattatgagaaggaggaagtggaagctcagcccaggcagtggaagaaatacgactttcactacgacaatgtgctctgggctctgctgacgctgttcacagtgtccacgggagaaggctggcccatggtgctgaaacactccgtggatgccacctatgaggagcagggtccaagccctgggtaccgcatggagctgtccatcttctacgtggtctactttgtggtctttcccttcttcttcgtcaacatctttgtggctttgatcatcatcaccttccaggagcagggggacaaggtgatgtctgaatgcagcctggagaagaacgagagggcttgcattgacttcgccatcagcgccaaacccctgacacggtacatgccccaaaaccggcagtcgttccagtataagacgtggacatttgtggtctccccgccctttgaatacttcatcatggccatgatagccctcaacactgtggtgctgatgatgaagttctatgatgcaccctatgagtacgagctgatgctgaaatgcctgaacatcgtgttcacatccatgttctccatggaatgcgtgctgaagatcatcgcctttggggtgctgaactatttcagagatgcctggaatgtctttgactttgtcactgtgttgggaagtattactgatattttagtaacagagattgcgaacaatttcatcaacctcagcttcctccgcctctttcgagctgcgcggctgatcaagctgctccgccagggctacaccatccgcatcctgctgtggacctttgtccagtccttcaaggccctgccctacgtgtgtctgctcattgccatgctgttcttcatctacgccatcatcggcatgcaggtgtttgggaatattgccctggatgatgacaccagcatcaaccgccacaacaacttccggacgtttttgcaagccctgatgctgctgttcaggagcgccacgggggaggcctggcacgagatcatgctgtcctgcctgagcaaccaggcctgtgatgagcaggccaatgccaccgagtgtggaagtgactttgcctacttctacttcgtctccttcatcttcctgtgctcctttctgatgttgaacctctttgtggctgtgatcatggacaattttgagtacctcacgcgggactcttccatcctaggtcctcaccacttggatgagttcatccgggtctgggctgaatacgacccggctgcgtgtgggcgcatcagttacaatgacatgtttgagatgctgaaacacatgtccccgcctctggggctggggaagaaatgccctgctcgagttgcttacaagcgcctggttcgcatgaacatgcccatctccaacgaggacatgactgttcacttcacgtccacgctgatggccctcatccggacggcactggagatcaagctggccccagctgggacaaagcagcatcagtgtgacgcggagttgaggaaggagatttccgttgtgtgggccaatctgccccagaagactttggacttgctggtaccaccccataagcctgatgagatgacagtggggaaggtttatgcagctctgatgatattcgacttctacaagcagaacaaaaccaccagagaccagatgcagcaggctcctggaggcctctcccagatgggtcctgtgtccctgttccaccctctgaaggccaccctggagcagacacagccggctgtgctccgaggagcccgggttttccttcgacagaagagttccacctccctcagcaatggcggggccatacaaaaccaagagagtggcatcaaagagtctgtctcctggggcactcaaaggacccaggatgcaccccatgaggccaggccacccctggagcgtggccactccacagagatccctgtggggcggtcaggagcactggctgtggacgttcagatgcagagcataacccggaggggccctgatggggagccccagcctgggctggagagccagggtcgagcggcctccatgccccgccttgcggccgagactcagcccgtcacagatgccagccccatgaagcgctccatctccacgctggcccagcggccccgtgggactcatctttgcagcaccaccccggaccgcccaccccctagccaggcgtcgtcgcaccaccaccaccaccgctgccaccgccgcagggacaggaagcagaggtccctggagaaggggcccagcctgtctgccgatatggatggcgcaccaagcagtgctgtggggccggggctgcccccgggagaggggcctacaggctgccggcgggaacgagagcgccggcaggagcggggccggtcccaggagcggaggcagccctcatcctcctcctcggagaagcagcgcttctactcctgcgaccgctttgggggccgtgagcccccgaagcccaagccctccctcagcagccacccaacgtcgccaacagctggccaggagccgggaccccacccacagggcagtggttccgtgaatgggagccccttgctgtcaacatctggtgctagcacccccggccgcggtgggcggaggcagctcccccagacgcccctgactccccgccccagcatcacctacaagacggccaactcctcacccatccacttcgccggggctcagaccagcctccctgccttctccccaggccggctcagccgtgggctttccgaacacaacgccctgctgcagagagaccccctcagccagcccctggcccctggctctcgaattggctctgacccttacctggggcagcgtctggacagtgaggcctctgtccacgccctgcctgaggacactctcactttcgaggaggctgtggccaccaactcgggccgctcctccaggacttcctacgtgtcctccctgacctcccagtctcaccctctccgccgcgtgcccaacggttaccactgcaccctgggactcagctcgggtggccgagcacggcacagctaccaccaccctgaccaagaccactggtgctagctgcaccgtgaccgctcagacgcctgcatgcagcaggcgtgtgttccagtggatgagttttatcatccacacggggcagccggccctcgggggaggccttgcccaccttggtgaggctcctgtggcccctccctccccctcctcccctcttttactctagacgacgaataaagccctgttagaggatgcggctctctctgtccccttcctgtcctgccttcctgggtctcgtaccacacaccagaccctaaaccgcaggctgctgtgtgtggctgagaaggacccaggagtccaaatcccgtgtcctgggactcagcatccagcatgggtgcttggagccgttgtgaggagctctgcgtcctgtggggagcacccttcacgtggccgtgcggcacagagaagcagggcccacctgaaagtgcgccgagacctcgggacggaggggatggggagggggacacagtcgtggcttgtgcagcccgccagtgtcagcgaatgctcactcaggcaagctctgtcctccctggacaccgtcagccccacaggaaccgagctgggaagtgttcttgctgtggttgtgatttttaattgcaacacctctcattcttgtcacttctatatacgtgatgtagaaaaaatggaaaaccagaaaaatggggaaggaaatgttcacataactttaaaaaatcaaacctgtgaaagaaagatgtcagctttttgccacgtgtctttgtggcttatgcgaggagactccctgtgcagccctgtccggtccaggtggacgtagacggcccctggctctgctgctcttgaccaagtgcctgaccgccaggccctcacacccaggctcctgggcactgtggtgtgaggcgaggcctcgggatccatcaccgcaggatgctgtgaaaagtactcgcgatggcagccaggtagcaagcccttgccagtggagagcactggatgtcatggtggcaaacaaggcagccatttgctgtcctcctcccacgagtggaaggggtttccaaggaagccacagggcagctgaccacgtgcttgtgtgaggcattttcagtctgttctgcatatgattctcagggcacactctgtggtatgtgaaataggtttccttccacatacagcagaagagaggcaaaggctggtaggaaggaggaagacattggctgggggcttggatgtggggccgtcagggcaggagggaggaagccccagctggaatgaaactcagagcaagtgaccgagggaggacacggctcctgccactgaggccgggcacctgatgcccagcactgtcctggcgccagacacagggagcaggcagtcaagtgaggtctgacccccatggccacgctcaggagagaaagaccatgctcaggacactgtccaaggtgcacaagatgctgggaggtcccttgtttggtgaagaaagggagcatttagagcagttgatggtggtgtgtcctccgtgttctgaaattccagatgatctgtgttggattcttggcttctaccccatgattctcctcaaagaaattgtgtgtgatgtgtgtgtgtgtgtgtgtgtgtgtgtgtctgtgtcacaggagatgcagtgcctgtacaggtgtgttcagtgtgtggatgtcattaacccatagggctatgcaacaaaagacacatttaatagaagtaaaacacacaagaccgctgcctggtctcggggttcagcatgattgtgaccaaacctttttatagaatttccttacctgaaggcacaacactctgaaactttaaagataacagagtattttattccaatagaataaaccaggaatctcggactgtgcatgtgatcactgtgctcctgttgcaaagtagaaggatgtgtattttgacactgacgttttgtctcttgttccccagcccccagcccatgttatcttgggtgtcgaatgtgtccattccatgcagaaccacagccatttccccaggcagtgttgggtcgagaatccacttttctaaacccacacagcctagctggcttgtctagactcttctaggcattggaattgatgaaaactacagggagcggggaaaggagacattatgtcttgttttcctgactttgggttttgtttctcactgtgtcttctccggctatcatatatgtcccctgaatctcatagtgagctgccaaatttgaagtgcatcacccagttgtctgcatctggaaccagtcaagcagtggctgtagtttgaacaagttatgtgtgcatgtaacatatatacatatatacatatatacaagtatgtgcatgataatgtatatcttcgtactttttgatacaatgtattcatttgttaatttttaattatatttgatataaatcaaaggtttgttgcaaaactttatatttaagaagtgttaaaaaaaaaaaaaagtcccaaccatgcaacacaactgggacctacttaaaaagaaattctgtgattgactagtttgctgcctgagtcatatttatcagccaaactttggattctgctgttgtttctacaatgacattttgtatgaagcaaagtccttgaattaaaataaaaacttagcaaaaaatcaaaaacaaaacccca

SEQ ID NO: 113215 - DNA, 9790 bp, Homo sapiens
  Payload ID: 2142
  Gene Symbol: CACNA1B
  Gene Name: calcium channel, voltage-dependent, N type, alpha 1B subunit
  Uniprot ID: Q00975
  ENST ID: ENST00000371372
  CDS Start-End: 146-7165
gcggcggcggctgcggcggtggggccgggcgaggtccgctgcggtcccggcggctccgtggctgctccgctctgagcgcctggcgcgccccgcgccctccctgccggggccgctgggccggggatgcacgcggggcccgggagccatggtccgcttcggggacgagctgggcggccgctatgggggccccggcggcggagagcgggcccggggcggcggggccggcggggcggggggcccgggtcccggggggctgcagcccggccagcgggtcctctacaagcaatcgatcgcgcagcgcgcgcggaccatggcgctgtacaaccccatcccggtcaagcagaactgcttcaccgtcaaccgctcgctcttcgtcttcagcgaggacaacgtcgtccgcaaatacgcgaagcgcatcaccgagtggcctccattcgagtatatgatcctggccaccatcatcgccaactgcatcgtgctggccctggagcagcacctccctgatggggacaaaacgcccatgtccgagcggctggacgacacggagccctatttcatcgggatcttttgcttcgaggcagggatcaaaatcatcgctctgggctttgtcttccacaagggctcttacctgcggaacggctggaacgtcatggacttcgtggtcgtcctcacagggatccttgccacggctggaactgacttcgacctgcgaacactgagggctgtgcgtgtgctgaggcccctgaagctggtgtctgggattccaagtttgcaggtggtgctcaagtccatcatgaaggccatggttccactcctgcagattgggctgcttctcttctttgccatcctcatgtttgccatcattggcctggagttctacatgggcaagttccacaaggcctgtttccccaacagcacagatgcggagcccgtgggtgacttcccctgtggcaaggaggccccagcccggctgtgcgagggcgacactgagtgccgggagtactggccaggacccaactttggcatcaccaactttgacaatatcctgtttgccatcttgacggtgttccagtgcatcaccatggagggctggactgacatcctctataatacaaacgatgcggccggcaacacctggaactggctctacttcatccctctcatcatcatcggctccttcttcatgctcaacctggtgctgggcgtgctctcgggggagtttgccaaggagcgagagagggtggagaaccgccgcgccttcctgaagctgcgccggcagcagcagatcgagcgagagctcaacgggtacctggagtggatcttcaaggcggaggaagtcatgctggccgaggaggacaggaatgcagaggagaagtcccctttggacgtgctgaagagagcggccaccaagaagagcagaaatgacctgatccacgcagaggagggagaggaccggtttgcagatctctgtgctgttggatcccccttcgcccgcgccagcctcaagagcgggaagacagagagctcgtcatacttccggaggaaggagaagatgttccggttttttatccggcgcatggtgaaggctcagagcttctactgggtggtgctgtgcgtggtggccctgaacacactgtgtgtggccatggtgcattacaaccagccgcggcggcttaccacgaccctgtattttgcagagtttgttttcctgggtctcttcctcacagagatgtccctgaagatgtatggcctggggcccagaagctacttccggtcctccttcaactgcttcgactttggggtcatcgtggggagcgtctttgaagtggtctgggcggccatcaagccgggaagctcctttgggatcagtgtgctgcgggccctccgcctgctgaggatcttcaaagtcacgaagtactggagctccctgcggaacctggtggtgtccctgctgaactccatgaagtccatcatcagcctgctcttcttgctcttcctgttcattgtggtcttcgccctgctggggatgcagctgtttgggggacagttcaacttccaggatgagactcccacaaccaacttcgacaccttccctgccgccatcctcactgtcttccagatcctgacgggagaggactggaatgcagtgatgtatcacgggatcgaatcgcaaggcggcgtcagcaaaggcatgttctcgtccttttacttcattgtcctgacactgttcggaaactacactctgctgaatgtctttctggccatcgctgtggacaacctggccaacgcccaagagctgaccaaggatgaagaggagatggaagaagcagccaatcagaagcttgctctgcaaaaggccaaagaagtggctgaagtcagccccatgtctgccgcgaacatctccatcgccgccaggcagcagaactcggccaaggcgcgctcggtgtgggagcagcgggccagccagctacggctgcagaacctgcgggccagctgcgaggcgctgtacagcgagatggaccccgaggagcggctgcgcttcgccactacgcgccacctgcggcccgacatgaagacgcacctggaccggccgctggtggtggagctgggccgcgacggcgcgcgggggcccgtgggaggcaaagcccgacctgaggctgcggaggcccccgagggcgtcgaccctccgcgcaggcaccaccggcaccgcgacaaggacaagacccccgcggcgggggaccaggaccgagcagaggccccgaaggcggagagcggggagcccggtgcccgggaggagcggccgcggccgcaccgcagccacagcaaggaggccgcggggcccccggaggcgcggagcgagcgcggccgaggcccaggccccgagggcggccggcggcaccaccggcgcggctccccggaggaggcggccgagcgggagccccgacgccaccgcgcgcaccggcaccaggatccgagcaaggagtgcgccggcgccaagggcgagcggcgcgcgcggcaccgcggcggcccccgagcggggccccgggaggcggagagcggggaggagccggcgcggcggcaccgggcccggcacaaggcgcagcctgctcacgaggctgtggagaaggagaccacggagaaggaggccacggagaaggaggctgagatagtggaagccgacaaggaaaaggagctccggaaccaccagccccgggagccacactgtgacctggagaccagtgggactgtgactgtgggtcccatgcacacactgcccagcacctgtctccagaaggtggaggaacagccagaggatgcagacaatcagcggaacgtcactcgcatgggcagtcagcccccagacccgaacactattgtacatatcccagtgatgctgacgggccctcttggggaagccacggtcgttcccagtggtaacgtggacctggaaagccaagcagaggggaagaaggaggtggaagcggatgacgtgatgaggagcggcccccggcctatcgtcccatacagctccatgttctgtttaagccccaccaacctgctccgccgcttctgccactacatcgtgaccatgaggtacttcgaggtggtcattctcgtggtcatcgccttgagcagcatcgccctggctgctgaggacccagtgcgcacagactcgcccaggaacaacgctctgaaatacctggattacattttcactggtgtctttacctttgagatggtgataaagatgatcgacttgggactgctgcttcaccctggagcctatttccgggacttgtggaacattctggacttcattgtggtcagtggcgccctggtggcgtttgctttctcaggatccaaagggaaagacatcaataccatcaagtctctgagagtccttcgtgtcctgcggcccctcaagaccatcaaacggctgcccaagctcaaggctgtgtttgactgtgtggtgaactccctgaagaatgtcctcaacatcttgattgtctacatgctcttcatgttcatatttgccgtcattgcggtgcagctcttcaaagggaagtttttctactgcacagatgaatccaaggagctggagagggactgcaggggtcagtatttggattatgagaaggaggaagtggaagctcagcccaggcagtggaagaaatacgactttcactacgacaatgtgctctgggctctgctgacgctgttcacagtgtccacgggagaaggctggcccatggtgctgaaacactccgtggatgccacctatgaggagcagggtccaagccctgggtaccgcatggagctgtccatcttctacgtggtctactttgtggtctttcccttcttcttcgtcaacatctttgtggctttgatcatcatcaccttccaggagcagggggacaaggtgatgtctgaatgcagcctggagaagaacgagagggcttgcattgacttcgccatcagcgccaaacccctgacacggtacatgccccaaaaccggcagtcgttccagtataagacgtggacatttgtggtctccccgccctttgaatacttcatcatggccatgatagccctcaacactgtggtgctgatgatgaagttctatgatgcaccctatgagtacgagctgatgctgaaatgcctgaacatcgtgttcacatccatgttctccatggaatgcgtgctgaagatcatcgcctttggggtgctgaactatttcagagatgcctggaatgtctttgactttgtcactgtgttgggaagtattactgatattttagtaacagagattgcggaaacgaacaatttcatcaacctcagcttcctccgcctctttcgagctgcgcggctgatcaagctgctccgccagggctacaccatccgcatcctgctgtggacctttgtccagtccttcaaggccctgccctacgtgtgtctgctcattgccatgctgttcttcatctacgccatcatcggcatgcaggtgtttgggaatattgccctggatgatgacaccagcatcaaccgccacaacaacttccggacgtttttgcaagccctgatgctgctgttcaggagcgccacgggggaggcctggcacgagatcatgctgtcctgcctgagcaaccaggcctgtgatgagcaggccaatgccaccgagtgtggaagtgactttgcctacttctacttcgtctccttcatcttcctgtgctcctttctgatgttgaacctctttgtggctgtgatcatggacaattttgagtacctcacgcgggactcttccatcctaggtcctcaccacttggatgagttcatccgggtctgggctgaatacgacccggctgcgtgtgggcgcatcagttacaatgacatgtttgagatgctgaaacacatgtccccgcctctggggctggggaagaaatgccctgctcgagttgcttacaagcgcctggttcgcatgaacatgcccatctccaacgaggacatgactgttcacttcacgtccacgctgatggccctcatccggacggcactggagatcaagctggccccagctgggacaaagcagcatcagtgtgacgcggagttgaggaaggagatttccgttgtgtgggccaatctgccccagaagactttggacttgctggtaccaccccataagcctgatgagatgacagtggggaaggtttatgcagctctgatgatattcgacttctacaagcagaacaaaaccaccagagaccagatgcagcaggctcctggaggcctctcccagatgggtcctgtgtccctgttccaccctctgaaggccaccctggagcagacacagccggctgtgctccgaggagcccgggttttccttcgacagaagagttccacctccctcagcaatggcggggccatacaaaaccaagagagtggcatcaaagagtctgtctcctggggcactcaaaggacccaggatgcaccccatgaggccaggccacccctggagcgtggccactccacagagatccctgtggggcggtcaggagcactggctgtggacgttcagatgcagagcataacccggaggggccctgatggggagccccagcctgggctggagagccagggtcgagcggcctccatgccccgccttgcggccgagactcagcccgtcacagatgccagccccatgaagcgctccatctccacgctggcccagcggccccgtgggactcatctttgcagcaccaccccggaccgcccaccccctagccaggcgtcgtcgcaccaccaccaccaccgctgccaccgccgcagggacaggaagcagaggtccctggagaaggggcccagcctgtctgccgatatggatggcgcaccaagcagtgctgtggggccggggctgcccccgggagaggggcctacaggctgccggcgggaacgagagcgccggcaggagcggggccggtcccaggagcggaggcagccctcatcctcctcctcggagaagcagcgcttctactcctgcgaccgctttgggggccgtgagcccccgaagcccaagccctccctcagcagccacccaacgtcgccaacagctggccaggagccgggaccccacccacagggcagtggttccgtgaatgggagccccttgctgtcaacatctggtgctagcacccccggccgcggtgggcggaggcagctcccccagacgcccctgactccccgccccagcatcacctacaagacggccaactcctcacccatccacttcgccggggctcagaccagcctccctgccttctccccaggccggctcagccgtgggctttccgaacacaacgccctgctgcagagagaccccctcagccagcccctggcccctggctctcgaattggctctgacccttacctggggcagcgtctggacagtgaggcctctgtccacgccctgcctgaggacactctcactttcgaggaggctgtggccaccaactcgggccgctcctccaggacttcctacgtgtcctccctgacctcccagtctcaccctctccgccgcgtgcccaacggttaccactgcaccctgggactcagctcgggtggccgagcacggcacagctaccaccaccctgaccaagaccactggtgctagctgcaccgtgaccgctcagacgcctgcatgcagcaggcgtgtgttccagtggatgagttttatcatccacacggggcagccggccctcgggggaggccttgcccaccttggtgaggctcctgtggcccctccctccccctcctcccctcttttactctagacgacgaataaagccctgttagaggatgcggctctctctgtccccttcctgtcctgccttcctgggtctcgtaccacacaccagaccctaaaccgcaggctgctgtgtgtggctgagaaggacccaggagtccaaatcccgtgtcctgggactcagcatccagcatgggtgcttggagccgttgtgaggagctctgcgtcctgtggggagcacccttcacgtggccgtgcggcacagagaagcagggcccacctgaaagtgcgccgagacctcgggacggaggggatggggagggggacacagtcgtggcttgtgcagcccgccagtgtcagcgaatgctcactcaggcaagctctgtcctccctggacaccgtcagccccacaggaaccgagctgggaagtgttcttgctgtggttgtgatttttaattgcaacacctctcattcttgtcacttctatatacgtgatgtagaaaaaatggaaaaccagaaaaatggggaaggaaatgttcacataactttaaaaaatcaaacctgtgaaagaaagatgtcagctttttgccacgtgtctttgtggcttatgcgaggagactccctgtgcagccctgtccggtccaggtggacgtagacggcccctggctctgctgctcttgaccaagtgcctgaccgccaggccctcacacccaggctcctgggcactgtggtgtgaggcgaggcctcgggatccatcaccgcaggatgctgtgaaaagtactcgcgatggcagccaggtagcaagcccttgccagtggagagcactggatgtcatggtggcaaacaaggcagccatttgctgtcctcctcccacgagtggaaggggtttccaaggaagccacagggcagctgaccacgtgcttgtgtgaggcattttcagtctgttctgcatatgattctcagggcacactctgtggtatgtgaaataggtttccttccacatacagcagaagagaggcaaaggctggtaggaaggaggaagacattggctgggggcttggatgtggggccgtcagggcaggagggaggaagccccagctggaatgaaactcagagcaagtgaccgagggaggacacggctcctgccactgaggccgggcacctgatgcccagcactgtcctggcgccagacacagggagcaggcagtcaagtgaggtctgacccccatggccacgctcaggagagaaagaccatgctcaggacactgtccaaggtgcacaagatgctgggaggtcccttgtttggtgaagaaagggagcatttagagcagttgatggtggtgtgtcctccgtgttctgaaattccagatgatctgtgttggattcttggcttctaccccatgattctcctcaaagaaattgtgtgtgatgtgtgtgtgtgtgtgtgtgtgtgtgtgtctgtgtcacaggagatgcagtgcctgtacaggtgtgttcagtgtgtggatgtcattaacccatagggctatgcaacaaaagacacatttaatagaagtaaaacacacaagaccgctgcctggtctcggggttcagcatgattgtgaccaaacctttttatagaatttccttacctgaaggcacaacactctgaaactttaaagataacagagtattttattccaatagaataaaccaggaatctcggactgtgcatgtgatcactgtgctcctgttgcaaagtagaaggatgtgtattttgacactgacgttttgtctcttgttccccagcccccagcccatgttatcttgggtgtcgaatgtgtccattccatgcagaaccacagccatttccccaggcagtgttgggtcgagaatccacttttctaaacccacacagcctagctggcttgtctagactcttctaggcattggaattgatgaaaactacagggagcggggaaaggagacattatgtcttgttttcctgactttgggttttgtttctcactgtgtcttctccggctatcatatatgtcccctgaatctcatagtgagctgccaaatttgaagtgcatcacccagttgtctgcatctggaaccagtcaagcagtggctgtagtttgaacaagttatgtgtgcatgtaacatatatacatatatacatatatacaagtatgtgcatgataatgtatatcttcgtactttttgatacaatgtattcatttgttaatttttaattatatttgatataaatcaaaggtttgttgcaaaactttatatttaagaagtgttaaaaaaaaaaaaaagtcccaaccatgcaacacaactgggacctacttaaaaagaaattctgtgattgactagtttgctgcctgagtcatatttatcagccaaactttggattctgctgttgtttctacaatgacattttgtatgaagcaaagtccttgaattaaaataaaaacttagcaaaaaatcaaaaacaaaacccca

SEQ ID NO: 113216 - DNA, 492 bp, Homo sapiens
  Payload ID: 2142
  Gene Symbol: CACNA1B
  Gene Name: calcium channel, voltage-dependent, N type, alpha 1B subunit
  ENST ID: ENST00000413253
  CDS Start-End: 1-492
caacttccggacgtttttgcaagccctgatgctgctgttcaggagcgccacgggggaggcctggcacgagatcatgctgtcctgcctgagcaaccaggcctgtgatgagcaggccaatgccaccgagtgtggaagtgactttgcctacttctacttcgtctccttcatcttcctgtgctcctttctgatgttgaacctctttgtggctgtgatcatggacaattttgagtacctcacgcgggactcttccatcctaggtcctcaccacttggatgagttcatccgggtctgggctgaatacgacccggctgcgtgttgccggattcattataaggatatgtacagtttgttgcgttgtattgcgccacccgttggcttagggaagaactgccctcgtaggttggcctacaagcgcctggttcgcatgaacatgcccatctccaacgaggacatgactgttcacttcacgtccacgctgatggccctcatccg

SEQ ID NO: 113217 - DNA, 8392 bp, Homo sapiens
  Payload ID: 2143
  Gene Symbol: CACNA1A
  Gene Name: calcium channel, voltage-dependent, P/Q type, alpha 1A subunit
  Uniprot ID: O00555
  ENST ID: ENST00000360228
  CDS Start-End: 1-7521
atggcccgcttcggagacgagatgccggcccgctacgggggaggaggctccggggcagccgccggggtggtcgtgggcagcggaggcgggcgaggagccgggggcagccggcagggcgggcagcccggggcgcaaaggatgtacaagcagtcaatggcgcagagagcgcggaccatggcactctacaaccccatccccgtccgacagaactgcctcacggttaaccggtctctcttcctcttcagcgaagacaacgtggtgagaaaatacgccaaaaagatcaccgaatggcctccctttgaatatatgattttagccaccatcatagcgaattgcatcgtcctcgcactggagcagcatctgcctgatgatgacaagaccccgatgtctgaacggctggatgacacagaaccatacttcattggaattttttgtttcgaggctggaattaaaatcattgcccttgggtttgccttccacaaaggctcctacttgaggaatggctggaatgtcatggactttgtggtggtgctaacgggcatcttggcgacagttgggacggagtttgacctacggacgctgagggcagttcgagtgctgcggccgctcaagctggtgtctggaatcccaagtttacaagtcgtcctgaagtcgatcatgaaggcgatgatccctttgctgcagatcggcctcctcctattttttgcaatccttatttttgcaatcatagggttagaattttatatgggaaaatttcataccacctgctttgaagaggggacagatgacattcagggtgagtctccggctccatgtgggacagaagagcccgcccgcacctgccccaatgggaccaaatgtcagccctactgggaagggcccaacaacgggatcactcagttcgacaacatcctgtttgcagtgctgactgttttccagtgcataaccatggaagggtggactgatctcctctacaatagcaacgatgcctcagggaacacttggaactggttgtacttcatccccctcatcatcatcggctccttttttatgctgaaccttgtgctgggtgtgctgtcaggggagtttgccaaagaaagggaacgggtggagaaccggcgggcttttctgaagctgaggcggcaacaacagattgaacgtgagctcaatgggtacatggagtggatctcaaaagcagaagaggtgatcctcgccgaggatgaaactgacggggagcagaggcatccctttgatgctctgcggagaaccaccataaagaaaagcaagacagatttgctcaaccccgaagaggctgaggatcagctggctgatatagcctctgtgggttctcccttcgcccgagccagcattaaaagtgccaagctggagaactcgaccttttttcacaaaaaggagaggaggatgcgtttctacatccgccgcatggtcaaaactcaggccttctactggactgtactcagtttggtagctctcaacacgctgtgtgttgctattgttcactacaaccagcccgagtggctctccgacttcctttactatgcagaattcattttcttaggactctttatgtccgaaatgtttataaaaatgtacgggcttgggacgcggccttacttccactcttccttcaactgctttgactgtggggttatcattgggagcatcttcgaggtcatctgggctgtcataaaacctggcacatcctttggaatcagcgtgttacgagccctcaggttattgcgtattttcaaagtcacaaagtactgggcatctctcagaaacctggtcgtctctctcctcaactccatgaagtccatcatcagcctgttgtttctccttttcctgttcattgtcgtcttcgcccttttgggaatgcaactcttcggcggccagtttaatttcgatgaagggactcctcccaccaacttcgatacttttccagcagcaataatgacggtgtttcagatcctgacgggcgaagactggaacgaggtcatgtacgacgggatcaagtctcaggggggcgtgcagggcggcatggtgttctccatctatttcattgtactgacgctctttgggaactacaccctcctgaatgtgttcttggccatcgctgtggacaatctggccaacgcccaggagctcaccaaggacgagcaagaggaagaagaagcagcgaaccagaaacttgccctacagaaagccaaggaggtggcagaagtgagtcctctgtccgcggccaacatgtctatagctgtgaaagagcaacagaagaatcaaaagccagccaagtccgtgtgggagcagcggaccagtgagatgcgaaagcagaacttgctggccagccgggaggccctgtataacgaaatggacccggacgagcgctggaaggctgcctacacgcggcacctgcggccagacatgaagacgcacttggaccggccgctggtggtggacccgcaggagaaccgcaacaacaacaccaacaagagccgggcggccgagcccaccgtggaccagcgcctcggccagcagcgcgccgaggacttcctcaggaaacaggcccgctaccacgatcgggcccgggaccccagcggctcggcgggcctggacgcacggaggccctgggcgggaagccaggaggccgagctgagccgggagggaccctacggccgcgagtcggaccaccacgcccgggagggcagcctggagcaacccgggttctgggagggcgaggccgagcgaggcaaggccggggacccccaccggaggcacgtgcaccggcaggggggcagcagggagagccgcagcgggtccccgcgcacgggcgcggacggggagcatcgacgtcatcgcgcgcaccgcaggcccggggaggagggtccggaggacaaggcggagcggagggcgcggcaccgcgagggcagccggccggcccggggcggcgagggcgagggcgagggccccgacgggggcgagcgcaggagaaggcaccggcatggcgctccagccacgtacgagggggacgcgcggagggaggacaaggagcggaggcatcggaggaggaaagagaaccagggctccggggtccctgtgtcgggccccaacctgtcaaccacccggccaatccagcaggacctgggccgccaagacccacccctggcagaggatattgacaacatgaagaacaacaagctggccaccgcggagtcggccgctccccacggcagccttggccacgccggcctgccccagagcccagccaagatgggaaacagcaccgaccccggccccatgctggccatccctgccatggccaccaacccccagaacgccgccagccgccggacgcccaacaacccggggaacccatccaatcccggcccccccaagacccccgagaatagccttatcgtcaccaaccccagcggcacccagaccaattcagctaagactgccaggaaacccgaccacaccacagtggacatccccccagcctgcccaccccccctcaaccacaccgtcgtacaagtgaacaaaaacgccaacccagacccactgccaaaaaaagaggaagagaagaaggaggaggaggaagacgaccgtggggaagacggccctaagccaatgcctccctatagctccatgttcatcctgtccacgaccaacccccttcgccgcctgtgccattacatcctgaacctgcgctactttgagatgtgcatcctcatggtcattgccatgagcagcatcgccctggccgccgaggaccctgtgcagcccaacgcacctcggaacaacgtgctgcgatactttgactacgtttttacaggcgtctttacctttgagatggtgatcaagatgattgacctggggctcgtcctgcatcagggtgcctacttccgtgacctctggaatattctcgacttcatagtggtcagtggggccctggtagcctttgccttcactggcaatagcaaaggaaaagacatcaacacgattaaatccctccgagtcctccgggtgctacgacctcttaaaaccatcaagcggctgccaaagctcaaggctgtgtttgactgtgtggtgaactcacttaaaaacgtcttcaacatcctcatcgtctacatgctattcatgttcatcttcgccgtggtggctgtgcagctcttcaaggggaaattcttccactgcactgacgagtccaaagagtttgagaaagattgtcgaggcaaatacctcctctacgagaagaatgaggtgaaggcgcgagaccgggagtggaagaagtatgaattccattacgacaatgtgctgtgggctctgctgaccctcttcaccgtgtccacgggagaaggctggccacaggtcctcaagcattcggtggacgccacctttgagaaccagggccccagccccgggtaccgcatggagatgtccattttctacgtcgtctactttgtggtgttccccttcttctttgtcaatatctttgtggccttgatcatcatcaccttccaggagcaaggggacaagatgatggaggaatacagcctggagaaaaatgagagggcctgcattgatttcgccatcagcgccaagccgctgacccgacacatgccgcagaacaagcagagcttccagtaccgcatgtggcagttcgtggtgtctccgcctttcgagtacacgatcatggccatgatcgccctcaacaccatcgtgcttatgatgaagttctatggggcttctgttgcttatgaaaatgccctgcgggtgttcaacatcgtcttcacctccctcttctctctggaatgtgtgctgaaagtcatggcttttgggattctgaattatttccgcgatgcctggaacatcttcgactttgtgactgttctgggcagcatcaccgatatcctcgtgactgagtttgggaataacttcatcaacctgagctttctccgcctcttccgagctgcccggctcatcaaacttctccgtcagggttacaccatccgcattcttctctggacctttgtgcagtccttcaaggccctgccttatgtctgtctgctgatcgccatgctcttcttcatctatgccatcattgggatgcaggtgtttggtaacattggcatcgacgtggaggacgaggacagtgatgaagatgagttccaaatcactgagcacaataacttccggaccttcttccaggccctcatgcttctcttccggagtgccaccggggaagcttggcacaacatcatgctttcctgcctcagcgggaaaccgtgtgataagaactctggcatcctgactcgagagtgtggcaatgaatttgcttatttttactttgtttccttcatcttcctctgctcgtttctgatgctgaatctctttgtcgccgtcatcatggacaactttgagtacctcacccgagactcctccatcctgggcccccaccacctggatgagtacgtgcgtgtctgggccgagtatgaccccgcagcttggggccgcatgccttacctggacatgtatcagatgctgagacacatgtctccgcccctgggtctggggaagaagtgtccggccagagtggcttacaagcggcttctgcggatggacctgcccgtcgcagatgacaacaccgtccacttcaattccaccctcatggctctgatccgcacagccctggacatcaagattgccaagggaggagccgacaaacagcagatggacgctgagctgcggaaggagatgatggcgatttggcccaatctgtcccagaagacgctagacctgctggtcacacctcacaagtccacggacctcaccgtggggaagatctacgcagccatgatgatcatggagtactaccggcagagcaaggccaagaagctgcaggccatgcgcgaggagcaggaccggacacccctcatgttccagcgcatggagcccccgtccccaacgcaggaagggggacctggccagaacgccctcccctccacccagctggacccaggaggagccctgatggctcacgaaagcggcctcaaggagagcccgtcctgggtgacccagcgtgcccaggagatgttccagaagacgggcacatggagtccggaacaaggcccccctaccgacatgcccaacagccagcctaactctcagtccgtggagatgcgagagatgggcagagatggctactccgacagcgagcactacctccccatggaaggccagggccgggctgcctccatgccccgcctccctgcagagaaccagaggagaaggggccggccacgtgggaataacctcagtaccatctcagacaccagccccatgaagcgttcagcctccgtgctgggccccaaggcccgacgcctggacgattactcgctggagcgggtcccgcccgaggagaaccagcggcaccaccagcggcgccgcgaccgcagccaccgcgcctctgagcgctccctgggccgctacaccgatgtggacacaggcttggggacagacctgagcatgaccacccaatccggggacctgccgtcgaaggagcgggaccaggagcggggccggcccaaggatcggaagcatcgacagcaccaccaccaccaccaccaccaccaccatcccccgccccccgacaaggaccgctatgcccaggaacggccggaccacggccgggcacgggctcgggaccagcgctggtcccgctcgcccagcgagggccgagagcacatggcgcaccggcagggcagtagttccgtaagtggaagcccagccccctcaacatctggtaccagcactccgcggcggggccgccgccagctcccccagaccccctccaccccccggccacacgtgtcctattcccctgtgatccgtaaggccggcggctcggggcccccgcagcagcagcagcagcagcagcagcagcagcagcagcaggcggtggccaggccgggccgggcggccaccagcggccctcggaggtacccaggccccacggccgagcctctggccggagatcggccgcccacggggggccacagcagcggccgctcgcccaggatggagaggcgggtcccaggcccggcccggagcgagtcccccagggcctgtcgacacggcggggcccggtggccggcatctggcccgcacgtgtccgaggggcccccgggtccccggcaccatggctactaccggggctccgactacgacgaggccgatggcccgggcagcgggggcggcgaggaggccatggccggggcctacgacgcgccaccccccgtacgacacgcgtcctcgggcgccaccgggcgctcgcccaggactccccgggcctcgggcccggcctgcgcctcgccttctcggcacggccggcgactccccaacggctactacccggcgcacggactggccaggccccgcgggccgggctccaggaagggcctgcacgaaccctacagcgagagtgacgatgattggtgctaagcccgggcgaggtggcgcccgcccggccccccacgcaccccacgcacacaccccacccgaggagccgcgcagaggccgcgggggcccagcacagagggcccgggagagggccagccgggagaccccagactctggagaggccagggctgggccacaagggtgtcccgcagagaccctcggccaaaagagaccctcctgggcagccacggcgccccccaaccagccccgatccccccacccacgacaggggctctcgggtgggaggcagggagcagacaaaccacacagccaagggatttgaattaactcagccatttttggagaactttggggaacatgaaaaaaaaaaaaaaaaaaaaaaaaaaaaacatttttaaaagaaaaaacggggagaaaaaaatagcttctattgatgagttttatcatctcaattgaatctttcctttccctgatgaagacagctggtggccgagtgcggcaaagaagccagaaggaaccagaatcccagtgccctacacccaccaccagacacactcacacccacacacgttctcagacacacacaagagtgcttgccggttataccaaaccctactattactgcctgcagaaatcaatttaaaaaaataataataacaataaacaattttaaaaaggacaaaaaaattaatgattgagaaaagaggcatttttttctgacatttggtcctgcttgaaacaacaaaagaagaagaaaaacccaccatcaccaccgattcctttgcttcttttttccttttttcctaccttgtttgaaaaccgtgggcttgggactgtgaattattgcatgacattcaaaaagaaaaaaaaaataaaaaaaagttgaatcaaa

SEQ ID NO: 113218 - DNA, 659 bp, Homo sapiens
  Payload ID: 2143
  Gene Symbol: CACNA1A
  Gene Name: calcium channel, voltage-dependent, P/Q type, alpha 1A subunit
  ENST ID: ENST00000574974
  CDS Start-End: 351-659
cagatagctcggacccctgggtgctgacgagatgggaccctcgggacccctggaggactcgcagtgctgaccactagccgcgtcgcctgagccccagcgctgatgcgatacagtttccccctcactgtgctggagggagaagaccctgggatttctgagcgaggcccgtggatgttgaagtcttcctgggtccccgactccatgctctcgcgccccagttactatgacgccctgcacaaccgcagctcggggcacgcccagcgccctgcaggacactcggcctccccggctcagcatctgcttcgagggcccccctctgaggcggcggggcggcgtggtggatcaccgagatgtcatcttggcccaccaggcccacaaaatccacagcaccccccaggccaggaggaaagaatgggaccaccatcatagcgaattgcatcgtcctcgcactggagcagcatctgcctgatgatgacaagaccccgatgtctgaacggctggatgacacagaaccatacttcattggaattttttgtttcgaggctggaattaaaatcattgcccttgggtttgccttccacaaaggctcctacttgaggaatggctggaatgtcatggactttgtggtggtgctaacgggcatcttggcgacagttggg

SEQ ID NO: 113219 - DNA, 7810 bp, Homo sapiens
  Payload ID: 2143
  Gene Symbol: CACNA1A
  Gene Name: calcium channel, voltage-dependent, P/Q type, alpha 1A subunit
  Uniprot ID: O00555
  ENST ID: ENST00000573710
  CDS Start-End: 280-7065
cgcaccctcctcccgcccctccttctccggggtcagccaggaagatgtcccgagctgctatccccggctcggcccgggcagccgccttctgagcccccgacccgaggcgccgagccgccgccgcccgatgggctgggccgtggagcgtctccgcagtcgtagctccagccgccgcgctcccagccccggcagcctcagcatcagcggcggcggcggcggcggcggcgtcttccgcatcgttcgccgcagcgtaacccggagccctttgctctttgcagaatggcccgcttcggagacgagatgccggcccgctacgggggaggaggctccggggcagccgccggggtggtcgtgggcagcggaggcgggcgaggagccgggggcagccggcagggcgggcagcccggggcgcaaaggatgtacaagcagtcaatggcgcagagagcgcggaccatggcactctacaaccccatccccgtccgacagaactgcctcacggttaaccggtctctcttcctcttcagcgaagacaacgtggtgagaaaatacgccaaaaagatcaccgaatggcctccctttgaatatatgattttagccaccatcatagcgaattgcatcgtcctcgcactggagcagcatctgcctgatgatgacaagaccccgatgtctgaacggctggatgacacagaaccatacttcattggaattttttgtttcgaggctggaattaaaatcattgcccttgggtttgccttccacaaaggctcctacttgaggaatggctggaatgtcatggactttgtggtggtgctaacgggcatcttggcgacagttgggacggagtttgacctacggacgctgagggcagttcgagtgctgcggccgctcaagctggtgtctggaatcccaagtttacaagtcgtcctgaagtcgatcatgaaggcgatgatccctttgctgcagatcggcctcctcctattttttgcaatccttatttttgcaatcatagggttagaattttatatgggaaaatttcataccacctgctttgaagaggggacagatgacattcagggtgagtctccggctccatgtgggacagaagagcccgcccgcacctgccccaatgggaccaaatgtcagccctactgggaagggcccaacaacgggatcactcagttcgacaacatcctgtttgcagtgctgactgttttccagtgcataaccatggaagggtggactgatctcctctacaatagcaacgatgcctcagggaacacttggaactggttgtacttcatccccctcatcatcatcggctccttttttatgctgaaccttgtgctgggtgtgctgtcaggggagtttgccaaagaaagggaacgggtggagaaccggcgggcttttctgaagctgaggcggcaacaacagattgaacgtgagctcaatgggtacatggagtggatctcaaaagcagaagaggtgatcctcgccgaggatgaaactgacggggagcagaggcatccctttgatggagctctgcggagaaccaccataaagaaaagcaagacagatttgctcaaccccgaagaggctgaggatcagctggctgatatagcctctgtgggttctcccttcgcccgagccagcattaaaagtgccaagctggagaactcgaccttttttcacaaaaaggagaggaggatgcgtttctacatccgccgcatggtcaaaactcaggccttctactggactgtactcagtttggtagctctcaacacgctgtgtgttgctattgttcactacaaccagcccgagtggctctccgacttcctttactatgcagaattcattttcttaggactctttatgtccgaaatgtttataaaaatgtacgggcttgggacgcggccttacttccactcttccttcaactgctttgactgtggggttatcattgggagcatcttcgaggtcatctgggctgtcataaaacctggcacatcctttggaatcagcgtgttacgagccctcaggttattgcgtattttcaaagtcacaaagtactgggcatctctcagaaacctggtcgtctctctcctcaactccatgaagtccatcatcagcctgttgtttctccttttcctgttcattgtcgtcttcgcccttttgggaatgcaactcttcggcggccagtttaatttcgatgaagggactcctcccaccaacttcgatacttttccagcagcaataatgacggtgtttcagatcctgacgggcgaagactggaacgaggtcatgtacgacgggatcaagtctcaggggggcgtgcagggcggcatggtgttctccatctatttcattgtactgacgctctttgggaactacaccctcctgaatgtgttcttggccatcgctgtggacaatctggccaacgcccaggagctcaccaaggacgagcaagaggaagaagaagcagcgaaccagaaacttgccctacagaaagccaaggaggtggcagaagtgagtcctctgtccgcggccaacatgtctatagctgtgaaagagcaacagaagaatcaaaagccagccaagtccgtgtgggagcagcggaccagtgagatgcgaaagcagaacttgctggccagccgggaggccctgtataacgaaatggacccggacgagcgctggaaggctgcctacacgcggcacctgcggccagacatgaagacgcacttggaccggccgctggtggtggacccgcaggagaaccgcaacaacaacaccaacaagagccgggcggccgagcccaccgtggaccagcgcctcggccagcagcgcgccgaggacttcctcaggaaacaggcccgctaccacgatcgggcccgggaccccagcggctcggcgggcctggacgcacggaggccctgggcgggaagccaggaggccgagctgagccgggagggaccctacggccgcgagtcggaccaccacgcccgggagggcagcctggagcaacccgggttctgggagggcgaggccgagcgaggcaaggccggggacccccaccggaggcacgtgcaccggcaggggggcagcagggagagccgcagcgggtccccgcgcacgggcgcggacggggagcatcgacgtcatcgcgcgcaccgcaggcccggggaggagggtccggaggacaaggcggagcggagggcgcggcaccgcgagggcagccggccggcccggggcggcgagggcgagggcgagggccccgacgggggcgagcgcaggagaaggcaccggcatggcgctccagccacgtacgagggggacgcgcggagggaggacaaggagcggaggcatcggaggaggaaagagaaccagggctccggggtccctgtgtcgggccccaacctgtcaaccacccggccaatccagcaggacctgggccgccaagacccacccctggcagaggatattgacaacatgaagaacaacaagctggccaccgcggagtcggccgctccccacggcagccttggccacgccggcctgccccagagcccagccaagatgggaaacagcaccgaccccggccccatgctggccatccctgccatggccaccaacccccagaacgccgccagccgccggacgcccaacaacccggggaacccatccaatcccggcccccccaagacccccgagaatagccttatcgtcaccaaccccagcggcacccagaccaattcagctaagactgccaggaaacccgaccacaccacagtggacatccccccagcctgcccaccccccctcaaccacaccgtcgtacaagtgaacaaaaacgccaacccagacccactgccaaaaaaagaggaagagaagaaggaggaggaggaagacgaccgtggggaagacggccctaagccaatgcctccctatagctccatgttcatcctgtccacgaccaacccccttcgccgcctgtgccattacatcctgaacctgcgctactttgagatgtgcatcctcatggtcattgccatgagcagcatcgccctggccgccgaggaccctgtgcagcccaacgcacctcggaacaacgtgctgcgatactttgactacgtttttacaggcgtctttacctttgagatggtgatcaagatgattgacctggggctcgtcctgcatcagggtgcctacttccgtgacctctggaatattctcgacttcatagtggtcagtggggccctggtagcctttgccttcactggcaatagcaaaggaaaagacatcaacacgattaaatccctccgagtcctccgggtgctacgacctcttaaaaccatcaagcggctgccaaagctcaaggctgtgtttgactgtgtggtgaactcacttaaaaacgtcttcaacatcctcatcgtctacatgctattcatgttcatcttcgccgtggtggctgtgcagctcttcaaggggaaattcttccactgcactgacgagtccaaagagtttgagaaagattgtcgaggcaaatacctcctctacgagaagaatgaggtgaaggcgcgagaccgggagtggaagaagtatgaattccattacgacaatgtgctgtgggctctgctgaccctcttcaccgtgtccacgggagaaggctggccacaggtcctcaagcattcggtggacgccacctttgagaaccagggccccagccccgggtaccgcatggagatgtccattttctacgtcgtctactttgtggtgttccccttcttctttgtcaatatctttgtggccttgatcatcatcaccttccaggagcaaggggacaagatgatggaggaatacagcctggagaaaaatgagagggcctgcattgatttcgccatcagcgccaagccgctgacccgacacatgccgcagaacaagcagagcttccagtaccgcatgtggcagttcgtggtgtctccgcctttcgagtacacgatcatggccatgatcgccctcaacaccatcgtgcttatgatgaagttctatggggcttctgttgcttatgaaaatgccctgcgggtgttcaacatcgtcttcacctccctcttctctctggaatgtgtgctgaaagtcatggcttttgggattctgaattatttccgcgatgcctggaacatcttcgactttgtgactgttctgggcagcatcaccgatatcctcgtgactgagtttgggaataacttcatcaacctgagctttctccgcctcttccgagctgcccggctcatcaaacttctccgtcagggttacaccatccgcattcttctctggacctttgtgcagtccttcaaggccctgccttatgtctgtctgctgatcgccatgctcttcttcatctatgccatcattgggatgcaggtgtttggtaacattggcatcgacgtggaggacgaggacagtgatgaagatgagttccaaatcactgagcacaataacttccggaccttcttccaggccctcatgcttctcttccggagtgccaccggggaagcttggcacaacatcatgctttcctgcctcagcgggaaaccgtgtgataagaactctggcatcctgactcgagagtgtggcaatgaatttgcttatttttactttgtttccttcatcttcctctgctcgtttctgatgctgaatctctttgtcgccgtcatcatggacaactttgagtacctcacccgagactcctccatcctgggcccccaccacctggatgagtacgtgcgtgtctgggccgagtatgaccccgcagcttgcggtcggattcattataaggatatgtacagtttattacgagtaatatctccccctctcggcttaggcaagaaatgtcctcatagggttgcttgcaagcggcttctgcggatggacctgcccgtcgcagatgacaacaccgtccacttcaattccaccctcatggctctgatccgcacagccctggacatcaagattgccaagggaggagccgacaaacagcagatggacgctgagctgcggaaggagatgatggcgatttggcccaatctgtcccagaagacgctagacctgctggtcacacctcacaagtccacggacctcaccgtggggaagatctacgcagccatgatgatcatggagtactaccggcagagcaaggccaagaagctgcaggccatgcgcgaggagcaggaccggacacccctcatgttccagcgcatggagcccccgtccccaacgcaggaagggggacctggccagaacgccctcccctccacccagctggacccaggaggagccctgatggctcacgaaagcggcctcaaggagagcccgtcctgggtgacccagcgtgcccaggagatgttccagaagacgggcacatggagtccggaacaaggcccccctaccgacatgcccaacagccagcctaactctcagtccgtggagatgcgagagatgggcagagatggctactccgacagcgagcactacctccccatggaaggccagggccgggctgcctccatgccccgcctccctgcagagaaccagaggagaaggggccggccacgtgggaataacctcagtaccatctcagacaccagccccatgaagcgttcagcctccgtgctgggccccaaggcccgacgcctggacgattactcgctggagcgggtcccgcccgaggagaaccagcggcaccaccagcggcgccgcgaccgcagccaccgcgcctctgagcgctccctgggccgctacaccgatgtggacacaggcttggggacagacctgagcatgaccacccaatccggggacctgccgtcgaaggagcgggaccaggagcggggccggcccaaggatcggaagcatcgacagcaccaccaccaccaccaccaccaccaccatcccccgccccccgacaaggaccgctatgcccaggaacggccggaccacggccgggcacgggctcgggaccagcgctggtcccgctcgcccagcgagggccgagagcacatggcgcaccggcagtagttccgtaagtggaagcccagccccctcaacatctggtaccagcactccgcggcggggccgccgccagctcccccagaccccctccaccccccggccacacgtgtcctattcccctgtgatccgtaaggccggcggctcggggcccccgcagcagcagcagcagcagcagcagcagcagcagcagcaggcggtggccaggccgggccgggcggccaccagcggccctcggaggtacccaggccccacggccgagcctctggccggagatcggccgcccacggggggccacagcagcggccgctcgcccaggatggagaggcgggtcccaggcccggcccggagcgagtcccccagggcctgtcgacacggcggggcccggtggccggcatctggcccgcacgtgtccgaggggcccccgggtccccggcaccatggctactaccggggctccgactacgacgaggccgatggcccgggcagcgggggcggcgaggaggccatggccggggcctacgacgcgccaccccccgtacgacacgcgtcctcgggcgccaccgggcgctcgcccaggactccccgggcctcgggcccggcctgcgcctcgccttctcggcacggccggcgactccccaacggctactacccggcgcacggactggccaggccccgcgggccgggctccaggaagggcctgcacgaaccctacagcgagagtgacgatgattggtgctaagcccgggcgagg

SEQ ID NO: 113220 - DNA, 819 bp, Homo sapiens
  Payload ID: 2143
  Gene Symbol: CACNA1A
  Gene Name: calcium channel, voltage-dependent, P/Q type, alpha 1A subunit
  ENST ID: ENST00000573891
  CDS Start-End: 1-238
gaagttctatggggcttctgttgcttatgaaaatgccctgcgggtgttcaacatcgtcttcacctccctcttctctctggaatgtgtgctgaaagtcatggcttttgggattctgaattatttccgcgatgcctggaacatcttcgactttgtgactgttctgggcagcatcaccgatatcctcgtgactgagtttggggcctggtcccgtgctactccacccagccccagaagctgagaagccatccctgagaggggggaaaagggccccaaatgcatcttctccgactcagcgggcagcgaggactcaccctgcagccgaacagtcccagctccctcccgtcctccccattcccgctcgccaaggggaataacttcatcaacctgagctttctccgcctcttccgagctgcccggctcatcaaacttctccgtcagggttacaccatccgcattcttctctggacctttgtgcagtccttcaaggccctgccttatgtctgtctgctgatcgccatgctcttcttcatctatgccatcattgggatgcaggtgtttggtaacattggcatcgacgtggaggacgaggacagtgatgaagatgagttccaaatcactgagcacaataacttccggaccttcttccaggccctcatgcttctcttccggagtgccaccggggaagcttggcacaacatcatgctttcctgcctcagcgggaaaccgtgtgataagaactctggcatcctgactcgagagtgtggcaatgaatttgcttatttttactttgtttccttcatcttcctctgctcgtttctg

SEQ ID NO: 113221 - DNA, 744 bp, Homo sapiens
  Payload ID: 2143
  Gene Symbol: CACNA1A
  Gene Name: calcium channel, voltage-dependent, P/Q type, alpha 1A subunit
  ENST ID: ENST00000592864
  CDS Start-End: 149-256
tgctctcgcgccccagttactatgacgccctgcacaaccgcagctcggggcacgcccagcgccctgcaggacactcggcctccccggctcagcatctgcttcgagggcccccctctgaggcggcggggcggcgtggtggatcaccgagatgtcatcttggcccaccaggcccacaaaatccacagcaccccccaggccaggaggaaagaatgggagaagctaccagaggatgtgcttcacccaaacaagggagtaaaccaagaagagggaaacagagaacactggacttaagaaatccaacaatgagaagcaaagggaatctcctggatgatgataaagagagagcccaggatgaaagctgtatgccagggaaagtcctgattagaccatgtgacaagtcttcaggaaagactgcttctggatgataaaatgaactgaatacctgttaagagacttggggggtcaaatttgcaataagtaccaaacaaagaagattaaaaaatgataagtcccaagggaaacaatatgttgtaaagaaaaagtagctatagtttgttcatgacataactgtaacttgccttgtacatgataatataaacaccgaatcttcctcactttgtgaaagaacaatattgggcaaatgcgcaggttttggaaagttccatgtgtagggggatggagggagaaattagcaaaatcctccttttctatagctaatacctataaagtgctacaacacccaga

SEQ ID NO: 113222 - DNA, 3555 bp, Homo sapiens
  Payload ID: 2143
  Gene Symbol: CACNA1A
  Gene Name: calcium channel, voltage-dependent, P/Q type, alpha 1A subunit
  ENST ID: ENST00000585802
  CDS Start-End: 1-3543
ctcgacttcatagtggtcagtggggccctggtagcctttgccttcactggcaatagcaaaggaaaagacatcaacacgattaaatccctccgagtcctccgggtgctacgacctcttaaaaccatcaagcggctgccaaagctcaaggctgtgtttgactgtgtggtgaactcacttaaaaacgtcttcaacatcctcatcgtctacatgctattcatgttcatcttcgccgtggtggctgtgcagctcttcaaggggaaattcttccactgcactgacgagtccaaagagtttgagaaagattgtcgaggcaaatacctcctctacgagaagaatgaggtgaaggcgcgagaccgggagtggaagaagtatgaattccattacgacaatgtgctgtgggctctgctgaccctcttcaccgtgtccacgggagaaggctggccacaggtcctcaagcattcggtggacgccacctttgagaaccagggccccagccccgggtaccgcatggagatgtccattttctacgtcgtctactttgtggtgttccccttcttctttgtcaatatctttgtggccttgatcatcatcaccttccaggagcaaggggacaagatgatggaggaatacagcctggagaaaaatgagagggcctgcattgatttcgccatcagcgccaagccgctgacccgacacatgccgcagaacaagcagagcttccagtaccgcatgtggcagttcgtggtgtctccgcctttcgagtacacgatcatggccatgatcgccctcaacaccatcgtgcttatgatgaagttctatggggcttctgttgcttatgaaaatgccctgcgggtgttcaacatcgtcttcacctccctcttctctctggaatgtgtgctgaaagtcatggcttttgggattctgaattatttccgcgatgcctggaacatcttcgactttgtgactgttctgggcagcatcaccgatatcctcgtgactgagtttgggaataacttcatcaacctgagctttctccgcctcttccgagctgcccggctcatcaaacttctccgtcagggttacaccatccgcattcttctctggacctttgtgcagtccttcaaggccctgccttatgtctgtctgctgatcgccatgctcttcttcatctatgccatcattgggatgcaggtgtttggtaacattggcatcgacgtggaggacgaggacagtgatgaagatgagttccaaatcactgagcacaataacttccggaccttcttccaggccctcatgcttctcttccggagtgccaccggggaagcttggcacaacatcatgctttcctgcctcagcgggaaaccgtgtgataagaactctggcatcctgactcgagagtgtggcaatgaatttgcttatttttactttgtttccttcatcttcctctgctcgtttctgatgctgaatctctttgtcgccgtcatcatggacaactttgagtacctcacccgagactcctccatcctgggcccccaccacctggatgagtacgtgcgtgtctgggccgagtatgaccccgcagcttggggccgcatgccttacctggacatgtatcagatgctgagacacatgtctccgcccctgggtctggggaagaagtgtccggccagagtggcttacaagcggcttctgcggatggacctgcccgtcgcagatgacaacaccgtccacttcaattccaccctcatggctctgatccgcacagccctggacatcaagattgccaagggaggagccgacaaacagcagatggacgctgagctgcggaaggagatgatggcgatttggcccaatctgtcccagaagacgctagacctgctggtcacacctcacaagtccacggacctcaccgtggggaagatctacgcagccatgatgatcatggagtactaccggcagagcaaggccaagaagctgcaggccatgcgcgaggagcaggaccggacacccctcatgttccagcgcatggagcccccgtccccaacgcaggaagggggacctggccagaacgccctcccctccacccagctggacccaggaggagccctgatggctcacgaaagcggcctcaaggagagcccgtcctgggtgacccagcgtgcccaggagatgttccagaagacgggcacatggagtccggaacaaggcccccctaccgacatgcccaacagccagcctaactctcagtccgtggagatgcgagagatgggcagagatggctactccgacagcgagcactacctccccatggaaggccagggccgggctgcctccatgccccgcctccctgcagagaaccagaccatctcagacaccagccccatgaagcgttcagcctccgtgctgggccccaaggcccgacgcctggacgattactcgctggagcgggtcccgcccgaggagaaccagcggcaccaccagcggcgccgcgaccgcagccaccgcgcctctgagcgctccctgggccgctacaccgatgtggacacaggcttggggacagacctgagcatgaccacccaatccggggacctgccgtcgaaggagcgggaccaggagcggggccggcccaaggatcggaagcatcgacagcaccaccaccaccaccaccaccaccaccatcccccgccccccgacaaggaccgctatgcccaggaacggccggaccacggccgggcacgggctcgggaccagcgctggtcccgctcgcccagcgagggccgagagcacatggcgcaccggcagggcagtagttccgtaagtggaagcccagccccctcaacatctggtaccagcactccgcggcggggccgccgccagctcccccagaccccctccaccccccggccacacgtgtcctattcccctgtgatccgtaaggccggcggctcggggcccccgcagcagcagcagcagcagcagcagcagcagcagcagcaggcggtggccaggccgggccgggcggccaccagcggccctcggaggtacccaggccccacggccgagcctctggccggagatcggccgcccacggggggccacagcagcggccgctcgcccaggatggagaggcgggtcccaggcccggcccggagcgagtcccccagggcctgtcgacacggcggggcccggtggccggcatctggcccgcacgtgtccgaggggcccccgggtccccggcaccatggctactaccggggctccgactacgacgaggccgatggcccgggcagcgggggcggcgaggaggccatggccggggcctacgacgcgccaccccccgtacgacacgcgtcctcgggcgccaccgggcgctcgcccaggactccccgggcctcgggcccggcctgcgcctcgccttctcggcacggccggcgactccccaacggctactacccggcgcacggactggccaggccccgcgggccgggctccaggaagggcctgcacgaaccctacagcgagagtgacgatgattggtgctaagcccgggcgagg

SEQ ID NO: 113223 - DNA, 3765 bp, Homo sapiens
  Payload ID: 2143
  Gene Symbol: CACNA1A
  Gene Name: calcium channel, voltage-dependent, P/Q type, alpha 1A subunit
  ENST ID: ENST00000587525
  CDS Start-End: 1-2946
caggagcaaggggacaagatgatggaggaatacagcctggagaaaaatgagagggcctgcattgatttcgccatcagcgccaagccgctgacccgacacatgccgcagaacaagcagagcttccagtaccgcatgtggcagttcgtggtgtctccgcctttcgagtacacgatcatggccatgatcgccctcaacaccatcgtgcttatgatgaagttctatggggcttctgttgcttatgaaaatgccctgcgggtgttcaacatcgtcttcacctccctcttctctctggaatgtgtgctgaaagtcatggcttttgggattctgaattatttccgcgatgcctggaacatcttcgactttgtgactgttctgggcagcatcaccgatatcctcgtgactgagtttgggaataacttcatcaacctgagctttctccgcctcttccgagctgcccggctcatcaaacttctccgtcagggttacaccatccgcattcttctctggacctttgtgcagtccttcaaggccctgccttatgtctgtctgctgatcgccatgctcttcttcatctatgccatcattgggatgcaggtgtttggtaacattggcatcgacgtggaggacgaggacagtgatgaagatgagttccaaatcactgagcacaataacttccggaccttcttccaggccctcatgcttctcttccggagtgccaccggggaagcttggcacaacatcatgctttcctgcctcagcgggaaaccgtgtgataagaactctggcatcctgactcgagagtgtggcaatgaatttgcttatttttactttgtttccttcatcttcctctgctcgtttctgatgctgaatctctttgtcgccgtcatcatggacaactttgagtacctcacccgagactcctccatcctgggcccccaccacctggatgagtacgtgcgtgtctgggccgagtatgaccccgcagcttgcggtcggattcattataaggatatgtacagtttattacgagtaatatctccccctctcggcttaggcaagaaatgtcctcatagggttgcttgcaagcggcttctgcggatggacctgcccgtcgcagatgacaacaccgtccacttcaattccaccctcatggctctgatccgcacagccctggacatcaagattgccaagggaggagccgacaaacagcagatggacgctgagctgcggaaggagatgatggcgatttggcccaatctgtcccagaagacgctagacctgctggtcacacctcacaagtccacggacctcaccgtggggaagatctacgcagccatgatgatcatggagtactaccggcagagcaaggccaagaagctgcaggccatgcgcgaggagcaggaccggacacccctcatgttccagcgcatggagcccccgtccccaacgcaggaagggggacctggccagaacgccctcccctccacccagctggacccaggaggagccctgatggctcacgaaagcggcctcaaggagagcccgtcctgggtgacccagcgtgcccaggagatgttccagaagacgggcacatggagtccggaacaaggcccccctaccgacatgcccaacagccagcctaactctcagtccgtggagatgcgagagatgggcagagatggctactccgacagcgagcactacctccccatggaaggccagggccgggctgcctccatgccccgcctccctgcagagaaccagaccatctcagacaccagccccatgaagcgttcagcctccgtgctgggccccaaggcccgacgcctggacgattactcgctggagcgggtcccgcccgaggagaaccagcggcaccaccagcggcgccgcgaccgcagccaccgcgcctctgagcgctccctgggccgctacaccgatgtggacacaggcttggggacagacctgagcatgaccacccaatccggggacctgccgtcgaaggagcgggaccaggagcggggccggcccaaggatcggaagcatcgacagcaccaccaccaccaccaccaccaccaccatcccccgccccccgacaaggaccgctatgcccaggaacggccggaccacggccgggcacgggctcgggaccagcgctggtcccgctcgcccagcgagggccgagagcacatggcgcaccggcagggcagtagttccgtaagtggaagcccagccccctcaacatctggtaccagcactccgcggcggggccgccgccagctcccccagaccccctccaccccccggccacacgtgtcctattcccctgtgatccgtaaggccggcggctcggggcccccgcagcagcagcagcagcagcagcagcagcagcagcagcaggcggtggccaggccgggccgggcggccaccagcggccctcggaggtacccaggccccacggccgagcctctggccggagatcggccgcccacggggggccacagcagcggccgctcgcccaggatggagaggcgggtcccaggcccggcccggagcgagtcccccagggcctgtcgacacggcggggcccggtggccggcatctggcccgcacgtgtccgaggggcccccgggtccccggcaccatggctactaccggggctccgactacgacgaggccgatggcccgggcagcgggggcggcgaggaggccatggccggggcctacgacgcgccaccccccgtacgacacgcgtcctcgggcgccaccgggcgctcgcccaggactccccgggcctcgggcccggcctgcgcctcgccttctcggcacggccggcgactccccaacggctactacccggcgcacggactggccaggccccgcgggccgggctccaggaagggcctgcacgaaccctacagcgagagtgacgatgattggtgctaagcccgggcgaggtggcgcccgcccggccccccacgcaccccacgcacacaccccacccgaggagccgcgcagaggccgcgggggcccagcacagagggcccgggagagggccagccgggagaccccagactctggagaggccagggctgggccacaagggtgtcccgcagagaccctcggccaaaagagaccctcctgggcagccacggcgccccccaaccagccccgatccccccacccacgacaggggctctcgggtgggaggcagggagcagacaaaccacacagccaagggatttgaattaactcagccatttttggagaactttggggaacatgaaaaaaaaaaaaaaaaaaaaaaaaaaaaacatttttaaaagaaaaaacggggagaaaaaaatagcttctattgatgagttttatcatctcaattgaatctttcctttccctgatgaagacagctggtggccgagtgcggcaaagaagccagaaggaaccagaatcccagtgccctacacccaccaccagacacactcacacccacacacgttctcagacacacacaagagtgcttgccggttataccaaaccctactattactgcctgcagaaatcaatttaaaaaaataataataacaataaacaattttaaaaaggacaaaaaaattaatgattgagaaaagaggcatttttttctgacatttggtcctgcttgaaacaacaaaagaagaagaaaaacccaccatcaccaccgattcctttgcttcttttttccttttttcctaccttgtttgaaaaccgtgggcttgggactgtgaa

SEQ ID NO: 113224 - DNA, 8410 bp, Homo sapiens
  Payload ID: 2143
  Gene Symbol: CACNA1A
  Gene Name: calcium channel, voltage-dependent, P/Q type, alpha 1A subunit
  ENST ID: ENST00000614285
  CDS Start-End: 1-7539
atggcccgcttcggagacgagatgccggcccgctacgggggaggaggctccggggcagccgccggggtggtcgtgggcagcggaggcgggcgaggagccgggggcagccggcagggcgggcagcccggggcgcaaaggatgtacaagcagtcaatggcgcagagagcgcggaccatggcactctacaaccccatccccgtccgacagaactgcctcacggttaaccggtctctcttcctcttcagcgaagacaacgtggtgagaaaatacgccaaaaagatcaccgaatggccaccctttgaatatatgattttagccaccatcatagcgaattgcatcgtcctcgcactggagcagcatctgcctgatgatgacaagaccccgatgtctgaacggctggatgacacagaaccatacttcattggaattttttgtttcgaggctggaattaaaatcattgcccttgggtttgccttccacaaaggctcctacttgaggaatggctggaatgtcatggactttgtggtggtgctaacgggcatcttggcgacagttgggacggagtttgacctacggacgctgagggcagttcgagtgctgcggccgctcaagctggtgtctggaatcccaagtttacaagtcgtcctgaagtcgatcatgaaggcgatgatccctttgctgcagatcggcctcctcctattttttgcaatccttatttttgcaatcatagggttagaattttatatgggaaaatttcataccacctgctttgaagaggggacagatgacattcagggtgagtctccggctccatgtgggacagaagagcccgcccgcacctgccccaatgggaccaaatgtcagccctactgggaagggcccaacaacgggatcactcagttcgacaacatcctgtttgcagtgctgactgttttccagtgcataaccatggaagggtggactgatctcctctacaatagcaacgatgcctcagggaacacttggaactggttgtacttcatccccctcatcatcatcggctccttttttatgctgaaccttgtgctgggtgtgctgtcaggggagtttgccaaagaaagggaacgggtggagaaccggcgggcttttctgaagctgaggcggcaacaacagattgaacgtgagctcaatgggtacatggagtggatctcaaaagcagaagaggtgatcctcgccgaggatgaaactgacggggagcagaggcatccctttgatggagctctgcggagaaccaccataaagaaaagcaagacagatttgctcaaccccgaagaggctgaggatcagctggctgatatagcctctgtgggttctcccttcgcccgagccagcattaaaagtgccaagctggagaactcgaccttttttcacaaaaaggagaggaggatgcgtttctacatccgccgcatggtcaaaactcaggccttctactggactgtactcagtttggtagctctcaacacgctgtgtgttgctattgttcactacaaccagcccgagtggctctccgacttcctttactatgcagaattcattttcttaggactctttatgtccgaaatgtttataaaaatgtacgggcttgggacgcggccttacttccactcttccttcaactgctttgactgtggggttatcattgggagcatcttcgaggtcatctgggctgtcataaaacctggcacatcctttggaatcagcgtgttacgagccctcaggttattgcgtattttcaaagtcacaaagtactgggcatctctcagaaacctggtcgtctctctcctcaactccatgaagtccatcatcagcctgttgtttctccttttcctgttcattgtcgtcttcgcccttttgggaatgcaactcttcggcggccagtttaatttcgatgaagggactcctcccaccaacttcgatacttttccagcagcaataatgacggtgtttcagatcctgacgggcgaagactggaacgaggtcatgtacgacgggatcaagtctcaggggggcgtgcagggcggcatggtgttctccatctatttcattgtactgacgctctttgggaactacaccctcctgaatgtgttcttggccatcgctgtggacaatctggccaacgcccaggagctcaccaaggtggaggcggacgagcaagaggaagaagaagcagcgaaccagaaacttgccctacagaaagccaaggaggtggcagaagtgagtcctctgtccgcggccaacatgtctatagctgtgaaagagcaacagaagaatcaaaagccagccaagtccgtgtgggagcagcggaccagtgagatgcgaaagcagaacttgctggccagccgggaggccctgtataacgaaatggacccggacgagcgctggaaggctgcctacacgcggcacctgcggccagacatgaagacgcacttggaccggccgctggtggtggacccgcaggagaaccgcaacaacaacaccaacaagagccgggcggccgagcccaccgtggaccagcgcctcggccagcagcgcgccgaggacttcctcaggaaacaggcccgctaccacgatcgggcccgggaccccagcggctcggcgggcctggacgcacggaggccctgggcgggaagccaggaggccgagctgagccgggagggaccctacggccgcgagtcggaccaccacgcccgggagggcagcctggagcaacccgggttctgggagggcgaggccgagcgaggcaaggccggggacccccaccggaggcacgtgcaccggcaggggggcagcagggagagccgcagcgggtccccgcgcacgggcgcggacggggagcatcgacgtcatcgcgcgcaccgcaggcccggggaggagggtccggaggacaaggcggagcggagggcgcggcaccgcgagggcagccggccggcccggggcggcgagggcgagggcgagggccccgacgggggcgagcgcaggagaaggcaccggcatggcgctccagccacgtacgagggggacgcgcggagggaggacaaggagcggaggcatcggaggaggaaagagaaccagggctccggggtccctgtgtcgggccccaacctgtcaaccacccggccaatccagcaggacctgggccgccaagacccacccctggcagaggatattgacaacatgaagaacaacaagctggccaccgcggagtcggccgctccccacggcagccttggccacgccggcctgccccagagcccagccaagatgggaaacagcaccgaccccggccccatgctggccatccctgccatggccaccaacccccagaacgccgccagccgccggacgcccaacaacccggggaacccatccaatcccggcccccccaagacccccgagaatagccttatcgtcaccaaccccagcggcacccagaccaattcagctaagactgccaggaaacccgaccacaccacagtggacatccccccagcctgcccaccccccctcaaccacaccgtcgtacaagtgaacaaaaacgccaacccagacccactgccaaaaaaagaggaagagaagaaggaggaggaggaagacgaccgtggggaagacggccctaagccaatgcctccctatagctccatgttcatcctgtccacgaccaacccccttcgccgcctgtgccattacatcctgaacctgcgctactttgagatgtgcatcctcatggtcattgccatgagcagcatcgccctggccgccgaggaccctgtgcagcccaacgcacctcggaacaacgtgctgcgatactttgactacgtttttacaggcgtctttacctttgagatggtgatcaagatgattgacctggggctcgtcctgcatcagggtgcctacttccgtgacctctggaatattctcgacttcatagtggtcagtggggccctggtagcctttgccttcactggcaatagcaaaggaaaagacatcaacacgattaaatccctccgagtcctccgggtgctacgacctcttaaaaccatcaagcggctgccaaagctcaaggctgtgtttgactgtgtggtgaactcacttaaaaacgtcttcaacatcctcatcgtctacatgctattcatgttcatcttcgccgtggtggctgtgcagctcttcaaggggaaattcttccactgcactgacgagtccaaagagtttgagaaagattgtcgaggcaaatacctcctctacgagaagaatgaggtgaaggcgcgagaccgggagtggaagaagtatgaattccattacgacaatgtgctgtgggctctgctgaccctcttcaccgtgtccacgggagaaggctggccacaggtcctcaagcattcggtggacgccacctttgagaaccagggccccagccccgggtaccgcatggagatgtccattttctacgtcgtctactttgtggtgttccccttcttctttgtcaatatctttgtggccttgatcatcatcaccttccaggagcaaggggacaagatgatggaggaatacagcctggagaaaaatgagagggcctgcattgatttcgccatcagcgccaagccgctgacccgacacatgccgcagaacaagcagagcttccagtaccgcatgtggcagttcgtggtgtctccgcctttcgagtacacgatcatggccatgatcgccctcaacaccatcgtgcttatgatgaagttctatggggcttctgttgcttatgaaaatgccctgcgggtgttcaacatcgtcttcacctccctcttctctctggaatgtgtgctgaaagtcatggcttttgggattctgaattatttccgcgatgcctggaacatcttcgactttgtgactgttctgggcagcatcaccgatatcctcgtgactgagtttgggaatccgaataacttcatcaacctgagctttctccgcctcttccgagctgcccggctcatcaaacttctccgtcagggttacaccatccgcattcttctctggacctttgtgcagtccttcaaggccctgccttatgtctgtctgctgatcgccatgctcttcttcatctatgccatcattgggatgcaggtgtttggtaacattggcatcgacgtggaggacgaggacagtgatgaagatgagttccaaatcactgagcacaataacttccggaccttcttccaggccctcatgcttctcttccggagtgccaccggggaagcttggcacaacatcatgctttcctgcctcagcgggaaaccgtgtgataagaactctggcatcctgactcgagagtgtggcaatgaatttgcttatttttactttgtttccttcatcttcctctgctcgtttctgatgctgaatctctttgtcgccgtcatcatggacaactttgagtacctcacccgagactcctccatcctgggcccccaccacctggatgagtacgtgcgtgtctgggccgagtatgaccccgcagcttggggccgcatgccttacctggacatgtatcagatgctgagacacatgtctccgcccctgggtctggggaagaagtgtccggccagagtggcttacaagcggcttctgcggatggacctgcccgtcgcagatgacaacaccgtccacttcaattccaccctcatggctctgatccgcacagccctggacatcaagattgccaagggaggagccgacaaacagcagatggacgctgagctgcggaaggagatgatggcgatttggcccaatctgtcccagaagacgctagacctgctggtcacacctcacaagtccacggacctcaccgtggggaagatctacgcagccatgatgatcatggagtactaccggcagagcaaggccaagaagctgcaggccatgcgcgaggagcaggaccggacacccctcatgttccagcgcatggagcccccgtccccaacgcaggaagggggacctggccagaacgccctcccctccacccagctggacccaggaggagccctgatggctcacgaaagcggcctcaaggagagcccgtcctgggtgacccagcgtgcccaggagatgttccagaagacgggcacatggagtccggaacaaggcccccctaccgacatgcccaacagccagcctaactctcagtccgtggagatgcgagagatgggcagagatggctactccgacagcgagcactacctccccatggaaggccagggccgggctgcctccatgccccgcctccctgcagagaaccagaggagaaggggccggccacgtgggaataacctcagtaccatctcagacaccagccccatgaagcgttcagcctccgtgctgggccccaaggcccgacgcctggacgattactcgctggagcgggtcccgcccgaggagaaccagcggcaccaccagcggcgccgcgaccgcagccaccgcgcctctgagcgctccctgggccgctacaccgatgtggacacaggcttggggacagacctgagcatgaccacccaatccggggacctgccgtcgaaggagcgggaccaggagcggggccggcccaaggatcggaagcatcgacagcaccaccaccaccaccaccaccaccaccatcccccgccccccgacaaggaccgctatgcccaggaacggccggaccacggccgggcacgggctcgggaccagcgctggtcccgctcgcccagcgagggccgagagcacatggcgcaccggcagggcagtagttccgtaagtggaagcccagccccctcaacatctggtaccagcactccgcggcggggccgccgccagctcccccagaccccctccaccccccggccacacgtgtcctattcccctgtgatccgtaaggccggcggctcggggcccccgcagcagcagcagcagcagcagcagcagcagcagcagcaggcggtggccaggccgggccgggcggccaccagcggccctcggaggtacccaggccccacggccgagcctctggccggagatcggccgcccacggggggccacagcagcggccgctcgcccaggatggagaggcgggtcccaggcccggcccggagcgagtcccccagggcctgtcgacacggcggggcccggtggccggcatctggcccgcacgtgtccgaggggcccccgggtccccggcaccatggctactaccggggctccgactacgacgaggccgatggcccgggcagcgggggcggcgaggaggccatggccggggcctacgacgcgccaccccccgtacgacacgcgtcctcgggcgccaccgggcgctcgcccaggactccccgggcctcgggcccggcctgcgcctcgccttctcggcacggccggcgactccccaacggctactacccggcgcacggactggccaggccccgcgggccgggctccaggaagggcctgcacgaaccctacagcgagagtgacgatgattggtgctaagcccgggcgaggtggcgcccgcccggccccccacgcaccccacgcacacaccccacccgaggagccgcgcagaggccgcgggggcccagcacagagggcccgggagagggccagccgggagaccccagactctggagaggccagggctgggccacaagggtgtcccgcagagaccctcggccaaaagagaccctcctgggcagccacggcgccccccaaccagccccgatccccccacccacgacaggggctctcgggtgggaggcagggagcagacaaaccacacagccaagggatttgaattaactcagccatttttggagaactttggggaacatgaaaaaaaaaaaaaaaaaaaaaaaaaaaaacatttttaaaagaaaaaacggggagaaaaaaatagcttctattgatgagttttatcatctcaattgaatctttcctttccctgatgaagacagctggtggccgagtgcggcaaagaagccagaaggaaccagaatcccagtgccctacacccaccaccagacacactcacacccacacacgttctcagacacacacaagagtgcttgccggttataccaaaccctactattactgcctgcagaaatcaatttaaaaaaataataataacaataaacaattttaaaaaggacaaaaaaattaatgattgagaaaagaggcatttttttctgacatttggtcctgcttgaaacaacaaaagaagaagaaaaacccaccatcaccaccgattcctttgcttcttttttccttttttcctaccttgtttgaaaaccgtgggcttgggactgtgaattattgcatgacattcaaaaagaaaaaaaaaataaaaaaaagttgaatcaaa

SEQ ID NO: 113225 - DNA, 7064 bp, Homo sapiens
  Payload ID: 2144
  Gene Symbol: CACNA1E
  Gene Name: calcium channel, voltage-dependent, R type, alpha 1E subunit
  ENST ID: ENST00000357570
  CDS Start-End: 1-6939
atggctcgcttcggggaggcggtggtcgccaggccagggtccggcgatggagactcggaccagagcaggaaccggcaaggaacccccgtgccggcctcggggcaggcggccgcctacaagcagacgaaagcacagagggcgcggactatggctttgtacaaccccattcccgtccggcagaactgtttcaccgtcaacagatccctgttcatcttcggagaagataacattgtcaggaaatatgccaagaagctcatcgattggccgccatttgagtacatgatcctggccaccatcattgccaactgcatcgtcctggccctggagcagcatcttcctgaggatgacaagacccccatgtcccgaagactggagaagacagaaccttatttcattgggatcttttgctttgaagctgggatcaaaattgtggccctggggttcatcttccataagggctcttacctccgcaatggctggaatgtcatggacttcatcgtggtcctcagtggcatcctggccactgcaggaacccacttcaatactcacgtggacctgaggaccctccgggctgtgcgtgtcctgcggcctttgaagctcgtgtcagggatacctagcctgcagattgtgttgaagtccatcatgaaggccatggtacctcttctgcagattggccttctgctcttctttgccatcctgatgtttgctatcattggtttggagttctacagtggcaagttacatcgagcatgcttcatgaacaattcaggtattctagaaggatttgacccccctcacccatgtggtgtgcagggctgcccagctggttatgaatgcaaggactggatcggccccaatgatgggatcacccagtttgataacatcctttttgctgtgctgactgtcttccagtgcatcaccatggaagggtggaccactgtgctgtacaataccaatgatgccttaggagccacctggaattggctgtacttcatccccctcatcatcattggatccttctttgttctcaacctagtcctgggagtgctttccggggaatttgccaaagagagagagagagtggagaaccgaagggctttcatgaagctgcggcgccagcagcagattgagcgtgagctgaatggctaccgtgcctggatagacaaagcagaggaagtcatgctcgctgaagaaaataaaaatgctggaacatccgccttagaagtgcttcgaagggcaaccatcaagaggagccggacagaggccatgactcgagactccagtgatgagcactgtgttgatatctcctctgtgggcacacctctggcccgagccagtatcaaaagtgcaaaggtagacggggtctcttatttccggcacaaggaaaggcttctgcgcatctccattcgccacatggttaaatcccaggtgttttactggattgtgctgagccttgtggcactcaacactgcctgtgtggccattgtccatcacaaccagccccagtggctcacccacctcctctactatgcagaatttctgtttctgggactcttcctcttggagatgtccctgaagatgtatggcatggggcctcgcctttattttcactcttcattcaactgctttgattttggggtcacagtgggcagtatctttgaagtggtctgggcaatcttcagacctggtacgtcttttggaatcagtgtcttgcgagccctccggcttctaagaatatttaaaataaccaagtattgggcttccctacggaatttggtggtctccttgatgagctcaatgaagtctatcatcagtttgcttttcctcctcttcctcttcatcgttgtctttgctctcctaggaatgcagttatttggaggcaggtttaactttaatgatgggactccttcggcaaattttgataccttccctgcagccatcatgactgtgttccagatcctgacgggtgaggactggaatgaggtgatgtacaatgggatccgctcccagggtggggtcagctcaggcatgtggtctgccatctacttcattgtgctcaccttgtttggcaactacacgctactgaatgtgttcttggctatcgctgtggataatctcgccaacgcccaggaactgaccaaggatgaacaggaggaagaagaggccttcaaccagaaacatgcactgcagaaggccaaggaggtcagcccgatgtctgcacccaacatgccttcgatcgaaagagacagaaggagaagacaccacatgtcgatgtgggagccacgcagcagccacctgagggagcggaggcgccggcaccacatgtccgtgtgggagcagcgtaccagccagctgaggaagcacatgcagatgtccagccaggaggccctcaacagagaggaggcgccgaccatgaacccgctcaaccccctcaacccgctcagctccctcaacccgctcaatgcccaccccagcctttatcggcgacccagggccattgagggctggcccggcctggccctggagaagttcgaggaggagcgcatcagccgtggggggtccctcaagggggatggaggggaccgatccagtgccctggacaaccagaggacccctttgtccctgggccagcgggagccaccatggctggccaggccctgtcatggaaactgtgacccgactcagcaggaggcagggggaggagaggctgtggtgacctttgaggaccgggccaggcacaggcagagccaacggcgcagccggcatcgccgcgtcaggacagaaggcaaggagtcctcttcagcctcccggagcaggtctgccagccaggaacgcagtctggatgaagccatgcccactgaaggggagaaggaccatgagctcaggggcaaccatggtgccaaggagccaacgatccaagaagagagagcccaggatttaaggaggaccaacagtctgatggtgtccagaggctccgggctggcaggaggccttgatgaggctgacacccccctagtcctgccccatcctgagctggaagtggggaagcacgtggtgctgacggagcaggagccagaaggcagcagtgagcaggccctgctggggaatgtgcagctagacatgggccgggtcatcagccagagcgagcctgacctctcctgcatcacggccaacacggacaaggccaccaccgagagcaccagcgtcaccgtcgccatccccgacgtggaccccttggtggactcaaccgtggtgcacattagcaacaagacggatggggaagccagtcccttgaaggaggcagagatcagagaggatgaggaggaggtggagaagaagaagcagaagaaggagaagcgtgagacaggcaaagccatggtgccccacagctcaatgttcatcttcagcaccaccaacccgatccggagggcctgccactacatcgtgaacctgcgctactttgagatgtgcatcctcctggtgattgcagccagcagcatcgccctggcggcagaggaccccgtcctgaccaactcggagcgcaacaaagtcctgaggtattttgactatgtgttcacgggcgtgttcacctttgagatggttataaagatgatagaccaaggcttgatcctgcaggatgggtcctacttccgagacttgtggaacatcctggactttgtggtggtcgttggcgcattggtggcctttgctctggcggactcttttcgaaccaacaaaggacgggacatcaagaccatcaagtctctgcgggtgctccgagttctaaggccactgaaaaccatcaagcgcttgcccaagctcaaggccgtcttcgactgcgtagtgacctccttgaagaatgtcttcaacatactcattgtgtacaagctcttcatgttcatctttgctgtcatcgcagttcagctcttcaagggaaagttcttttattgcacggacagttccaaggacacagagaaggagtgcataggcaactatgtagatcatgagaaaaacaagatggaggtgaagggccgggaatggaagcgccatgaattccactacgacaacattatctgggccctgctgaccctcttcaccgtctccacaggggaaggatggcctcaagttctgcagcactctgtagatgtgacagaggaagaccgaggcccaagccgcagcaaccgcatggagatgtctatcttttatgtagtctactttgtggtcttccccttcttctttgtcaatatctttgtggctctcatcatcatcaccttccaggagcaaggggataagatgatggaggagtgcagcctggagaagaatgagagggcgtgcatcgacttcgccatcagcgccaaacctctcacccgctacatgccgcagaacagacacaccttccagtaccgcgtgtggcactttgtggtgtctccgtcctttgagtacaccattatggccatgatcgccttgaatactgttgtgctgatgatgaagtattattctgctccctgtacctatgagctggccctgaagtacctgaatatcgccttcaccatggtgttttccctggaatgtgtcctgaaggtcatcgcttttggctttttgaactatttccgagacacctggaatatctttgacttcatcaccgtgattggcagtatcacagaaattatcctgacagacagcaagctggtgaacaccagtggcttcaatatgagctttctgaagctcttccgagctgcccgcctcataaagctcctgcgtcagggctataccatacgcattttgctgtggacctttgtgcagtcctttaaggccctcccttatgtctgccttttaattgccatgcttttcttcatttatgccatcattgggatgcaggtatttggaaacataaaattagacgaggagagtcacatcaaccggcacaacaacttccggagtttctttgggtccctaatgctactcttcaggagtgccacaggtgaggcctggcaggagattatgctgtcatgccttggggagaagggctgtgagcctgacaccaccgcaccatcagggcagaacgagaacgaacgctgcggcaccgatctggcctacgtgtactttgtctccttcatcttcttctgctccttcttgatgctcaacctgtttgtggccgtcatcatggacaactttgagtacctgactcgggactcctccatcctggggcctcaccacttggacgagtttgtccgcgtctgggcagaatatgaccgagcagcatgtggccgcatccattacactgagatgtatgaaatgctgactctcatgtcacctccgctaggcctcggcaagagatgtccctccaaagtggcatataagaggttggtcctgatgaacatgccagtagctgaggacatgacggtccacttcacctccacacttatggctctgatccggacagctctggacattaaaattgccaaaggtggtgcagacaggcagcagctagactcagagctacaaaaggagaccctagccatctggcctcacctatcccagaagatgctggatctgcttgtgcccatgcccaaagcctctgacctgactgtgggcaaaatctatgcagcaatgatgatcatggactactataagcagagtaaggtgaagaagcagaggcagcagctggaggaacagaaaaatgcccccatgttccagcgcatggagccttcatctctgcctcaggagatcattgctaatgccaaagccctgccttacctccagcaggaccccgtttcaggcctgagtggccggagtggatacccttcgatgagtccactctctccccaggatatattccagttggcttgtatggaccccgccgatgacggacagttccaagaacggcagtctctggagccagaggttagtgaattaaaaagcgtgcagccctctaaccatggcatctaccttccttcggacacccaggagcatgcgggatctgggagggcatcttctatgccacgtctgactgtggatccccaggtggtgacagaccctagctccatgagacgttcattttccactattcgggataagcgttcaaattcctcgtggttggaggaattctccatggagcgaagcagtgaaaatacctacaagtcccgtcgccggagttaccactcctccttgcggctgtcagcccaccgcctgaactctgattcaggccacaagtctgacactcaccgctcagggggcagggagcggggacgatcaaaagagcgaaagcatcttctctctcctgatgtctcccgctgcaattcagaagagcgagggacccaggctgactgggagtccccagagcgccgtcaatccaggtcacccagtgagggcaggtcacagacgcccaacagacagggcacaggttccctaagtgagagctccatcccctctgtctctgacaccagcaccccaagaagaagtcgtcggcagctcccacccgtcccgccaaagccccggcccctcctttcctacagctccctgattcgacacgcgggcagcatctctccacctgctgatggaagcgaggagggctccccgctgacctcccaagctctggagagcaacaatgcttgcctgaccgagtcttccaactctccgcacccccagcagagccaacatgcctccccacagcgctacatctccgagccctacttggccctgcacgaagactcccacgcctcagactgtggtgaggaggagacgctcactttcgaagcagccgtggctactagcctgggccgttccaacaccatcggctcagccccacccctgcggcatagctggcagatgcccaacgggcactatcggcggcggaggcgcggggggcctgggccaggcatgatgtgtggggctgtcaacaacctgctaagtgacacggaagaagatgacaaatgctagaggctgctcccccctccgatgcatgctcttctctcacatggagaaaaccaagacagaattgggaagccagtgcggcccgggggggaggaagagggaaaaggaagatggaaggacaccatgcatta

SEQ ID NO: 113226 - DNA, 14700 bp, Homo sapiens
  Payload ID: 2144
  Gene Symbol: CACNA1E
  Gene Name: calcium channel, voltage-dependent, R type, alpha 1E subunit
  Uniprot ID: Q15878
  ENST ID: ENST00000358338
  CDS Start-End: 1-6756
atggctcgcttcggggaggcggtggtcgccaggccagggtccggcgatggagactcggaccagagcaggaaccggcaaggaacccccgtgccggcctcggggcaggcggccgcctacaagcagacgaaagcacagagggcgcggactatggctttgtacaaccccattcccgtccggcagaactgtttcaccgtcaacagatccctgttcatcttcggagaagataacattgtcaggaaatatgccaagaagctcatcgattggccaccatttgagtacatgatcctggccaccatcattgccaactgcatcgtcctggccctggagcagcatcttcctgaggatgacaagacccccatgtcccgaagactggagaagacagaaccttatttcattgggatcttttgctttgaagctgggatcaaaattgtggccctggggttcatcttccataagggctcttacctccgcaatggctggaatgtcatggacttcatcgtggtcctcagtggcatcctggccactgcaggaacccacttcaatactcacgtggacctgaggaccctccgggctgtgcgtgtcctgcggcctttgaagctcgtgtcagggatacctagcctgcagattgtgttgaagtccatcatgaaggccatggtacctcttctgcagattggccttctgctcttctttgccatcctgatgtttgctatcattggtttggagttctacagtggcaagttacatcgagcatgcttcatgaacaattcaggtattctagaaggatttgacccccctcacccatgtggtgtgcagggctgcccagctggttatgaatgcaaggactggatcggccccaatgatgggatcacccagtttgataacatcctttttgctgtgctgactgtcttccagtgcatcaccatggaagggtggaccactgtgctgtacaataccaatgatgccttaggagccacctggaattggctgtacttcatccccctcatcatcattggatccttctttgttctcaacctagtcctgggagtgctttccggggaatttgccaaagagagagagagagtggagaaccgaagggctttcatgaagctgcggcgccagcagcagattgagcgtgagctgaatggctaccgtgcctggatagacaaagcagaggaagtcatgctcgctgaagaaaataaaaatgctggaacatccgccttagaagtgcttcgaagggcaaccatcaagaggagccggacagaggccatgactcgagactccagtgatgagcactgtgttgatatctcctctgtgggcacacctctggcccgagccagtatcaaaagtgcaaaggtagacggggtctcttatttccggcacaaggaaaggcttctgcgcatctccattcgccacatggttaaatcccaggtgttttactggattgtgctgagccttgtggcactcaacactgcctgtgtggccattgtccatcacaaccagccccagtggctcacccacctcctctactatgcagaatttctgtttctgggactcttcctcttggagatgtccctgaagatgtatggcatggggcctcgcctttattttcactcttcattcaactgctttgattttggggtcacagtgggcagtatctttgaagtggtctgggcaatcttcagacctggtacgtcttttggaatcagtgtcttgcgagccctccggcttctaagaatatttaaaataaccaagtattgggcttccctacggaatttggtggtctccttgatgagctcaatgaagtctatcatcagtttgcttttcctcctcttcctcttcatcgttgtctttgctctcctaggaatgcagttatttggaggcaggtttaactttaatgatgggactccttcggcaaattttgataccttccctgcagccatcatgactgtgttccagatcctgacgggtgaggactggaatgaggtgatgtacaatgggatccgctcccagggtggggtcagctcaggcatgtggtctgccatctacttcattgtgctcaccttgtttggcaactacacgctactgaatgtgttcttggctatcgctgtggataatctcgccaacgcccaggaactgaccaaggatgaacaggaggaagaagaggccttcaaccagaaacatgcactgcagaaggccaaggaggtcagcccgatgtctgcacccaacatgccttcgatcgagagggagcggaggcgccggcaccacatgtccgtgtgggagcagcgtaccagccagctgaggaagcacatgcagatgtccagccaggaggccctcaacagagaggaggcgccgaccatgaacccgctcaaccccctcaacccgctcagctccctcaacccgctcaatgcccaccccagcctttatcggcgacccagggccattgagggcctggccctgggcctggccctggagaagttcgaggaggagcgcatcagccgtggggggtccctcaagggggatggaggggaccgatccagtgccctggacaaccagaggacccctttgtccctgggccagcgggagccaccatggctggccaggccctgtcatggaaactgtgacccgactcagcaggaggcagggggaggagaggctgtggtgacctttgaggaccgggccaggcacaggcagagccaacggcgcagccggcatcgccgcgtcaggacagaaggcaaggagtcctcttcagcctcccggagcaggtctgccagccaggaacgcagtctggatgaagccatgcccactgaaggggagaaggaccatgagctcaggggcaaccatggtgccaaggagccaacgatccaagaagagagagcccaggatttaaggaggaccaacagtctgatggtgtccagaggctccgggctggcaggaggccttgatgaggctgacacccccctagtcctgccccatcctgagctggaagtggggaagcacgtggtgctgacggagcaggagccagaaggcagcagtgagcaggccctgctggggaatgtgcagctagacatgggccgggtcatcagccagagcgagcctgacctctcctgcatcacggccaacacggacaaggccaccaccgagagcaccagcgtcaccgtcgccatccccgacgtggaccccttggtggactcaaccgtggtgcacattagcaacaagacggatggggaagccagtcccttgaaggaggcagagatcagagaggatgaggaggaggtggagaagaagaagcagaagaaggagaagcgtgagacaggcaaagccatggtgccccacagctcaatgttcatcttcagcaccaccaacccgatccggagggcctgccactacatcgtgaacctgcgctactttgagatgtgcatcctcctggtgattgcagccagcagcatcgccctggcggcagaggaccccgtcctgaccaactcggagcgcaacaaagtcctgaggtattttgactatgtgttcacgggcgtgttcacctttgagatggttataaagatgatagaccaaggcttgatcctgcaggatgggtcctacttccgagacttgtggaacatcctggactttgtggtggtcgttggcgcattggtggcctttgctctggcgaacgctttgggaaccaacaaaggacgggacatcaagaccatcaagtctctgcgggtgctccgagttctaaggccactgaaaaccatcaagcgcttgcccaagctcaaggccgtcttcgactgcgtagtgacctccttgaagaatgtcttcaacatactcattgtgtacaagctcttcatgttcatctttgctgtcatcgcagttcagctcttcaagggaaagttcttttattgcacggacagttccaaggacacagagaaggagtgcataggcaactatgtagatcatgagaaaaacaagatggaggtgaagggccgggaatggaagcgccatgaattccactacgacaacattatctgggccctgctgaccctcttcaccgtctccacaggggaaggatggcctcaagttctgcagcactctgtagatgtgacagaggaagaccgaggcccaagccgcagcaaccgcatggagatgtctatcttttatgtagtctactttgtggtcttccccttcttctttgtcaatatctttgtggctctcatcatcatcaccttccaggagcaaggggataagatgatggaggagtgcagcctggagaagaatgagagggcgtgcatcgacttcgccatcagcgccaaacctctcacccgctacatgccgcagaacagacacaccttccagtaccgcgtgtggcactttgtggtgtctccgtcctttgagtacaccattatggccatgatcgccttgaatactgttgtgctgatgatgaagtattattctgctccctgtacctatgagctggccctgaagtacctgaatatcgccttcaccatggtgttttccctggaatgtgtcctgaaggtcatcgcttttggctttttgaactatttccgagacacctggaatatctttgacttcatcaccgtgattggcagtatcacagaaattatcctgacagacagcaagctggtgaacaccagtggcttcaatatgagctttctgaagctcttccgagctgcccgcctcataaagctcctgcgtcagggctataccatacgcattttgctgtggacctttgtgcagtcctttaaggccctcccttatgtctgccttttaattgccatgcttttcttcatttatgccatcattgggatgcaggtatttggaaacataaaattagacgaggagagtcacatcaaccggcacaacaacttccggagtttctttgggtccctaatgctactcttcaggagtgccacaggtgaggcctggcaggagattatgctgtcatgccttggggagaagggctgtgagcctgacaccaccgcaccatcagggcagaacgagaacgaacgctgcggcaccgatctggcctacgtgtactttgtctccttcatcttcttctgctccttcttgatgctcaacctgtttgtggccgtcatcatggacaactttgagtacctgactcgggactcctccatcctggggcctcaccacttggacgagtttgtccgcgtctgggcagaatatgaccgagcagcatgtggccgcatccattacactgagatgtatgaaatgctgactctcatgtcacctccgctaggcctcggcaagagatgtccctccaaagtggcatataagaggttggtcctgatgaacatgccagtagctgaggacatgacggtccacttcacctccacacttatggctctgatccggacagctctggacattaaaattgccaaaggtggtgcagacaggcagcagctagactcagagctacaaaaggagaccctagccatctggcctcacctatcccagaagatgctggatctgcttgtgcccatgcccaaagcctctgacctgactgtgggcaaaatctatgcagcaatgatgatcatggactactataagcagagtaaggtgaagaagcagaggcagcagctggaggaacagaaaaatgcccccatgttccagcgcatggagccttcatctctgcctcaggagatcattgctaatgccaaagccctgccttacctccagcaggaccccgtttcaggcctgagtggccggagtggatacccttcgatgagtccactctctccccaggatatattccagttggcttgtatggaccccgccgatgacggacagttccaagaacggcagtctctggtggtgacagaccctagctccatgagacgttcattttccactattcgggataagcgttcaaattcctcgtggttggaggaattctccatggagcgaagcagtgaaaatacctacaagtcccgtcgccggagttaccactcctccttgcggctgtcagcccaccgcctgaactctgattcaggccacaagtctgacactcaccgctcagggggcagggagcggggacgatcaaaagagcgaaagcatcttctctctcctgatgtctcccgctgcaattcagaagagcgagggacccaggctgactgggagtccccagagcgccgtcaatccaggtcacccagtgagggcaggtcacagacgcccaacagacagggcacaggttccctaagtgagagctccatcccctctgtctctgacaccagcaccccaagaagaagtcgtcggcagctcccacccgtcccgccaaagccccggcccctcctttcctacagctccctgattcgacacgcgggcagcatctctccacctgctgatggaagcgaggagggctccccgctgacctcccaagctctggagagcaacaatgcttgcctgaccgagtcttccaactctccgcacccccagcagagccaacatgcctccccacagcgctacatctccgagccctacttggccctgcacgaagactcccacgcctcagactgtggtgaggaggagacgctcactttcgaagcagccgtggctactagcctgggccgttccaacaccatcggctcagccccacccctgcggcatagctggcagatgcccaacgggcactatcggcggcggaggcgcggggggcctgggccaggcatgatgtgtggggctgtcaacaacctgctaagtgacacggaagaagatgacaaatgctagaggctgctcccccctccgatgcatgctcttctctcacatggagaaaaccaagacagaattgggaagccagtgcggcccgggggggaggaagagggaaaaggaagatggaaggacaccatgcattatcagagaagaggaagtaaaggacaatcagaacaccagtcaaacccaccaaattgctttattcccctttgcaagatgggcactgccatagttctgcctctttgctggggaaagaaaccaggaacgtggagggttattactgcgggagaagggacacgaggatggctttgcttccccttgccccttcccacttttctaaaagctgtggagggatctagctggcctatgtctacactcagtgccctgagaagcctggaagactttctggctcttaactggggagtagtggagaccataggagaggactctcctccctcaccagctcttacgcctcagccagcaccactgccaccagggcaactgcagcagcatctcatgcataaccctgtggcttgcttcccccagggcagcacaggctaagtcaggaacatcggatgccagggagggaggagaaagccgaagcgaaaggggtcagggtgctgaggcaacagcagcaagggctggtctggacaagaaaagccatagcccggcagcccctaccatgagggagacagagaaacagaactggtggtgctggggggtatagccccccatccttgaggcctgtcacccacacagtaggtgctgagagttaggacaggtcaggaagtcccccagggtccacaaaggtgcctgaggctctggtaagggtgaagataaaagtatttaacaaccgctatggcatcaatgtaagtggagtttggtcctagtgccggagcccatgctattccaggcattggctctttagatgccagtcatgggggaaccctgagggtgtgggtagagtagcaggggccacctaagagattaaaaacagtctgttttccaaccagtgtggaagcaattaaatatgcgtaacagtgctacggccacaccagcacctcctggctgaaggtcagcccacactctggtccatgaggcagcaaggccagtgctgtgccaagcccggtaaggccaagtgccgaggcccagccttccctgccactcctctgagagggcagaacacacatatccaagtaggctacccaccactgggtagggatttctgtaaagatgggaaaggctgatagattgaaataagcttctgtgaaagtctggatttactgaggacctcccctgaggagggaccgttgggaccgcagattctgcagctggtgtggggttcaggtcagtttgtcaggatgctttaaggtgattagtaaatatacctcagcttagacttgggctgctccttctagcaaagcaggctccagtggggcctcatcatacaggatgacaagactggggccctgttcaccttgaacatgcccctgggccaagatggggcttcacccctccccagagtaagagctggggctgacagtcccaccctgtcattcctaatagcccaaacgcagaagcactgagcaagagagccctttcttgccaagccagtgctcttttggtatatggcatacagctccattggaggggacacatcactggctttatctggtggaaatgtacctttcccttaagttcctccttagtgccatcacagcaggtgaatgggtgccctacggggccctccttcccccaccaggaacagatggaacctgccacccaggatcctgatctgccctgcactgagcactcagtggataaacactcctccagcccagacacactcctcctcttgggcaggagcaatccagagttgttatttttcttagaaggagcctcttttccctctattttttaaattgaaatataatagctgcatcagccctgaaaagccaaattcaaccacatggctggagaatcatttgtcatggccccgccttctcttctgatactaatggagcttcatgacccacggtcagcccccaaaccaaagttgtcccaacagaggaggccagtgaggcagagacagagctctcccactctcagaccctcttttgtcttcattttcctctcccacttagcacatgtgtgcttgagggtggctgggaatgtgatatacagcaccctgatcctaacaggtgtgattgttacgtaagacgctgatactgggccttgtattgcttttaaagtttcctctgctcagcatcatttcatgccaaagtgctgctatgggctgctttgtgtgcacaaaattgctttttccacctcggaaatgcagctttccctagggggaggcctacaacaggacgaccattctgagccagtgagtctattgcatggtgttttgagaaagggaattttagtgacaccttatgccatttcaagaggagaaatgcaggctggcagagcaatttccagaaatggaatttgcctgcaaatagtataaacaacactaaatttactgtgccaggaaatcttcctgaactccttgaactcatacacacaggtatttgagtcctgaataaagtgttggaaagcactgcagatgcggtcacctgactgaccacctgggttttctattaccagtgaatttcttttattcaccttcccttgaccaagaaattgggtttcttttccctcagcctgcacttactcttctattaagaccagaaaataaaataattttccgttgagtcacaaactcatcatcttgtttggtgttctgctgcctctgaacaaaagtgaatgccagccttcccttgctgggtgtcagagtctgcctcccttgaaaagaggcccctgtagaccccaacacctattcttttctctggttaattacagcagcatctgagaaattccatgcaaaagaagactacaaccagtgtttcagatataccacaagatcaaatttgggcactggtggtccacctcagaagactcttgagtcatatattcagtttctcttgctaatatatgactcgtcttcaccatctcctcaaaacaagagcaaagccaagatagaggaaggtaaaaggaggaggaaaggaaaccaaggcagggagatgttctaagtaggtttgcatttagttacccctcatttcacttaaggctccagacagactccaggtagggaatgcatgctgtctctttctctgtgtctgtctccccatctcctagaggacagagtgccagcgacctctggacaggggcagggctccagccaaggtgcccctgagccagggtcaacatagaatttcctgccccgtgaagggctggcaccagctagcatccccttggctccacatgagtcatgaacacaattgtcagtgggggtctctgctgctcttctggctgaagaatctgtttttcttctgggcttcacttgtagttcctattcaatgtctccatagggcactgagatcaccaagaacattacccagaagctgaagtccaaatgttctagattttgacctctcttgactctggggccacaaagagaaggccccataatccacctctcagccagtatctcccttctttgcacagattcctcccaaccccatagagcctatgtggtgagcatgagggtcgtcttccctctgttctcccatcccagcctctgttttgctgcatgttagcgctgatccagctcctgagatggttaattccacccaatccaagcttatttgcttgcctgactgactccaccactctctcagctatgggggaatattgcattctaatgaaatagggtttggaactcacctggtgctcctcgcaagacaactgacacaaggtgtagggtgtgggggtggacaaaatgcccacctactggataaaagctcactgcaggaaaatgaggtctcctggcataatgcaacaaaaatctcatataattttgatttttaaaaagttgttctcaatttttcattacatcctacttctcagccctctggatgtttcatttttttggacaaagtgtttctttagtggttggggccagggacaggttgagggatatttctcggctcatttataagatataaatattatgaggttgtatgtaaagaaagggcaaacgtacagcagaaggggagcaaatagctacctttcaaggattttgagatttgaaggttaaggaatttttactgctatttttgttcatcagtttcatgtctgttatgttttgagatcctcagaggcctagggttagcgtataccaagaatcctggtgagaggcgttgccatgccttggggtgaattcttccccactagctctctcacccagcctacaagtccttctctcatagatcccagagcaatgggcaccgtccaggaggtacaggagaggactttatgatgcaggaaagaaggaagaagtgggtcccttgcaagtggccagacagggaatgatggtttgactccagaaatcaggaatcaggttcaggtttggataacttctctttaaaatatctccacattgagactcttattttaacaaaatccaaacaaaattaactcagggcttgtgacctaacctttgtaagaaggtgatcaaagagatcctacattaataagcactgcctgtagcaccagctttgtctttttgtcttttgttgtttctttcctgaaccaccctgtacatcatagccaggtctaccccaaatagagcagcagctgatggcttctctgctgtctgtggagggagggctcggctgcagacctatggtgttttgtcagctgttaggtgctacagcccacccagtcagagtacatagacatagcgctttaagggacaaaggacaaacagaactatctttgctttccggaggccatctttttctttccttgaatcctttctgctttaaacttctgaggtttatgcatcccagagaggtcacaccaagccaaagagaaaaaattcatagattgtcccagcctacccaaagggcctgaaaagcctctctaaacaaaactcaagatagctgagaagtatgaatggggttcacagcaaagtccaattgatggcttttgaggctgggacacccccaaactgcccttctgtttttgtagttttgctttcttccacccaccctctctccgcatgctgtaagttaggggagttagtatcttgaacttctaaatgcaaaaggagattttataataagccatgctacctgtaaatacattattgaggtttgcatttttatttttggaggtatgaaagagttgagtagaccaagtcaaaagaggtgtggggatttatgtttatttttatttgtttggggttgtttggttggtggctgggtttcttgtaacagacctattctggaatagcaaagaaggataccttggtgatctgcaatgtttctgaatctgtttctctttaggaagtgattgccatcaaatttagtgatatgatatttgagtcaaaaatctgaggttatagtaccagctgtcttttctctctggtctcctttttgtcgtctttctctttctgtctaaattggcctctgtcttttcctaaggacttaaaatataacccaaattaatgaagaactgccccaaaacttcagtgaaagccaaggaggtacagaattttttcaggacatctttaaccaatacaaaatttatgtcttaagaagataatttttacaatagtgtagtaatctgataaatgaaaactattggaagtcaatagttttttatattccagctttctgtattcaaacttgtgccttcagcaagcatctcttcactttctttcccttgtcaattgaaacatgaatgtttggctaactcatgatgtaaagtgtctgttaagttaataatacataatttaaagcacttagtctccacaaagcaatttagaaaaatcttcacttgttagatcccatgaagtacctatgaaattctcagcattgctataagcatttgattttttttaaggaaacttcctgtttaatggaatctgaatccaagatttgctttaatttcactctattcttcccattttcccttattcttcttgttgtctctctaattaaaaaaaaaaaaaacctaggcttttttttttctatccagaaagttgggttttcatgatctgagcttccttatgtctccttctctttgtgcaaacttaaaccagtcatagattgtcacccagacatattctccaacccagcattggaaatctgaacgaatcttttctctttttgtcctacaagtttgtcagagatgagaatggattgctgtctacattctacaaccagaccctagactttataccaggctgtgccacttcctcttcacttcactcagaggatggccccaaaactgaaaaggaaatgaaataatcaaatataccaaatccgaatttgactttatttgatgactcaatattttccttccagtactctaatttttttttatggcaatggcctatatggcacaagaaccaccacttaaagcaaatctgttgaacatttttataagggatgagcaagaaaaacacactccaaaattttaaagtgccattaatcaatttttaagaataaaggtaatatgaaatgagggctaaacaatgtaatataactgccagttaaggtagacagtagttgtggtcttagttacatttgatatggagttgtgtaatattaagcagatcccagtggagttagtaaaaacataggtattgagttttaatggctaccaattgggatatatacttagcctgcaggctgaactttagtcagtgtttttctatcatgttgttttgtgaacaagtcaaaatttatacaaagctaccctaagtgctgcaattgcagaggaacttgcctcttcgtgatattagagggcagtccaactccgctcaaactgagtccaagatttgaattcatccagaaaaacaaatggaggagaaaagcctaatgcaccacatgtgtttggcatttcatggctgggacaatggagtagagggtaggaagacaagctgtagaacaaaagcaaagtgaggtagaaagtaacaggtcccagacgaggacagacttagagatgtgtaaccttggatcctctttttcacttagaatatgggtaaacttcttagcacaagactggattaagagaagttctttctgttaaactcacctagggtagtggctttgaaggcctcagaggattaatagattcccaaaattttcttccagacctgggagatggagagaaagaggttcttgctttaaagcggctcgaagacaatctttatgacttcagcaactcttcaacatagtagcaccaataaaggagagattatgttaacttcctagtggtgagaataccatgggatgggagaagggccagtgagtgggatgggaatgagcttcatcaggaacagatttcagactctgcagggtgcaccggttctagcctcaaataacaacattgcaaggaggtggactacagggtccacaccctctgtccttcggggcccatggtcaggccattccctctttgttttgctcctagaggatgagcatgtaagatgagatcaggagggaaattgggtgctctgcctcaggctgttaaaatgctgctacctgcattctaaaacgtgcaagtcatgccccacaagacacctccttagggcagcatccactgtggtgtgccagcctgacacccctgcagtcacggtgtttgaatggcagctgatgctggcccacccagagtatcggtgcatctctcctaaagccacagttcagcactgcatgttgaccaggcggatatcctataatatagatgctcgtttggatccaaaaggaaaaccattaaaaataaaagaaagatgaaaaactttaatgttttgggggggataaaagaaaagaataaataaaaccttgttgt

SEQ ID NO: 113227 - DNA, 6970 bp, Homo sapiens
  Payload ID: 2144
  Gene Symbol: CACNA1E
  Gene Name: calcium channel, voltage-dependent, R type, alpha 1E subunit
  ENST ID: ENST00000360108
  CDS Start-End: 8-6892
cctcaggatggctcgcttcggggaggcggtggtcgccaggccagggtccggcgatggagactcggaccagagcaggaaccggcaaggaacccccgtgccggcctcggggcaggcggccgcctacaagcagacgaaagcacagagggcgcggactatggctttgtacaaccccattcccgtccggcagaactgtttcaccgtcaacagatccctgttcatcttcggagaagataacattgtcaggaaatatgccaagaagctcatcgattggccgccatttgagtacatgatcctggccaccatcattgccaactgcatcgtcctggccctggagcagcatcttcctgaggatgacaagacccccatgtcccgaagactggagaagacagaaccttatttcattgggatcttttgctttgaagctgggatcaaaattgtggccctggggttcatcttccataagggctcttacctccgcaatggctggaatgtcatggacttcatcgtggtcctcagtggcatcctggccactgcaggaacccacttcaatactcacgtggacctgaggaccctccgggctgtgcgtgtcctgcggcctttgaagctcgtgtcagggatacctagcctgcagattgtgttgaagtccatcatgaaggccatggtacctcttctgcagattggccttctgctcttctttgccatcctgatgtttgctatcattggtttggagttctacagtggcaagttacatcgagcatgcttcatgaacaattcaggtattctagaaggatttgacccccctcacccatgtggtgtgcagggctgcccagctggttatgaatgcaaggactggatcggccccaatgatgggatcacccagtttgataacatcctttttgctgtgctgactgtcttccagtgcatcaccatggaagggtggaccactgtgctgtacaataccaatgatgccttaggagccacctggaattggctgtacttcatccccctcatcatcattggatccttctttgttctcaacctagtcctgggagtgctttccggggaatttgccaaagagagagagagagtggagaaccgaagggctttcatgaagctgcggcgccagcagcagattgagcgtgagctgaatggctaccgtgcctggatagacaaagcagaggaagtcatgctcgctgaagaaaataaaaatgctggaacatccgccttagaagtgcttcgaagggcaaccatcaagaggagccggacagaggccatgactcgagactccagtgatgagcactgtgttgatatctcctctgtgggcacacctctggcccgagccagtatcaaaagtgcaaaggtagacggggtctcttatttccggcacaaggaaaggcttctgcgcatctccattcgccacatggttaaatcccaggtgttttactggattgtgctgagccttgtggcactcaacactgcctgtgtggccattgtccatcacaaccagccccagtggctcacccacctcctctactatgcagaatttctgtttctgggactcttcctcttggagatgtccctgaagatgtatggcatggggcctcgcctttattttcactcttcattcaactgctttgattttggggtcacagtgggcagtatctttgaagtggtctgggcaatcttcagacctggtacgtcttttggaatcagtgtcttgcgagccctccggcttctaagaatatttaaaataaccaagtattgggcttccctacggaatttggtggtctccttgatgagctcaatgaagtctatcatcagtttgcttttcctcctcttcctcttcatcgttgtctttgctctcctaggaatgcagttatttggaggcaggtttaactttaatgatgggactccttcggcaaattttgataccttccctgcagccatcatgactgtgttccagatcctgacgggtgaggactggaatgaggtgatgtacaatgggatccgctcccagggtggggtcagctcaggcatgtggtctgccatctacttcattgtgctcaccttgtttggcaactacacgctactgaatgtgttcttggctatcgctgtggataatctcgccaacgcccaggaactgaccaaggatgaacaggaggaagaagaggccttcaaccagaaacatgcactgcagaaggccaaggaggtcagcccgatgtctgcacccaacatgccttcgatcgagagggagcggaggcgccggcaccacatgtccgtgtgggagcagcgtaccagccagctgaggaagcacatgcagatgtccagccaggaggccctcaacagagaggaggcgccgaccatgaacccgctcaaccccctcaacccgctcagctccctcaacccgctcaatgcccaccccagcctttatcggcgacccagggccattgagggcctggccctgggcctggccctggagaagttcgaggaggagcgcatcagccgtggggggtccctcaagggggatggaggggaccgatccagtgccctggacaaccagaggacccctttgtccctgggccagcgggagccaccatggctggccaggccctgtcatggaaactgtgacccgactcagcaggaggcagggggaggagaggctgtggtgacctttgaggaccgggccaggcacaggcagagccaacggcgcagccggcatcgccgcgtcaggacagaaggcaaggagtcctcttcagcctcccggagcaggtctgccagccaggaacgcagtctggatgaagccatgcccactgaaggggagaaggaccatgagctcaggggcaaccatggtgccaaggagccaacgatccaagaagagagagcccaggatttaaggaggaccaacagtctgatggtgtccagaggctccgggctggcaggaggccttgatgaggctgacacccccctagtcctgccccatcctgagctggaagtggggaagcacgtggtgctgacggagcaggagccagaaggcagcagtgagcaggccctgctggggaatgtgcagctagacatgggccgggtcatcagccagagcgagcctgacctctcctgcatcacggccaacacggacaaggccaccaccgagagcaccagcgtcaccgtcgccatccccgacgtggaccccttggtggactcaaccgtggtgcacattagcaacaagacggatggggaagccagtcccttgaaggaggcagagatcagagaggatgaggaggaggtggagaagaagaagcagaagaaggagaagcgtgagacaggcaaagccatggtgccccacagctcaatgttcatcttcagcaccaccaacccgatccggagggcctgccactacatcgtgaacctgcgctactttgagatgtgcatcctcctggtgattgcagccagcagcatcgccctggcggcagaggaccccgtcctgaccaactcggagcgcaacaaagtcctgaggtattttgactatgtgttcacgggcgtgttcacctttgagatggttataaagatgatagaccaaggcttgatcctgcaggatgggtcctacttccgagacttgtggaacatcctggactttgtggtggtcgttggcgcattggtggcctttgctctggcgaacgctttgggaaccaacaaaggacgggacatcaagaccatcaagtctctgcgggtgctccgagttctaaggccactgaaaaccatcaagcgcttgcccaagctcaaggccgtcttcgactgcgtagtgacctccttgaagaatgtcttcaacatactcattgtgtacaagctcttcatgttcatctttgctgtcatcgcagttcagctcttcaagggaaagttcttttattgcacggacagttccaaggacacagagaaggagtgcataggcaactatgtagatcatgagaaaaacaagatggaggtgaagggccgggaatggaagcgccatgaattccactacgacaacattatctgggccctgctgaccctcttcaccgtctccacaggggaaggatggcctcaagttctgcagcactctgtagatgtgacagaggaagaccgaggcccaagccgcagcaaccgcatggagatgtctatcttttatgtagtctactttgtggtcttccccttcttctttgtcaatatctttgtggctctcatcatcatcaccttccaggagcaaggggataagatgatggaggagtgcagcctggagaagaatgagagggcgtgcatcgacttcgccatcagcgccaaacctctcacccgctacatgccgcagaacagacacaccttccagtaccgcgtgtggcactttgtggtgtctccgtcctttgagtacaccattatggccatgatcgccttgaatactgttgtgctgatgatgaagtattattctgctccctgtacctatgagctggccctgaagtacctgaatatcgccttcaccatggtgttttccctggaatgtgtcctgaaggtcatcgcttttggctttttgaactatttccgagacacctggaatatctttgacttcatcaccgtgattggcagtatcacagaaattatcctgacagacagcaagctggtgaacaccagtggcttcaatatgagctttctgaagctcttccgagctgcccgcctcataaagctcctgcgtcagggctataccatacgcattttgctgtggacctttgtgcagtcctttaaggccctcccttatgtctgccttttaattgccatgcttttcttcatttatgccatcattgggatgcaggtatttggaaacataaaattagacgaggagagtcacatcaaccggcacaacaacttccggagtttctttgggtccctaatgctactcttcaggagtgccacaggtgaggcctggcaggagattatgctgtcatgccttggggagaagggctgtgagcctgacaccaccgcaccatcagggcagaacgagaacgaacgctgcggcaccgatctggcctacgtgtactttgtctccttcatcttcttctgctccttcttgatgctcaacctgtttgtggccgtcatcatggacaactttgagtacctgactcgggactcctccatcctggggcctcaccacttggacgagtttgtccgcgtctgggcagaatatgaccgagcagcatgtggccgcatccattacactgagatgtatgaaatgctgactctcatgtcacctccgctaggcctcggcaagagatgtccctccaaagtggcatataagaggttggtcctgatgaacatgccagtagctgaggacatgacggtccacttcacctccacacttatggctctgatccggacagctctggacattaaaattgccaaaggtggtgcagacaggcagcagctagactcagagctacaaaaggagaccctagccatctggcctcacctatcccagaagatgctggatctgcttgtgcccatgcccaaagcctctgacctgactgtgggcaaaatctatgcagcaatgatgatcatggactactataagcagagtaaggtgaagaagcagaggcagcagctggaggaacagaaaaatgcccccatgttccagcgcatggagccttcatctctgcctcaggagatcattgctaatgccaaagccctgccttacctccagcaggaccccgtttcaggcctgagtggccggagtggatacccttcgatgagtccactctctccccaggatatattccagttggcttgtatggaccccgccgatgacggacagttccaagaacggcagtctctggagccagaggttagtgaattaaaaagcgtgcagccctctaaccatggcatctaccttccttcggacacccaggagcatgcgggatctgggagggcatcttctatgccacgtctgactgtggatccccaggtggtgacagaccctagctccatgagacgttcattttccactattcgggataagcgttcaaattcctcgtggttggaggaattctccatggagcgaagcagtgaaaatacctacaagtcccgtcgccggagttaccactcctccttgcggctgtcagcccaccgcctgaactctgattcaggccacaagtctgacactcaccgctcagggggcagggagcggggacgatcaaaagagcgaaagcatcttctctctcctgatgtctcccgctgcaattcagaagagcgagggacccaggctgactgggagtccccagagcgccgtcaatccaggtcacccagtgagggcaggtcacagacgcccaacagacagggcacaggttccctaagtgagagctccatcccctctgtctctgacaccagcaccccaagaagaagtcgtcggcagctcccacccgtcccgccaaagccccggcccctcctttcctacagctccctgattcgacacgcgggcagcatctctccacctgctgatggaagcgaggagggctccccgctgacctcccaagctctggagagcaacaatgcttgcctgaccgagtcttccaactctccgcacccccagcagagccaacatgcctccccacagcgctacatctccgagccctacttggccctgcacgaagactcccacgcctcagactgtggtgaggaggagacgctcactttcgaagcagccgtggctactagcctgggccgttccaacaccatcggctcagccccacccctgcggcatagctggcagatgcccaacgggcactatcggcggcggaggcgcggggggcctgggccaggcatgatgtgtggggctgtcaacaacctgctaagtgacacggaagaagatgacaaatgctagaggctgctcccccctccgatgcatgctcttctctcacatggagaaaaccaagacagaattgggaagccagtgcggccc

SEQ ID NO: 113228 - DNA, 14757 bp, Homo sapiens
  Payload ID: 2144
  Gene Symbol: CACNA1E
  Gene Name: calcium channel, voltage-dependent, R type, alpha 1E subunit
  Uniprot ID: Q15878
  ENST ID: ENST00000367567
  CDS Start-End: 1-6813
atggctcgcttcggggaggcggtggtcgccaggccagggtccggcgatggagactcggaccagagcaggaaccggcaaggaacccccgtgccggcctcggggcaggcggccgcctacaagcagacgaaagcacagagggcgcggactatggctttgtacaaccccattcccgtccggcagaactgtttcaccgtcaacagatccctgttcatcttcggagaagataacattgtcaggaaatatgccaagaagctcatcgattggccaccatttgagtacatgatcctggccaccatcattgccaactgcatcgtcctggccctggagcagcatcttcctgaggatgacaagacccccatgtcccgaagactggagaagacagaaccttatttcattgggatcttttgctttgaagctgggatcaaaattgtggccctggggttcatcttccataagggctcttacctccgcaatggctggaatgtcatggacttcatcgtggtcctcagtggcatcctggccactgcaggaacccacttcaatactcacgtggacctgaggaccctccgggctgtgcgtgtcctgcggcctttgaagctcgtgtcagggatacctagcctgcagattgtgttgaagtccatcatgaaggccatggtacctcttctgcagattggccttctgctcttctttgccatcctgatgtttgctatcattggtttggagttctacagtggcaagttacatcgagcatgcttcatgaacaattcaggtattctagaaggatttgacccccctcacccatgtggtgtgcagggctgcccagctggttatgaatgcaaggactggatcggccccaatgatgggatcacccagtttgataacatcctttttgctgtgctgactgtcttccagtgcatcaccatggaagggtggaccactgtgctgtacaataccaatgatgccttaggagccacctggaattggctgtacttcatccccctcatcatcattggatccttctttgttctcaacctagtcctgggagtgctttccggggaatttgccaaagagagagagagagtggagaaccgaagggctttcatgaagctgcggcgccagcagcagattgagcgtgagctgaatggctaccgtgcctggatagacaaagcagaggaagtcatgctcgctgaagaaaataaaaatgctggaacatccgccttagaagtgcttcgaagggcaaccatcaagaggagccggacagaggccatgactcgagactccagtgatgagcactgtgttgatatctcctctgtgggcacacctctggcccgagccagtatcaaaagtgcaaaggtagacggggtctcttatttccggcacaaggaaaggcttctgcgcatctccattcgccacatggttaaatcccaggtgttttactggattgtgctgagccttgtggcactcaacactgcctgtgtggccattgtccatcacaaccagccccagtggctcacccacctcctctactatgcagaatttctgtttctgggactcttcctcttggagatgtccctgaagatgtatggcatggggcctcgcctttattttcactcttcattcaactgctttgattttggggtcacagtgggcagtatctttgaagtggtctgggcaatcttcagacctggtacgtcttttggaatcagtgtcttgcgagccctccggcttctaagaatatttaaaataaccaagtattgggcttccctacggaatttggtggtctccttgatgagctcaatgaagtctatcatcagtttgcttttcctcctcttcctcttcatcgttgtctttgctctcctaggaatgcagttatttggaggcaggtttaactttaatgatgggactccttcggcaaattttgataccttccctgcagccatcatgactgtgttccagatcctgacgggtgaggactggaatgaggtgatgtacaatgggatccgctcccagggtggggtcagctcaggcatgtggtctgccatctacttcattgtgctcaccttgtttggcaactacacgctactgaatgtgttcttggctatcgctgtggataatctcgccaacgcccaggaactgaccaaggatgaacaggaggaagaagaggccttcaaccagaaacatgcactgcagaaggccaaggaggtcagcccgatgtctgcacccaacatgccttcgatcgaaagagacagaaggagaagacaccacatgtcgatgtgggagccacgcagcagccacctgagggagcggaggcgccggcaccacatgtccgtgtgggagcagcgtaccagccagctgaggaagcacatgcagatgtccagccaggaggccctcaacagagaggaggcgccgaccatgaacccgctcaaccccctcaacccgctcagctccctcaacccgctcaatgcccaccccagcctttatcggcgacccagggccattgagggcctggccctgggcctggccctggagaagttcgaggaggagcgcatcagccgtggggggtccctcaagggggatggaggggaccgatccagtgccctggacaaccagaggacccctttgtccctgggccagcgggagccaccatggctggccaggccctgtcatggaaactgtgacccgactcagcaggaggcagggggaggagaggctgtggtgacctttgaggaccgggccaggcacaggcagagccaacggcgcagccggcatcgccgcgtcaggacagaaggcaaggagtcctcttcagcctcccggagcaggtctgccagccaggaacgcagtctggatgaagccatgcccactgaaggggagaaggaccatgagctcaggggcaaccatggtgccaaggagccaacgatccaagaagagagagcccaggatttaaggaggaccaacagtctgatggtgtccagaggctccgggctggcaggaggccttgatgaggctgacacccccctagtcctgccccatcctgagctggaagtggggaagcacgtggtgctgacggagcaggagccagaaggcagcagtgagcaggccctgctggggaatgtgcagctagacatgggccgggtcatcagccagagcgagcctgacctctcctgcatcacggccaacacggacaaggccaccaccgagagcaccagcgtcaccgtcgccatccccgacgtggaccccttggtggactcaaccgtggtgcacattagcaacaagacggatggggaagccagtcccttgaaggaggcagagatcagagaggatgaggaggaggtggagaagaagaagcagaagaaggagaagcgtgagacaggcaaagccatggtgccccacagctcaatgttcatcttcagcaccaccaacccgatccggagggcctgccactacatcgtgaacctgcgctactttgagatgtgcatcctcctggtgattgcagccagcagcatcgccctggcggcagaggaccccgtcctgaccaactcggagcgcaacaaagtcctgaggtattttgactatgtgttcacgggcgtgttcacctttgagatggttataaagatgatagaccaaggcttgatcctgcaggatgggtcctacttccgagacttgtggaacatcctggactttgtggtggtcgttggcgcattggtggcctttgctctggcgaacgctttgggaaccaacaaaggacgggacatcaagaccatcaagtctctgcgggtgctccgagttctaaggccactgaaaaccatcaagcgcttgcccaagctcaaggccgtcttcgactgcgtagtgacctccttgaagaatgtcttcaacatactcattgtgtacaagctcttcatgttcatctttgctgtcatcgcagttcagctcttcaagggaaagttcttttattgcacggacagttccaaggacacagagaaggagtgcataggcaactatgtagatcatgagaaaaacaagatggaggtgaagggccgggaatggaagcgccatgaattccactacgacaacattatctgggccctgctgaccctcttcaccgtctccacaggggaaggatggcctcaagttctgcagcactctgtagatgtgacagaggaagaccgaggcccaagccgcagcaaccgcatggagatgtctatcttttatgtagtctactttgtggtcttccccttcttctttgtcaatatctttgtggctctcatcatcatcaccttccaggagcaaggggataagatgatggaggagtgcagcctggagaagaatgagagggcgtgcatcgacttcgccatcagcgccaaacctctcacccgctacatgccgcagaacagacacaccttccagtaccgcgtgtggcactttgtggtgtctccgtcctttgagtacaccattatggccatgatcgccttgaatactgttgtgctgatgatgaagtattattctgctccctgtacctatgagctggccctgaagtacctgaatatcgccttcaccatggtgttttccctggaatgtgtcctgaaggtcatcgcttttggctttttgaactatttccgagacacctggaatatctttgacttcatcaccgtgattggcagtatcacagaaattatcctgacagacagcaagctggtgaacaccagtggcttcaatatgagctttctgaagctcttccgagctgcccgcctcataaagctcctgcgtcagggctataccatacgcattttgctgtggacctttgtgcagtcctttaaggccctcccttatgtctgccttttaattgccatgcttttcttcatttatgccatcattgggatgcaggtatttggaaacataaaattagacgaggagagtcacatcaaccggcacaacaacttccggagtttctttgggtccctaatgctactcttcaggagtgccacaggtgaggcctggcaggagattatgctgtcatgccttggggagaagggctgtgagcctgacaccaccgcaccatcagggcagaacgagaacgaacgctgcggcaccgatctggcctacgtgtactttgtctccttcatcttcttctgctccttcttgatgctcaacctgtttgtggccgtcatcatggacaactttgagtacctgactcgggactcctccatcctggggcctcaccacttggacgagtttgtccgcgtctgggcagaatatgaccgagcagcatgtggccgcatccattacactgagatgtatgaaatgctgactctcatgtcacctccgctaggcctcggcaagagatgtccctccaaagtggcatataagaggttggtcctgatgaacatgccagtagctgaggacatgacggtccacttcacctccacacttatggctctgatccggacagctctggacattaaaattgccaaaggtggtgcagacaggcagcagctagactcagagctacaaaaggagaccctagccatctggcctcacctatcccagaagatgctggatctgcttgtgcccatgcccaaagcctctgacctgactgtgggcaaaatctatgcagcaatgatgatcatggactactataagcagagtaaggtgaagaagcagaggcagcagctggaggaacagaaaaatgcccccatgttccagcgcatggagccttcatctctgcctcaggagatcattgctaatgccaaagccctgccttacctccagcaggaccccgtttcaggcctgagtggccggagtggatacccttcgatgagtccactctctccccaggatatattccagttggcttgtatggaccccgccgatgacggacagttccaagaacggcagtctctggtggtgacagaccctagctccatgagacgttcattttccactattcgggataagcgttcaaattcctcgtggttggaggaattctccatggagcgaagcagtgaaaatacctacaagtcccgtcgccggagttaccactcctccttgcggctgtcagcccaccgcctgaactctgattcaggccacaagtctgacactcaccgctcagggggcagggagcggggacgatcaaaagagcgaaagcatcttctctctcctgatgtctcccgctgcaattcagaagagcgagggacccaggctgactgggagtccccagagcgccgtcaatccaggtcacccagtgagggcaggtcacagacgcccaacagacagggcacaggttccctaagtgagagctccatcccctctgtctctgacaccagcaccccaagaagaagtcgtcggcagctcccacccgtcccgccaaagccccggcccctcctttcctacagctccctgattcgacacgcgggcagcatctctccacctgctgatggaagcgaggagggctccccgctgacctcccaagctctggagagcaacaatgcttgcctgaccgagtcttccaactctccgcacccccagcagagccaacatgcctccccacagcgctacatctccgagccctacttggccctgcacgaagactcccacgcctcagactgtggtgaggaggagacgctcactttcgaagcagccgtggctactagcctgggccgttccaacaccatcggctcagccccacccctgcggcatagctggcagatgcccaacgggcactatcggcggcggaggcgcggggggcctgggccaggcatgatgtgtggggctgtcaacaacctgctaagtgacacggaagaagatgacaaatgctagaggctgctcccccctccgatgcatgctcttctctcacatggagaaaaccaagacagaattgggaagccagtgcggcccgggggggaggaagagggaaaaggaagatggaaggacaccatgcattatcagagaagaggaagtaaaggacaatcagaacaccagtcaaacccaccaaattgctttattcccctttgcaagatgggcactgccatagttctgcctctttgctggggaaagaaaccaggaacgtggagggttattactgcgggagaagggacacgaggatggctttgcttccccttgccccttcccacttttctaaaagctgtggagggatctagctggcctatgtctacactcagtgccctgagaagcctggaagactttctggctcttaactggggagtagtggagaccataggagaggactctcctccctcaccagctcttacgcctcagccagcaccactgccaccagggcaactgcagcagcatctcatgcataaccctgtggcttgcttcccccagggcagcacaggctaagtcaggaacatcggatgccagggagggaggagaaagccgaagcgaaaggggtcagggtgctgaggcaacagcagcaagggctggtctggacaagaaaagccatagcccggcagcccctaccatgagggagacagagaaacagaactggtggtgctggggggtatagccccccatccttgaggcctgtcacccacacagtaggtgctgagagttaggacaggtcaggaagtcccccagggtccacaaaggtgcctgaggctctggtaagggtgaagataaaagtatttaacaaccgctatggcatcaatgtaagtggagtttggtcctagtgccggagcccatgctattccaggcattggctctttagatgccagtcatgggggaaccctgagggtgtgggtagagtagcaggggccacctaagagattaaaaacagtctgttttccaaccagtgtggaagcaattaaatatgcgtaacagtgctacggccacaccagcacctcctggctgaaggtcagcccacactctggtccatgaggcagcaaggccagtgctgtgccaagcccggtaaggccaagtgccgaggcccagccttccctgccactcctctgagagggcagaacacacatatccaagtaggctacccaccactgggtagggatttctgtaaagatgggaaaggctgatagattgaaataagcttctgtgaaagtctggatttactgaggacctcccctgaggagggaccgttgggaccgcagattctgcagctggtgtggggttcaggtcagtttgtcaggatgctttaaggtgattagtaaatatacctcagcttagacttgggctgctccttctagcaaagcaggctccagtggggcctcatcatacaggatgacaagactggggccctgttcaccttgaacatgcccctgggccaagatggggcttcacccctccccagagtaagagctggggctgacagtcccaccctgtcattcctaatagcccaaacgcagaagcactgagcaagagagccctttcttgccaagccagtgctcttttggtatatggcatacagctccattggaggggacacatcactggctttatctggtggaaatgtacctttcccttaagttcctccttagtgccatcacagcaggtgaatgggtgccctacggggccctccttcccccaccaggaacagatggaacctgccacccaggatcctgatctgccctgcactgagcactcagtggataaacactcctccagcccagacacactcctcctcttgggcaggagcaatccagagttgttatttttcttagaaggagcctcttttccctctattttttaaattgaaatataatagctgcatcagccctgaaaagccaaattcaaccacatggctggagaatcatttgtcatggccccgccttctcttctgatactaatggagcttcatgacccacggtcagcccccaaaccaaagttgtcccaacagaggaggccagtgaggcagagacagagctctcccactctcagaccctcttttgtcttcattttcctctcccacttagcacatgtgtgcttgagggtggctgggaatgtgatatacagcaccctgatcctaacaggtgtgattgttacgtaagacgctgatactgggccttgtattgcttttaaagtttcctctgctcagcatcatttcatgccaaagtgctgctatgggctgctttgtgtgcacaaaattgctttttccacctcggaaatgcagctttccctagggggaggcctacaacaggacgaccattctgagccagtgagtctattgcatggtgttttgagaaagggaattttagtgacaccttatgccatttcaagaggagaaatgcaggctggcagagcaatttccagaaatggaatttgcctgcaaatagtataaacaacactaaatttactgtgccaggaaatcttcctgaactccttgaactcatacacacaggtatttgagtcctgaataaagtgttggaaagcactgcagatgcggtcacctgactgaccacctgggttttctattaccagtgaatttcttttattcaccttcccttgaccaagaaattgggtttcttttccctcagcctgcacttactcttctattaagaccagaaaataaaataattttccgttgagtcacaaactcatcatcttgtttggtgttctgctgcctctgaacaaaagtgaatgccagccttcccttgctgggtgtcagagtctgcctcccttgaaaagaggcccctgtagaccccaacacctattcttttctctggttaattacagcagcatctgagaaattccatgcaaaagaagactacaaccagtgtttcagatataccacaagatcaaatttgggcactggtggtccacctcagaagactcttgagtcatatattcagtttctcttgctaatatatgactcgtcttcaccatctcctcaaaacaagagcaaagccaagatagaggaaggtaaaaggaggaggaaaggaaaccaaggcagggagatgttctaagtaggtttgcatttagttacccctcatttcacttaaggctccagacagactccaggtagggaatgcatgctgtctctttctctgtgtctgtctccccatctcctagaggacagagtgccagcgacctctggacaggggcagggctccagccaaggtgcccctgagccagggtcaacatagaatttcctgccccgtgaagggctggcaccagctagcatccccttggctccacatgagtcatgaacacaattgtcagtgggggtctctgctgctcttctggctgaagaatctgtttttcttctgggcttcacttgtagttcctattcaatgtctccatagggcactgagatcaccaagaacattacccagaagctgaagtccaaatgttctagattttgacctctcttgactctggggccacaaagagaaggccccataatccacctctcagccagtatctcccttctttgcacagattcctcccaaccccatagagcctatgtggtgagcatgagggtcgtcttccctctgttctcccatcccagcctctgttttgctgcatgttagcgctgatccagctcctgagatggttaattccacccaatccaagcttatttgcttgcctgactgactccaccactctctcagctatgggggaatattgcattctaatgaaatagggtttggaactcacctggtgctcctcgcaagacaactgacacaaggtgtagggtgtgggggtggacaaaatgcccacctactggataaaagctcactgcaggaaaatgaggtctcctggcataatgcaacaaaaatctcatataattttgatttttaaaaagttgttctcaatttttcattacatcctacttctcagccctctggatgtttcatttttttggacaaagtgtttctttagtggttggggccagggacaggttgagggatatttctcggctcatttataagatataaatattatgaggttgtatgtaaagaaagggcaaacgtacagcagaaggggagcaaatagctacctttcaaggattttgagatttgaaggttaaggaatttttactgctatttttgttcatcagtttcatgtctgttatgttttgagatcctcagaggcctagggttagcgtataccaagaatcctggtgagaggcgttgccatgccttggggtgaattcttccccactagctctctcacccagcctacaagtccttctctcatagatcccagagcaatgggcaccgtccaggaggtacaggagaggactttatgatgcaggaaagaaggaagaagtgggtcccttgcaagtggccagacagggaatgatggtttgactccagaaatcaggaatcaggttcaggtttggataacttctctttaaaatatctccacattgagactcttattttaacaaaatccaaacaaaattaactcagggcttgtgacctaacctttgtaagaaggtgatcaaagagatcctacattaataagcactgcctgtagcaccagctttgtctttttgtcttttgttgtttctttcctgaaccaccctgtacatcatagccaggtctaccccaaatagagcagcagctgatggcttctctgctgtctgtggagggagggctcggctgcagacctatggtgttttgtcagctgttaggtgctacagcccacccagtcagagtacatagacatagcgctttaagggacaaaggacaaacagaactatctttgctttccggaggccatctttttctttccttgaatcctttctgctttaaacttctgaggtttatgcatcccagagaggtcacaccaagccaaagagaaaaaattcatagattgtcccagcctacccaaagggcctgaaaagcctctctaaacaaaactcaagatagctgagaagtatgaatggggttcacagcaaagtccaattgatggcttttgaggctgggacacccccaaactgcccttctgtttttgtagttttgctttcttccacccaccctctctccgcatgctgtaagttaggggagttagtatcttgaacttctaaatgcaaaaggagattttataataagccatgctacctgtaaatacattattgaggtttgcatttttatttttggaggtatgaaagagttgagtagaccaagtcaaaagaggtgtggggatttatgtttatttttatttgtttggggttgtttggttggtggctgggtttcttgtaacagacctattctggaatagcaaagaaggataccttggtgatctgcaatgtttctgaatctgtttctctttaggaagtgattgccatcaaatttagtgatatgatatttgagtcaaaaatctgaggttatagtaccagctgtcttttctctctggtctcctttttgtcgtctttctctttctgtctaaattggcctctgtcttttcctaaggacttaaaatataacccaaattaatgaagaactgccccaaaacttcagtgaaagccaaggaggtacagaattttttcaggacatctttaaccaatacaaaatttatgtcttaagaagataatttttacaatagtgtagtaatctgataaatgaaaactattggaagtcaatagttttttatattccagctttctgtattcaaacttgtgccttcagcaagcatctcttcactttctttcccttgtcaattgaaacatgaatgtttggctaactcatgatgtaaagtgtctgttaagttaataatacataatttaaagcacttagtctccacaaagcaatttagaaaaatcttcacttgttagatcccatgaagtacctatgaaattctcagcattgctataagcatttgattttttttaaggaaacttcctgtttaatggaatctgaatccaagatttgctttaatttcactctattcttcccattttcccttattcttcttgttgtctctctaattaaaaaaaaaaaaaacctaggcttttttttttctatccagaaagttgggttttcatgatctgagcttccttatgtctccttctctttgtgcaaacttaaaccagtcatagattgtcacccagacatattctccaacccagcattggaaatctgaacgaatcttttctctttttgtcctacaagtttgtcagagatgagaatggattgctgtctacattctacaaccagaccctagactttataccaggctgtgccacttcctcttcacttcactcagaggatggccccaaaactgaaaaggaaatgaaataatcaaatataccaaatccgaatttgactttatttgatgactcaatattttccttccagtactctaatttttttttatggcaatggcctatatggcacaagaaccaccacttaaagcaaatctgttgaacatttttataagggatgagcaagaaaaacacactccaaaattttaaagtgccattaatcaatttttaagaataaaggtaatatgaaatgagggctaaacaatgtaatataactgccagttaaggtagacagtagttgtggtcttagttacatttgatatggagttgtgtaatattaagcagatcccagtggagttagtaaaaacataggtattgagttttaatggctaccaattgggatatatacttagcctgcaggctgaactttagtcagtgtttttctatcatgttgttttgtgaacaagtcaaaatttatacaaagctaccctaagtgctgcaattgcagaggaacttgcctcttcgtgatattagagggcagtccaactccgctcaaactgagtccaagatttgaattcatccagaaaaacaaatggaggagaaaagcctaatgcaccacatgtgtttggcatttcatggctgggacaatggagtagagggtaggaagacaagctgtagaacaaaagcaaagtgaggtagaaagtaacaggtcccagacgaggacagacttagagatgtgtaaccttggatcctctttttcacttagaatatgggtaaacttcttagcacaagactggattaagagaagttctttctgttaaactcacctagggtagtggctttgaaggcctcagaggattaatagattcccaaaattttcttccagacctgggagatggagagaaagaggttcttgctttaaagcggctcgaagacaatctttatgacttcagcaactcttcaacatagtagcaccaataaaggagagattatgttaacttcctagtggtgagaataccatgggatgggagaagggccagtgagtgggatgggaatgagcttcatcaggaacagatttcagactctgcagggtgcaccggttctagcctcaaataacaacattgcaaggaggtggactacagggtccacaccctctgtccttcggggcccatggtcaggccattccctctttgttttgctcctagaggatgagcatgtaagatgagatcaggagggaaattgggtgctctgcctcaggctgttaaaatgctgctacctgcattctaaaacgtgcaagtcatgccccacaagacacctccttagggcagcatccactgtggtgtgccagcctgacacccctgcagtcacggtgtttgaatggcagctgatgctggcccacccagagtatcggtgcatctctcctaaagccacagttcagcactgcatgttgaccaggcggatatcctataatatagatgctcgtttggatccaaaaggaaaaccattaaaaataaaagaaagatgaaaaactttaatgttttgggggggataaaagaaaagaataaataaaaccttgttgt

SEQ ID NO: 113229 - DNA, 9724 bp, Homo sapiens
  Payload ID: 2144
  Gene Symbol: CACNA1E
  Gene Name: calcium channel, voltage-dependent, R type, alpha 1E subunit
  Uniprot ID: Q15878
  ENST ID: ENST00000367570
  CDS Start-End: 166-6978
gctgctgctgcctctccgaagagctcgcggagctccccagaggcggtggtccccgtgcttgtctggatgcggctctgagtctccgtgtgtctttctgcttgttgctgtgtgcgggtgttcggccgcgatcacctttgtgtgtcttctgtctgtttaaacctcaggatggctcgcttcggggaggcggtggtcgccaggccagggtccggcgatggagactcggaccagagcaggaaccggcaaggaacccccgtgccggcctcggggcaggcggccgcctacaagcagacgaaagcacagagggcgcggactatggctttgtacaaccccattcccgtccggcagaactgtttcaccgtcaacagatccctgttcatcttcggagaagataacattgtcaggaaatatgccaagaagctcatcgattggccgccatttgagtacatgatcctggccaccatcattgccaactgcatcgtcctggccctggagcagcatcttcctgaggatgacaagacccccatgtcccgaagactggagaagacagaaccttatttcattgggatcttttgctttgaagctgggatcaaaattgtggccctggggttcatcttccataagggctcttacctccgcaatggctggaatgtcatggacttcatcgtggtcctcagtggcatcctggccactgcaggaacccacttcaatactcacgtggacctgaggaccctccgggctgtgcgtgtcctgcggcctttgaagctcgtgtcagggatacctagcctgcagattgtgttgaagtccatcatgaaggccatggtacctcttctgcagattggccttctgctcttctttgccatcctgatgtttgctatcattggtttggagttctacagtggcaagttacatcgagcatgcttcatgaacaattcaggtattctagaaggatttgacccccctcacccatgtggtgtgcagggctgcccagctggttatgaatgcaaggactggatcggccccaatgatgggatcacccagtttgataacatcctttttgctgtgctgactgtcttccagtgcatcaccatggaagggtggaccactgtgctgtacaataccaatgatgccttaggagccacctggaattggctgtacttcatccccctcatcatcattggatccttctttgttctcaacctagtcctgggagtgctttccggggaatttgccaaagagagagagagagtggagaaccgaagggctttcatgaagctgcggcgccagcagcagattgagcgtgagctgaatggctaccgtgcctggatagacaaagcagaggaagtcatgctcgctgaagaaaataaaaatgctggaacatccgccttagaagtgcttcgaagggcaaccatcaagaggagccggacagaggccatgactcgagactccagtgatgagcactgtgttgatatctcctctgtgggcacacctctggcccgagccagtatcaaaagtgcaaaggtagacggggtctcttatttccggcacaaggaaaggcttctgcgcatctccattcgccacatggttaaatcccaggtgttttactggattgtgctgagccttgtggcactcaacactgcctgtgtggccattgtccatcacaaccagccccagtggctcacccacctcctctactatgcagaatttctgtttctgggactcttcctcttggagatgtccctgaagatgtatggcatggggcctcgcctttattttcactcttcattcaactgctttgattttggggtcacagtgggcagtatctttgaagtggtctgggcaatcttcagacctggtacgtcttttggaatcagtgtcttgcgagccctccggcttctaagaatatttaaaataaccaagtattgggcttccctacggaatttggtggtctccttgatgagctcaatgaagtctatcatcagtttgcttttcctcctcttcctcttcatcgttgtctttgctctcctaggaatgcagttatttggaggcaggtttaactttaatgatgggactccttcggcaaattttgataccttccctgcagccatcatgactgtgttccagatcctgacgggtgaggactggaatgaggtgatgtacaatgggatccgctcccagggtggggtcagctcaggcatgtggtctgccatctacttcattgtgctcaccttgtttggcaactacacgctactgaatgtgttcttggctatcgctgtggataatctcgccaacgcccaggaactgaccaaggatgaacaggaggaagaagaggccttcaaccagaaacatgcactgcagaaggccaaggaggtcagcccgatgtctgcacccaacatgccttcgatcgaaagagacagaaggagaagacaccacatgtcgatgtgggagccacgcagcagccacctgagggagcggaggcgccggcaccacatgtccgtgtgggagcagcgtaccagccagctgaggaagcacatgcagatgtccagccaggaggccctcaacagagaggaggcgccgaccatgaacccgctcaaccccctcaacccgctcagctccctcaacccgctcaatgcccaccccagcctttatcggcgacccagggccattgagggcctggccctgggcctggccctggagaagttcgaggaggagcgcatcagccgtggggggtccctcaagggggatggaggggaccgatccagtgccctggacaaccagaggacccctttgtccctgggccagcgggagccaccatggctggccaggccctgtcatggaaactgtgacccgactcagcaggaggcagggggaggagaggctgtggtgacctttgaggaccgggccaggcacaggcagagccaacggcgcagccggcatcgccgcgtcaggacagaaggcaaggagtcctcttcagcctcccggagcaggtctgccagccaggaacgcagtctggatgaagccatgcccactgaaggggagaaggaccatgagctcaggggcaaccatggtgccaaggagccaacgatccaagaagagagagcccaggatttaaggaggaccaacagtctgatggtgtccagaggctccgggctggcaggaggccttgatgaggctgacacccccctagtcctgccccatcctgagctggaagtggggaagcacgtggtgctgacggagcaggagccagaaggcagcagtgagcaggccctgctggggaatgtgcagctagacatgggccgggtcatcagccagagcgagcctgacctctcctgcatcacggccaacacggacaaggccaccaccgagagcaccagcgtcaccgtcgccatccccgacgtggaccccttggtggactcaaccgtggtgcacattagcaacaagacggatggggaagccagtcccttgaaggaggcagagatcagagaggatgaggaggaggtggagaagaagaagcagaagaaggagaagcgtgagacaggcaaagccatggtgccccacagctcaatgttcatcttcagcaccaccaacccgatccggagggcctgccactacatcgtgaacctgcgctactttgagatgtgcatcctcctggtgattgcagccagcagcatcgccctggcggcagaggaccccgtcctgaccaactcggagcgcaacaaagtcctgaggtattttgactatgtgttcacgggcgtgttcacctttgagatggttataaagatgatagaccaaggcttgatcctgcaggatgggtcctacttccgagacttgtggaacatcctggactttgtggtggtcgttggcgcattggtggcctttgctctggcgaacgctttgggaaccaacaaaggacgggacatcaagaccatcaagtctctgcgggtgctccgagttctaaggccactgaaaaccatcaagcgcttgcccaagctcaaggccgtcttcgactgcgtagtgacctccttgaagaatgtcttcaacatactcattgtgtacaagctcttcatgttcatctttgctgtcatcgcagttcagctcttcaagggaaagttcttttattgcacggacagttccaaggacacagagaaggagtgcataggcaactatgtagatcatgagaaaaacaagatggaggtgaagggccgggaatggaagcgccatgaattccactacgacaacattatctgggccctgctgaccctcttcaccgtctccacaggggaaggatggcctcaagttctgcagcactctgtagatgtgacagaggaagaccgaggcccaagccgcagcaaccgcatggagatgtctatcttttatgtagtctactttgtggtcttccccttcttctttgtcaatatctttgtggctctcatcatcatcaccttccaggagcaaggggataagatgatggaggagtgcagcctggagaagaatgagagggcgtgcatcgacttcgccatcagcgccaaacctctcacccgctacatgccgcagaacagacacaccttccagtaccgcgtgtggcactttgtggtgtctccgtcctttgagtacaccattatggccatgatcgccttgaatactgttgtgctgatgatgaagtattattctgctccctgtacctatgagctggccctgaagtacctgaatatcgccttcaccatggtgttttccctggaatgtgtcctgaaggtcatcgcttttggctttttgaactatttccgagacacctggaatatctttgacttcatcaccgtgattggcagtatcacagaaattatcctgacagacagcaagctggtgaacaccagtggcttcaatatgagctttctgaagctcttccgagctgcccgcctcataaagctcctgcgtcagggctataccatacgcattttgctgtggacctttgtgcagtcctttaaggccctcccttatgtctgccttttaattgccatgcttttcttcatttatgccatcattgggatgcaggtatttggaaacataaaattagacgaggagagtcacatcaaccggcacaacaacttccggagtttctttgggtccctaatgctactcttcaggagtgccacaggtgaggcctggcaggagattatgctgtcatgccttggggagaagggctgtgagcctgacaccaccgcaccatcagggcagaacgagaacgaacgctgcggcaccgatctggcctacgtgtactttgtctccttcatcttcttctgctccttcttgatgctcaacctgtttgtggccgtcatcatggacaactttgagtacctgactcgggactcctccatcctggggcctcaccacttggacgagtttgtccgcgtctgggcagaatatgaccgagcagcatgtggccgcatccattacactgagatgtatgaaatgctgactctcatgtcacctccgctaggcctcggcaagagatgtccctccaaagtggcatataagaggttggtcctgatgaacatgccagtagctgaggacatgacggtccacttcacctccacacttatggctctgatccggacagctctggacattaaaattgccaaaggtggtgcagacaggcagcagctagactcagagctacaaaaggagaccctagccatctggcctcacctatcccagaagatgctggatctgcttgtgcccatgcccaaagcctctgacctgactgtgggcaaaatctatgcagcaatgatgatcatggactactataagcagagtaaggtgaagaagcagaggcagcagctggaggaacagaaaaatgcccccatgttccagcgcatggagccttcatctctgcctcaggagatcattgctaatgccaaagccctgccttacctccagcaggaccccgtttcaggcctgagtggccggagtggatacccttcgatgagtccactctctccccaggatatattccagttggcttgtatggaccccgccgatgacggacagttccaagaacggcagtctctggtggtgacagaccctagctccatgagacgttcattttccactattcgggataagcgttcaaattcctcgtggttggaggaattctccatggagcgaagcagtgaaaatacctacaagtcccgtcgccggagttaccactcctccttgcggctgtcagcccaccgcctgaactctgattcaggccacaagtctgacactcaccgctcagggggcagggagcggggacgatcaaaagagcgaaagcatcttctctctcctgatgtctcccgctgcaattcagaagagcgagggacccaggctgactgggagtccccagagcgccgtcaatccaggtcacccagtgagggcaggtcacagacgcccaacagacagggcacaggttccctaagtgagagctccatcccctctgtctctgacaccagcaccccaagaagaagtcgtcggcagctcccacccgtcccgccaaagccccggcccctcctttcctacagctccctgattcgacacgcgggcagcatctctccacctgctgatggaagcgaggagggctccccgctgacctcccaagctctggagagcaacaatgcttgcctgaccgagtcttccaactctccgcacccccagcagagccaacatgcctccccacagcgctacatctccgagccctacttggccctgcacgaagactcccacgcctcagactgtggtgaggaggagacgctcactttcgaagcagccgtggctactagcctgggccgttccaacaccatcggctcagccccacccctgcggcatagctggcagatgcccaacgggcactatcggcggcggaggcgcggggggcctgggccaggcatgatgtgtggggctgtcaacaacctgctaagtgacacggaagaagatgacaaatgctagaggctgctcccccctccgatgcatgctcttctctcacatggagaaaaccaagacagaattgggaagccagtgcggcccgggggggaggaagagggaaaaggaagatggaaggacaccatgcattatcagagaagaggaagtaaaggacaatcagaacaccagtcaaacccaccaaattgctttattcccctttgcaagatgggcactgccatagttctgcctctttgctggggaaagaaaccaggaacgtggagggttattactgcgggagaagggacacgaggatggctttgcttccccttgccccttcccacttttctaaaagctgtggagggatctagctggcctatgtctacactcagtgccctgagaagcctggaagactttctggctcttaactggggagtagtggagaccataggagaggactctcctccctcaccagctcttacgcctcagccagcaccactgccaccagggcaactgcagcagcatctcatgcataaccctgtggcttgcttcccccagggcagcacaggctaagtcaggaacatcggatgccagggagggaggagaaagccgaagcgaaaggggtcagggtgctgaggcaacagcagcaagggctggtctggacaagaaaagccatagcccggcagcccctaccatgagggagacagagaaacagaactggtggtgctggggggtatagccccccatccttgaggcctgtcacccacacagtaggtgctgagagttaggacaggtcaggaagtcccccagggtccacaaaggtgcctgaggctctggtaagggtgaagataaaagtatttaacaaccgctatggcatcaatgtaagtggagtttggtcctagtgccggagcccatgctattccaggcattggctctttagatgccagtcatgggggaaccctgagggtgtgggtagagtagcaggggccacctaagagattaaaaacagtctgttttccaaccagtgtggaagcaattaaatatgcgtaacagtgctacggccacaccagcacctcctggctgaaggtcagcccacactctggtccatgaggcagcaaggccagtgctgtgccaagcccggtaaggccaagtgccgaggcccagccttccctgccactcctctgagagggcagaacacacatatccaagtaggctacccaccactgggtagggatttctgtaaagatgggaaaggctgatagattgaaataagcttctgtgaaagtctggatttactgaggacctcccctgaggagggaccgttgggaccgcagattctgcagctggtgtggggttcaggtcagtttgtcaggatgctttaaggtgattagtaaatatacctcagcttagacttgggctgctccttctagcaaagcaggctccagtggggcctcatcatacaggatgacaagactggggccctgttcaccttgaacatgcccctgggccaagatggggcttcacccctccccagagtaagagctggggctgacagtcccaccctgtcattcctaatagcccaaacgcagaagcactgagcaagagagccctttcttgccaagccagtgctcttttggtatatggcatacagctccattggaggggacacatcactggctttatctggtggaaatgtacctttcccttaagttcctccttagtgccatcacagcaggtgaatgggtgccctacggggccctccttcccccaccaggaacagatggaacctgccacccaggatcctgatctgccctgcactgagcactcagtggataaacactcctccagcccagacacactcctcctcttgggcaggagcaatccagagttgttatttttcttagaaggagcctcttttccctctattttttaaattgaaatataatagctgcatcagccctgaaaagccaaattcaaccacatggctggagaatcatttgtcatggccccgccttctcttctgatactaatggagcttcatgacccacggtcagcccccaaaccaaagttgtcccaacagaggaggccagtgaggcagagacagagctctcccactctcagaccctcttttgtcttcattttcctctcccacttagcacatgtgtgcttgagggtggctgggaatgtgatatacagcaccctgatcctaacaggtgtgattgttacgtaagacgctgatactgggccttgtattgcttttaaagtttcctctgctcagcatcatttcatgccaaagtgctgctatgggctgctttgtgtgcacaaaattgctttttccacctcggaaatgcagctttccctagggggaggcctacaacaggacgaccattctgagccagtgagtctattgcatggtgttttgagaaagggaattttagtgacaccttatgccatttcaagaggagaaatgcaggctggcagagcaatttccagaaatggaatttgcctgcaaatagtataaacaacactaaatttactgtgccaggaaatcttcctgaactccttgaactcatacacacaggtatttgagtcctgaataaagtgttggaaagcactgcagatgcggtcacctgactgaccacctgggttttctattaccagtgaatttcttttattcaccttcccttgaccaagaaattgggtttcttttccctcagcctgcacttactcttctattaagaccagaaaataaaataattttccgttgagtcacaaa

SEQ ID NO: 113230 - DNA, 7067 bp, Homo sapiens
  Payload ID: 2144
  Gene Symbol: CACNA1E
  Gene Name: calcium channel, voltage-dependent, R type, alpha 1E subunit
  Uniprot ID: Q15878
  ENST ID: ENST00000367573
  CDS Start-End: 1-6942
atggctcgcttcggggaggcggtggtcgccaggccagggtccggcgatggagactcggaccagagcaggaaccggcaaggaacccccgtgccggcctcggggcaggcggccgcctacaagcagacgaaagcacagagggcgcggactatggctttgtacaaccccattcccgtccggcagaactgtttcaccgtcaacagatccctgttcatcttcggagaagataacattgtcaggaaatatgccaagaagctcatcgattggccgccatttgagtacatgatcctggccaccatcattgccaactgcatcgtcctggccctggagcagcatcttcctgaggatgacaagacccccatgtcccgaagactggagaagacagaaccttatttcattgggatcttttgctttgaagctgggatcaaaattgtggccctggggttcatcttccataagggctcttacctccgcaatggctggaatgtcatggacttcatcgtggtcctcagtggcatcctggccactgcaggaacccacttcaatactcacgtggacctgaggaccctccgggctgtgcgtgtcctgcggcctttgaagctcgtgtcagggatacctagcctgcagattgtgttgaagtccatcatgaaggccatggtacctcttctgcagattggccttctgctcttctttgccatcctgatgtttgctatcattggtttggagttctacagtggcaagttacatcgagcatgcttcatgaacaattcaggtattctagaaggatttgacccccctcacccatgtggtgtgcagggctgcccagctggttatgaatgcaaggactggatcggccccaatgatgggatcacccagtttgataacatcctttttgctgtgctgactgtcttccagtgcatcaccatggaagggtggaccactgtgctgtacaataccaatgatgccttaggagccacctggaattggctgtacttcatccccctcatcatcattggatccttctttgttctcaacctagtcctgggagtgctttccggggaatttgccaaagagagagagagagtggagaaccgaagggctttcatgaagctgcggcgccagcagcagattgagcgtgagctgaatggctaccgtgcctggatagacaaagcagaggaagtcatgctcgctgaagaaaataaaaatgctggaacatccgccttagaagtgcttcgaagggcaaccatcaagaggagccggacagaggccatgactcgagactccagtgatgagcactgtgttgatatctcctctgtgggcacacctctggcccgagccagtatcaaaagtgcaaaggtagacggggtctcttatttccggcacaaggaaaggcttctgcgcatctccattcgccacatggttaaatcccaggtgttttactggattgtgctgagccttgtggcactcaacactgcctgtgtggccattgtccatcacaaccagccccagtggctcacccacctcctctactatgcagaatttctgtttctgggactcttcctcttggagatgtccctgaagatgtatggcatggggcctcgcctttattttcactcttcattcaactgctttgattttggggtcacagtgggcagtatctttgaagtggtctgggcaatcttcagacctggtacgtcttttggaatcagtgtcttgcgagccctccggcttctaagaatatttaaaataaccaagtattgggcttccctacggaatttggtggtctccttgatgagctcaatgaagtctatcatcagtttgcttttcctcctcttcctcttcatcgttgtctttgctctcctaggaatgcagttatttggaggcaggtttaactttaatgatgggactccttcggcaaattttgataccttccctgcagccatcatgactgtgttccagatcctgacgggtgaggactggaatgaggtgatgtacaatgggatccgctcccagggtggggtcagctcaggcatgtggtctgccatctacttcattgtgctcaccttgtttggcaactacacgctactgaatgtgttcttggctatcgctgtggataatctcgccaacgcccaggaactgaccaaggatgaacaggaggaagaagaggccttcaaccagaaacatgcactgcagaaggccaaggaggtcagcccgatgtctgcacccaacatgccttcgatcgaaagagacagaaggagaagacaccacatgtcgatgtgggagccacgcagcagccacctgagggagcggaggcgccggcaccacatgtccgtgtgggagcagcgtaccagccagctgaggaagcacatgcagatgtccagccaggaggccctcaacagagaggaggcgccgaccatgaacccgctcaaccccctcaacccgctcagctccctcaacccgctcaatgcccaccccagcctttatcggcgacccagggccattgagggcctggccctgggcctggccctggagaagttcgaggaggagcgcatcagccgtggggggtccctcaagggggatggaggggaccgatccagtgccctggacaaccagaggacccctttgtccctgggccagcgggagccaccatggctggccaggccctgtcatggaaactgtgacccgactcagcaggaggcagggggaggagaggctgtggtgacctttgaggaccgggccaggcacaggcagagccaacggcgcagccggcatcgccgcgtcaggacagaaggcaaggagtcctcttcagcctcccggagcaggtctgccagccaggaacgcagtctggatgaagccatgcccactgaaggggagaaggaccatgagctcaggggcaaccatggtgccaaggagccaacgatccaagaagagagagcccaggatttaaggaggaccaacagtctgatggtgtccagaggctccgggctggcaggaggccttgatgaggctgacacccccctagtcctgccccatcctgagctggaagtggggaagcacgtggtgctgacggagcaggagccagaaggcagcagtgagcaggccctgctggggaatgtgcagctagacatgggccgggtcatcagccagagcgagcctgacctctcctgcatcacggccaacacggacaaggccaccaccgagagcaccagcgtcaccgtcgccatccccgacgtggaccccttggtggactcaaccgtggtgcacattagcaacaagacggatggggaagccagtcccttgaaggaggcagagatcagagaggatgaggaggaggtggagaagaagaagcagaagaaggagaagcgtgagacaggcaaagccatggtgccccacagctcaatgttcatcttcagcaccaccaacccgatccggagggcctgccactacatcgtgaacctgcgctactttgagatgtgcatcctcctggtgattgcagccagcagcatcgccctggcggcagaggaccccgtcctgaccaactcggagcgcaacaaagtcctgaggtattttgactatgtgttcacgggcgtgttcacctttgagatggttataaagatgatagaccaaggcttgatcctgcaggatgggtcctacttccgagacttgtggaacatcctggactttgtggtggtcgttggcgcattggtggcctttgctctggcgaacgctttgggaaccaacaaaggacgggacatcaagaccatcaagtctctgcgggtgctccgagttctaaggccactgaaaaccatcaagcgcttgcccaagctcaaggccgtcttcgactgcgtagtgacctccttgaagaatgtcttcaacatactcattgtgtacaagctcttcatgttcatctttgctgtcatcgcagttcagctcttcaagggaaagttcttttattgcacggacagttccaaggacacagagaaggagtgcataggcaactatgtagatcatgagaaaaacaagatggaggtgaagggccgggaatggaagcgccatgaattccactacgacaacattatctgggccctgctgaccctcttcaccgtctccacaggggaaggatggcctcaagttctgcagcactctgtagatgtgacagaggaagaccgaggcccaagccgcagcaaccgcatggagatgtctatcttttatgtagtctactttgtggtcttccccttcttctttgtcaatatctttgtggctctcatcatcatcaccttccaggagcaaggggataagatgatggaggagtgcagcctggagaagaatgagagggcgtgcatcgacttcgccatcagcgccaaacctctcacccgctacatgccgcagaacagacacaccttccagtaccgcgtgtggcactttgtggtgtctccgtcctttgagtacaccattatggccatgatcgccttgaatactgttgtgctgatgatgaagtattattctgctccctgtacctatgagctggccctgaagtacctgaatatcgccttcaccatggtgttttccctggaatgtgtcctgaaggtcatcgcttttggctttttgaactatttccgagacacctggaatatctttgacttcatcaccgtgattggcagtatcacagaaattatcctgacagacagcaagctggtgaacaccagtggcttcaatatgagctttctgaagctcttccgagctgcccgcctcataaagctcctgcgtcagggctataccatacgcattttgctgtggacctttgtgcagtcctttaaggccctcccttatgtctgccttttaattgccatgcttttcttcatttatgccatcattgggatgcaggtatttggaaacataaaattagacgaggagagtcacatcaaccggcacaacaacttccggagtttctttgggtccctaatgctactcttcaggagtgccacaggtgaggcctggcaggagattatgctgtcatgccttggggagaagggctgtgagcctgacaccaccgcaccatcagggcagaacgagaacgaacgctgcggcaccgatctggcctacgtgtactttgtctccttcatcttcttctgctccttcttgatgctcaacctgtttgtggccgtcatcatggacaactttgagtacctgactcgggactcctccatcctggggcctcaccacttggacgagtttgtccgcgtctgggcagaatatgaccgagcagcatgtggccgcatccattacactgagatgtatgaaatgctgactctcatgtcacctccgctaggcctcggcaagagatgtccctccaaagtggcatataagaggttggtcctgatgaacatgccagtagctgaggacatgacggtccacttcacctccacacttatggctctgatccggacagctctggacattaaaattgccaaaggtggtgcagacaggcagcagctagactcagagctacaaaaggagaccctagccatctggcctcacctatcccagaagatgctggatctgcttgtgcccatgcccaaagcctctgacctgactgtgggcaaaatctatgcagcaatgatgatcatggactactataagcagagtaaggtgaagaagcagaggcagcagctggaggaacagaaaaatgcccccatgttccagcgcatggagccttcatctctgcctcaggagatcattgctaatgccaaagccctgccttacctccagcaggaccccgtttcaggcctgagtggccggagtggatacccttcgatgagtccactctctccccaggatatattccagttggcttgtatggaccccgccgatgacggacagttccaagaacggcagtctctggagccagaggttagtgaattaaaaagcgtgcagccctctaaccatggcatctaccttccttcggacacccaggagcatgcgggatctgggagggcatcttctatgccacgtctgactgtggatccccaggtggtgacagaccctagctccatgagacgttcattttccactattcgggataagcgttcaaattcctcgtggttggaggaattctccatggagcgaagcagtgaaaatacctacaagtcccgtcgccggagttaccactcctccttgcggctgtcagcccaccgcctgaactctgattcaggccacaagtctgacactcaccgctcagggggcagggagcggggacgatcaaaagagcgaaagcatcttctctctcctgatgtctcccgctgcaattcagaagagcgagggacccaggctgactgggagtccccagagcgccgtcaatccaggtcacccagtgagggcaggtcacagacgcccaacagacagggcacaggttccctaagtgagagctccatcccctctgtctctgacaccagcaccccaagaagaagtcgtcggcagctcccacccgtcccgccaaagccccggcccctcctttcctacagctccctgattcgacacgcgggcagcatctctccacctgctgatggaagcgaggagggctccccgctgacctcccaagctctggagagcaacaatgcttgcctgaccgagtcttccaactctccgcacccccagcagagccaacatgcctccccacagcgctacatctccgagccctacttggccctgcacgaagactcccacgcctcagactgtggtgaggaggagacgctcactttcgaagcagccgtggctactagcctgggccgttccaacaccatcggctcagccccacccctgcggcatagctggcagatgcccaacgggcactatcggcggcggaggcgcggggggcctgggccaggcatgatgtgtggggctgtcaacaacctgctaagtgacacggaagaagatgacaaatgctagaggctgctcccccctccgatgcatgctcttctctcacatggagaaaaccaagacagaattgggaagccagtgcggcccgggggggaggaagagggaaaaggaagatggaaggacaccatgcatta

SEQ ID NO: 113231 - DNA, 1795 bp, Homo sapiens
  Payload ID: 2144
  Gene Symbol: CACNA1E
  Gene Name: calcium channel, voltage-dependent, R type, alpha 1E subunit
  ENST ID: ENST00000524607
  CDS Start-End: 481-1795
actccttgtctctgccctctccctcccacagagcaatgttctgtgatggtgcccgagatgcgtggactgagcccagaccgcaggctgcccgagcccgccccctgcccggctgcggggagccctgagcccaggtccgcgggccgccgccaacgccacgtcctggccctgccggaagaagaggcatggcggccccagcagtgcgctctgctcgaggccgacgcctcggacgaggtgggcatgctgccggcttccccgcgcgccgcctctggcttcgacaacttcttccaggtgcaggagggcgagggccagggctgggagggcgccatggcactggaggcgggctccagccctttcctgccggtgagccccgaggtcatgaagcggcggcgcgggggcctcatcgagcagcgcgacatcatcaaggcccacgaggcgcacaagatgcagagcaccccgcaggcccggcgcaaggaatgggagatggctcgcttcggggaggcggtggtcgccaggccagggtccggcgatggagactcggaccagagcaggaaccggcaaggaacccccgtgccggcctcggggcaggcggccgcctacaagcagacgaaagcacagagggcgcggactatggctttgtacaaccccattcccgtccggcagaactgtttcaccgtcaacagatccctgttcatcttcggagaagataacattgtcaggaaatatgccaagaagctcatcgattggccgccatttgagtacatgatcctggccaccatcattgccaactgcatcgtcctggccctggagcagcatcttcctgaggatgacaagacccccatgtcccgaagactggagaagacagaaccttatttcattgggatcttttgctttgaagctgggatcaaaattgtggccctggggttcatcttccataagggctcttacctccgcaatggctggaatgtcatggacttcatcgtggtcctcagtggcatcctggccactgcaggaacccacttcaatactcacgtggacctgaggaccctccgggctgtgcgtgtcctgcggcctttgaagctcgtgtcagggatacctagcctgcagattgtgttgaagtccatcatgaaggccatggtacctcttctgcagattggccttctgctcttctttgccatcctgatgtttgctatcattggtttggagttctacagtggcaagttacatcgagcatgcttcatgaacaattcaggtattctagaaggatttgacccccctcacccatgtggtgtgcagggctgcccagctggttatgaatgcaaggactggatcggccccaatgatgggatcacccagtttgataacatcctttttgctgtgctgactgtcttccagtgcatcaccatggaagggtggaccactgtgctgtacaataccaatgatgccttaggagccacctggaattggctgtacttcatccccctcatcatcattggatccttctttgttctcaacctagtcctgggagtgctttccggggaatttgccaaagagagagagagagtggagaaccgaagggctttcatgaagctgcggcgccagcagcagattgagcgtgagctgaatggctaccgtgcctggatagacaaagcagaggaagtcatgctcgctgaagaaaataaaaatgctggaacatccgccttagaagtgcttcgaagggcaaccatcaagaggagccggacagaggccatgactcgagactccagtgatgagcactgtgttgatatctcctctgtgg

SEQ ID NO: 113232 - DNA, 16171 bp, Homo sapiens
  Payload ID: 2144
  Gene Symbol: CACNA1E
  Gene Name: calcium channel, voltage-dependent, R type, alpha 1E subunit
  Uniprot ID: Q15878
  ENST ID: ENST00000621791
  CDS Start-End: 166-6921
gctgctgctgcctctccgaagagctcgcggagctccccagaggcggtggtccccgtgcttgtctggatgcggctctgagtctccgtgtgtctttctgcttgttgctgtgtgcgggtgttcggccgcgatcacctttgtgtgtcttctgtctgtttaaacctcaggatggctcgcttcggggaggcggtggtcgccaggccagggtccggcgatggagactcggaccagagcaggaaccggcaaggaacccccgtgccggcctcggggcaggcggccgcctacaagcagacgaaagcacagagggcgcggactatggctttgtacaaccccattcccgtccggcagaactgtttcaccgtcaacagatccctgttcatcttcggagaagataacattgtcaggaaatatgccaagaagctcatcgattggccgccatttgagtacatgatcctggccaccatcattgccaactgcatcgtcctggccctggagcagcatcttcctgaggatgacaagacccccatgtcccgaagactggagaagacagaaccttatttcattgggatcttttgctttgaagctgggatcaaaattgtggccctggggttcatcttccataagggctcttacctccgcaatggctggaatgtcatggacttcatcgtggtcctcagtggcatcctggccactgcaggaacccacttcaatactcacgtggacctgaggaccctccgggctgtgcgtgtcctgcggcctttgaagctcgtgtcagggatacctagcctgcagattgtgttgaagtccatcatgaaggccatggtacctcttctgcagattggccttctgctcttctttgccatcctgatgtttgctatcattggtttggagttctacagtggcaagttacatcgagcatgcttcatgaacaattcaggtattctagaaggatttgacccccctcacccatgtggtgtgcagggctgcccagctggttatgaatgcaaggactggatcggccccaatgatgggatcacccagtttgataacatcctttttgctgtgctgactgtcttccagtgcatcaccatggaagggtggaccactgtgctgtacaataccaatgatgccttaggagccacctggaattggctgtacttcatccccctcatcatcattggatccttctttgttctcaacctagtcctgggagtgctttccggggaatttgccaaagagagagagagagtggagaaccgaagggctttcatgaagctgcggcgccagcagcagattgagcgtgagctgaatggctaccgtgcctggatagacaaagcagaggaagtcatgctcgctgaagaaaataaaaatgctggaacatccgccttagaagtgcttcgaagggcaaccatcaagaggagccggacagaggccatgactcgagactccagtgatgagcactgtgttgatatctcctctgtgggcacacctctggcccgagccagtatcaaaagtgcaaaggtagacggggtctcttatttccggcacaaggaaaggcttctgcgcatctccattcgccacatggttaaatcccaggtgttttactggattgtgctgagccttgtggcactcaacactgcctgtgtggccattgtccatcacaaccagccccagtggctcacccacctcctctactatgcagaatttctgtttctgggactcttcctcttggagatgtccctgaagatgtatggcatggggcctcgcctttattttcactcttcattcaactgctttgattttggggtcacagtgggcagtatctttgaagtggtctgggcaatcttcagacctggtacgtcttttggaatcagtgtcttgcgagccctccggcttctaagaatatttaaaataaccaagtattgggcttccctacggaatttggtggtctccttgatgagctcaatgaagtctatcatcagtttgcttttcctcctcttcctcttcatcgttgtctttgctctcctaggaatgcagttatttggaggcaggtttaactttaatgatgggactccttcggcaaattttgataccttccctgcagccatcatgactgtgttccagatcctgacgggtgaggactggaatgaggtgatgtacaatgggatccgctcccagggtggggtcagctcaggcatgtggtctgccatctacttcattgtgctcaccttgtttggcaactacacgctactgaatgtgttcttggctatcgctgtggataatctcgccaacgcccaggaactgaccaaggatgaacaggaggaagaagaggccttcaaccagaaacatgcactgcagaaggccaaggaggtcagcccgatgtctgcacccaacatgccttcgatcgagagggagcggaggcgccggcaccacatgtccgtgtgggagcagcgtaccagccagctgaggaagcacatgcagatgtccagccaggaggccctcaacagagaggaggcgccgaccatgaacccgctcaaccccctcaacccgctcagctccctcaacccgctcaatgcccaccccagcctttatcggcgacccagggccattgagggcctggccctgggcctggccctggagaagttcgaggaggagcgcatcagccgtggggggtccctcaagggggatggaggggaccgatccagtgccctggacaaccagaggacccctttgtccctgggccagcgggagccaccatggctggccaggccctgtcatggaaactgtgacccgactcagcaggaggcagggggaggagaggctgtggtgacctttgaggaccgggccaggcacaggcagagccaacggcgcagccggcatcgccgcgtcaggacagaaggcaaggagtcctcttcagcctcccggagcaggtctgccagccaggaacgcagtctggatgaagccatgcccactgaaggggagaaggaccatgagctcaggggcaaccatggtgccaaggagccaacgatccaagaagagagagcccaggatttaaggaggaccaacagtctgatggtgtccagaggctccgggctggcaggaggccttgatgaggctgacacccccctagtcctgccccatcctgagctggaagtggggaagcacgtggtgctgacggagcaggagccagaaggcagcagtgagcaggccctgctggggaatgtgcagctagacatgggccgggtcatcagccagagcgagcctgacctctcctgcatcacggccaacacggacaaggccaccaccgagagcaccagcgtcaccgtcgccatccccgacgtggaccccttggtggactcaaccgtggtgcacattagcaacaagacggatggggaagccagtcccttgaaggaggcagagatcagagaggatgaggaggaggtggagaagaagaagcagaagaaggagaagcgtgagacaggcaaagccatggtgccccacagctcaatgttcatcttcagcaccaccaacccgatccggagggcctgccactacatcgtgaacctgcgctactttgagatgtgcatcctcctggtgattgcagccagcagcatcgccctggcggcagaggaccccgtcctgaccaactcggagcgcaacaaagtcctgaggtattttgactatgtgttcacgggcgtgttcacctttgagatggttataaagatgatagaccaaggcttgatcctgcaggatgggtcctacttccgagacttgtggaacatcctggactttgtggtggtcgttggcgcattggtggcctttgctctggcgaacgctttgggaaccaacaaaggacgggacatcaagaccatcaagtctctgcgggtgctccgagttctaaggccactgaaaaccatcaagcgcttgcccaagctcaaggccgtcttcgactgcgtagtgacctccttgaagaatgtcttcaacatactcattgtgtacaagctcttcatgttcatctttgctgtcatcgcagttcagctcttcaagggaaagttcttttattgcacggacagttccaaggacacagagaaggagtgcataggcaactatgtagatcatgagaaaaacaagatggaggtgaagggccgggaatggaagcgccatgaattccactacgacaacattatctgggccctgctgaccctcttcaccgtctccacaggggaaggatggcctcaagttctgcagcactctgtagatgtgacagaggaagaccgaggcccaagccgcagcaaccgcatggagatgtctatcttttatgtagtctactttgtggtcttccccttcttctttgtcaatatctttgtggctctcatcatcatcaccttccaggagcaaggggataagatgatggaggagtgcagcctggagaagaatgagagggcgtgcatcgacttcgccatcagcgccaaacctctcacccgctacatgccgcagaacagacacaccttccagtaccgcgtgtggcactttgtggtgtctccgtcctttgagtacaccattatggccatgatcgccttgaatactgttgtgctgatgatgaagtattattctgctccctgtacctatgagctggccctgaagtacctgaatatcgccttcaccatggtgttttccctggaatgtgtcctgaaggtcatcgcttttggctttttgaactatttccgagacacctggaatatctttgacttcatcaccgtgattggcagtatcacagaaattatcctgacagacagcaagctggtgaacaccagtggcttcaatatgagctttctgaagctcttccgagctgcccgcctcataaagctcctgcgtcagggctataccatacgcattttgctgtggacctttgtgcagtcctttaaggccctcccttatgtctgccttttaattgccatgcttttcttcatttatgccatcattgggatgcaggtatttggaaacataaaattagacgaggagagtcacatcaaccggcacaacaacttccggagtttctttgggtccctaatgctactcttcaggagtgccacaggtgaggcctggcaggagattatgctgtcatgccttggggagaagggctgtgagcctgacaccaccgcaccatcagggcagaacgagaacgaacgctgcggcaccgatctggcctacgtgtactttgtctccttcatcttcttctgctccttcttgatgctcaacctgtttgtggccgtcatcatggacaactttgagtacctgactcgggactcctccatcctggggcctcaccacttggacgagtttgtccgcgtctgggcagaatatgaccgagcagcatgtggccgcatccattacactgagatgtatgaaatgctgactctcatgtcacctccgctaggcctcggcaagagatgtccctccaaagtggcatataagaggttggtcctgatgaacatgccagtagctgaggacatgacggtccacttcacctccacacttatggctctgatccggacagctctggacattaaaattgccaaaggtggtgcagacaggcagcagctagactcagagctacaaaaggagaccctagccatctggcctcacctatcccagaagatgctggatctgcttgtgcccatgcccaaagcctctgacctgactgtgggcaaaatctatgcagcaatgatgatcatggactactataagcagagtaaggtgaagaagcagaggcagcagctggaggaacagaaaaatgcccccatgttccagcgcatggagccttcatctctgcctcaggagatcattgctaatgccaaagccctgccttacctccagcaggaccccgtttcaggcctgagtggccggagtggatacccttcgatgagtccactctctccccaggatatattccagttggcttgtatggaccccgccgatgacggacagttccaagaacggcagtctctggtggtgacagaccctagctccatgagacgttcattttccactattcgggataagcgttcaaattcctcgtggttggaggaattctccatggagcgaagcagtgaaaatacctacaagtcccgtcgccggagttaccactcctccttgcggctgtcagcccaccgcctgaactctgattcaggccacaagtctgacactcaccgctcagggggcagggagcggggacgatcaaaagagcgaaagcatcttctctctcctgatgtctcccgctgcaattcagaagagcgagggacccaggctgactgggagtccccagagcgccgtcaatccaggtcacccagtgagggcaggtcacagacgcccaacagacagggcacaggttccctaagtgagagctccatcccctctgtctctgacaccagcaccccaagaagaagtcgtcggcagctcccacccgtcccgccaaagccccggcccctcctttcctacagctccctgattcgacacgcgggcagcatctctccacctgctgatggaagcgaggagggctccccgctgacctcccaagctctggagagcaacaatgcttgcctgaccgagtcttccaactctccgcacccccagcagagccaacatgcctccccacagcgctacatctccgagccctacttggccctgcacgaagactcccacgcctcagactgtggtgaggaggagacgctcactttcgaagcagccgtggctactagcctgggccgttccaacaccatcggctcagccccacccctgcggcatagctggcagatgcccaacgggcactatcggcggcggaggcgcggggggcctgggccaggcatgatgtgtggggctgtcaacaacctgctaagtgacacggaagaagatgacaaatgctagaggctgctcccccctccgatgcatgctcttctctcacatggagaaaaccaagacagaattgggaagccagtgcggcccgggggggaggaagagggaaaaggaagatggaaggacaccatgcattatcagagaagaggaagtaaaggacaatcagaacaccagtcaaacccaccaaattgctttattcccctttgcaagatgggcactgccatagttctgcctctttgctggggaaagaaaccaggaacgtggagggttattactgcgggagaagggacacgaggatggctttgcttccccttgccccttcccacttttctaaaagctgtggagggatctagctggcctatgtctacactcagtgccctgagaagcctggaagactttctggctcttaactggggagtagtggagaccataggagaggactctcctccctcaccagctcttacgcctcagccagcaccactgccaccagggcaactgcagcagcatctcatgcataaccctgtggcttgcttcccccagggcagcacaggctaagtcaggaacatcggatgccagggagggaggagaaagccgaagcgaaaggggtcagggtgctgaggcaacagcagcaagggctggtctggacaagaaaagccatagcccggcagcccctaccatgagggagacagagaaacagaactggtggtgctggggggtatagccccccatccttgaggcctgtcacccacacagtaggtgctgagagttaggacaggtcaggaagtcccccagggtccacaaaggtgcctgaggctctggtaagggtgaagataaaagtatttaacaaccgctatggcatcaatgtaagtggagtttggtcctagtgccggagcccatgctattccaggcattggctctttagatgccagtcatgggggaaccctgagggtgtgggtagagtagcaggggccacctaagagattaaaaacagtctgttttccaaccagtgtggaagcaattaaatatgcgtaacagtgctacggccacaccagcacctcctggctgaaggtcagcccacactctggtccatgaggcagcaaggccagtgctgtgccaagcccggtaaggccaagtgccgaggcccagccttccctgccactcctctgagagggcagaacacacatatccaagtaggctacccaccactgggtagggatttctgtaaagatgggaaaggctgatagattgaaataagcttctgtgaaagtctggatttactgaggacctcccctgaggagggaccgttgggaccgcagattctgcagctggtgtggggttcaggtcagtttgtcaggatgctttaaggtgattagtaaatatacctcagcttagacttgggctgctccttctagcaaagcaggctccagtggggcctcatcatacaggatgacaagactggggccctgttcaccttgaacatgcccctgggccaagatggggcttcacccctccccagagtaagagctggggctgacagtcccaccctgtcattcctaatagcccaaacgcagaagcactgagcaagagagccctttcttgccaagccagtgctcttttggtatatggcatacagctccattggaggggacacatcactggctttatctggtggaaatgtacctttcccttaagttcctccttagtgccatcacagcaggtgaatgggtgccctacggggccctccttcccccaccaggaacagatggaacctgccacccaggatcctgatctgccctgcactgagcactcagtggataaacactcctccagcccagacacactcctcctcttgggcaggagcaatccagagttgttatttttcttagaaggagcctcttttccctctattttttaaattgaaatataatagctgcatcagccctgaaaagccaaattcaaccacatggctggagaatcatttgtcatggccccgccttctcttctgatactaatggagcttcatgacccacggtcagcccccaaaccaaagttgtcccaacagaggaggccagtgaggcagagacagagctctcccactctcagaccctcttttgtcttcattttcctctcccacttagcacatgtgtgcttgagggtggctgggaatgtgatatacagcaccctgatcctaacaggtgtgattgttacgtaagacgctgatactgggccttgtattgcttttaaagtttcctctgctcagcatcatttcatgccaaagtgctgctatgggctgctttgtgtgcacaaaattgctttttccacctcggaaatgcagctttccctagggggaggcctacaacaggacgaccattctgagccagtgagtctattgcatggtgttttgagaaagggaattttagtgacaccttatgccatttcaagaggagaaatgcaggctggcagagcaatttccagaaatggaatttgcctgcaaatagtataaacaacactaaatttactgtgccaggaaatcttcctgaactccttgaactcatacacacaggtatttgagtcctgaataaagtgttggaaagcactgcagatgcggtcacctgactgaccacctgggttttctattaccagtgaatttcttttattcaccttcccttgaccaagaaattgggtttcttttccctcagcctgcacttactcttctattaagaccagaaaataaaataattttccgttgagtcacaaactcatcatcttgtttggtgttctgctgcctctgaacaaaagtgaatgccagccttcccttgctgggtgtcagagtctgcctcccttgaaaagaggcccctgtagaccccaacacctattcttttctctggttaattacagcagcatctgagaaattccatgcaaaagaagactacaaccagtgtttcagatataccacaagatcaaatttgggcactggtggtccacctcagaagactcttgagtcatatattcagtttctcttgctaatatatgactcgtcttcaccatctcctcaaaacaagagcaaagccaagatagaggaaggtaaaaggaggaggaaaggaaaccaaggcagggagatgttctaagtaggtttgcatttagttacccctcatttcacttaaggctccagacagactccaggtagggaatgcatgctgtctctttctctgtgtctgtctccccatctcctagaggacagagtgccagcgacctctggacaggggcagggctccagccaaggtgcccctgagccagggtcaacatagaatttcctgccccgtgaagggctggcaccagctagcatccccttggctccacatgagtcatgaacacaattgtcagtgggggtctctgctgctcttctggctgaagaatctgtttttcttctgggcttcacttgtagttcctattcaatgtctccatagggcactgagatcaccaagaacattacccagaagctgaagtccaaatgttctagattttgacctctcttgactctggggccacaaagagaaggccccataatccacctctcagccagtatctcccttctttgcacagattcctcccaaccccatagagcctatgtggtgagcatgagggtcgtcttccctctgttctcccatcccagcctctgttttgctgcatgttagcgctgatccagctcctgagatggttaattccacccaatccaagcttatttgcttgcctgactgactccaccactctctcagctatgggggaatattgcattctaatgaaatagggtttggaactcacctggtgctcctcgcaagacaactgacacaaggtgtagggtgtgggggtggacaaaatgcccacctactggataaaagctcactgcaggaaaatgaggtctcctggcataatgcaacaaaaatctcatataattttgatttttaaaaagttgttctcaatttttcattacatcctacttctcagccctctggatgtttcatttttttggacaaagtgtttctttagtggttggggccagggacaggttgagggatatttctcggctcatttataagatataaatattatgaggttgtatgtaaagaaagggcaaacgtacagcagaaggggagcaaatagctacctttcaaggattttgagatttgaaggttaaggaatttttactgctatttttgttcatcagtttcatgtctgttatgttttgagatcctcagaggcctagggttagcgtataccaagaatcctggtgagaggcgttgccatgccttggggtgaattcttccccactagctctctcacccagcctacaagtccttctctcatagatcccagagcaatgggcaccgtccaggaggtacaggagaggactttatgatgcaggaaagaaggaagaagtgggtcccttgcaagtggccagacagggaatgatggtttgactccagaaatcaggaatcaggttcaggtttggataacttctctttaaaatatctccacattgagactcttattttaacaaaatccaaacaaaattaactcagggcttgtgacctaacctttgtaagaaggtgatcaaagagatcctacattaataagcactgcctgtagcaccagctttgtctttttgtcttttgttgtttctttcctgaaccaccctgtacatcatagccaggtctaccccaaatagagcagcagctgatggcttctctgctgtctgtggagggagggctcggctgcagacctatggtgttttgtcagctgttaggtgctacagcccacccagtcagagtacatagacatagcgctttaagggacaaaggacaaacagaactatctttgctttccggaggccatctttttctttccttgaatcctttctgctttaaacttctgaggtttatgcatcccagagaggtcacaccaagccaaagagaaaaaattcatagattgtcccagcctacccaaagggcctgaaaagcctctctaaacaaaactcaagatagctgagaagtatgaatggggttcacagcaaagtccaattgatggcttttgaggctgggacacccccaaactgcccttctgtttttgtagttttgctttcttccacccaccctctctccgcatgctgtaagttaggggagttagtatcttgaacttctaaatgcaaaaggagattttataataagccatgctacctgtaaatacattattgaggtttgcatttttatttttggaggtatgaaagagttgagtagaccaagtcaaaagaggtgtggggatttatgtttatttttatttgtttggggttgtttggttggtggctgggtttcttgtaacagacctattctggaatagcaaagaaggataccttggtgatctgcaatgtttctgaatctgtttctctttaggaagtgattgccatcaaatttagtgatatgatatttgagtcaaaaatctgaggttatagtaccagctgtcttttctctctggtctcctttttgtcgtctttctctttctgtctaaattggcctctgtcttttcctaaggacttaaaatataacccaaattaatgaagaactgccccaaaacttcagtgaaagccaaggaggtacagaattttttcaggacatctttaaccaatacaaaatttatgtcttaagaagataatttttacaatagtgtagtaatctgataaatgaaaactattggaagtcaatagttttttatattccagctttctgtattcaaacttgtgccttcagcaagcatctcttcactttctttcccttgtcaattgaaacatgaatgtttggctaactcatgatgtaaagtgtctgttaagttaataatacataatttaaagcacttagtctccacaaagcaatttagaaaaatcttcacttgttagatcccatgaagtacctatgaaattctcagcattgctataagcatttgattttttttaaggaaacttcctgtttaatggaatctgaatccaagatttgctttaatttcactctattcttcccattttcccttattcttcttgttgtctctctaattaaaaaaaaaaaaaacctaggcttttttttttctatccagaaagttgggttttcatgatctgagcttccttatgtctccttctctttgtgcaaacttaaaccagtcatagattgtcacccagacatattctccaacccagcattggaaatctgaacgaatcttttctctttttgtcctacaagtttgtcagagatgagaatggattgctgtctacattctacaaccagaccctagactttataccaggctgtgccacttcctcttcacttcactcagaggatggccccaaaactgaaaaggaaatgaaataatcaaatataccaaatccgaatttgactttatttgatgactcaatattttccttccagtactctaatttttttttatggcaatggcctatatggcacaagaaccaccacttaaagcaaatctgttgaacatttttataagggatgagcaagaaaaacacactccaaaattttaaagtgccattaatcaatttttaagaataaaggtaatatgaaatgagggctaaacaatgtaatataactgccagttaaggtagacagtagttgtggtcttagttacatttgatatggagttgtgtaatattaagcagatcccagtggagttagtaaaaacataggtattgagttttaatggctaccaattgggatatatacttagcctgcaggctgaactttagtcagtgtttttctatcatgttgttttgtgaacaagtcaaaatttatacaaagctaccctaagtgctgcaattgcagaggaacttgcctcttcgtgatattagagggcagtccaactccgctcaaactgagtccaagatttgaattcatccagaaaaacaaatggaggagaaaagcctaatgcaccacatgtgtttggcatttcatggctgggacaatggagtagagggtaggaagacaagctgtagaacaaaagcaaagtgaggtagaaagtaacaggtcccagacgaggacagacttagagatgtgtaaccttggatcctctttttcacttagaatatgggtaaacttcttagcacaagactggattaagagaagttctttctgttaaactcacctagggtagtggctttgaaggcctcagaggattaatagattcccaaaattttcttccagacctgggagatggagagaaagaggttcttgctttaaagcggctcgaagacaatctttatgacttcagcaactcttcaacatagtagcaccaataaaggagagattatgttaacttcctagtggtgagaataccatgggatgggagaagggccagtgagtgggatgggaatgagcttcatcaggaacagatttcagactctgcagggtgcaccggttctagcctcaaataacaacattgcaaggaggtggactacagggtccacaccctctgtccttcggggcccatggtcaggccattccctctttgttttgctcctagaggatgagcatgtaagatgagatcaggagggaaattgggtgctctgcctcaggctgttaaaatgctgctacctgcattctaaaacgtgcaagtcatgccccacaagacacctccttagggcagcatccactgtggtgtgccagcctgacacccctgcagtcacggtgtttgaatggcagctgatgctggcccacccagagtatcggtgcatctctcctaaagccacagttcagcactgcatgttgaccaggcggatatcctataatatagatgctcgtttggatccaaaaggaaaaccattaaaaataaaagaaagatgaaaaactttaatgttttgggggggataaaagaaaagaataaataaaaccttgttgtaaagaatgcatcggcctgatttccctcacttgatgtgtttctttgctgctaccagaaagggaaatcatgggagtgaagcctgccaggaccctcagggtaagctggcagcaggctctgcagctgcacttagttggggtctgctcagaccagtcaggaggaattcaggaggctttcaaagtcccaaggacatcctggctctgaaaggttttcttttgttaaaaaatgcactttgtgctgtgtgtggtagctcgtatgtgttaccccagctattcaggaagctagggcagaaggattgcttgaggctaggaattcaagactggcctggatgacagagtgaaaccctcatctcttaaaaaaaaaaaaaaggaataaaaatgttctctgccttggataacatttttttttaaagattccatacaaactcattccctgaaagagaaaaacagattttctaatcaggacattgtcctgatctgcaagcgaggagtttaacaaggtaggcagagaacttccttatggaacaacagggctctgtgaccagaaaaactatgaccagcctcctctgaaaaaaggtggggggattatagggcaccagctcagccgccaagttcaggaagcagctgattcccaagactcttaggagatactgtccattcttcctcctgtccacatcactccccatttaactgcaattgctcccttgccacagggaaagcagcaagccccaggcccaggcctccatttgatttgccactccgagaactgtctgcttcattctgcttgaggagatatcttcacctaatcctagtgttaattattttaatctgagcaacgcttttatcaattagatagaaaccagcattccaaaataagtcccctaagtttgtagtttgagccaagatattttcttgagccctaagatatatgactttattagctaggatttttcttatgattaaaaacatccaaaaatgtgatatgtggtcatctctcagggaggtctaggtccttgcaggctggattttagaaatttctaagattctctacaacttttaaattttatgttatttttcaatcataatttctttcctgtggcttctatcaccattggagttagaatctgacaacctttaacttcacacttttatgagataataagttggtttcttgggcaaaggttggtttgtaagccatttacatggattgatgatttctgttcttgttttcttctaacctagaactcaggtccacagttttccacaggctaatggcactatgaaacagatataaagaaaaatagacactg

SEQ ID NO: 113233 - DNA, 14886 bp, Homo sapiens
  Payload ID: 2144
  Gene Symbol: CACNA1E
  Gene Name: calcium channel, voltage-dependent, R type, alpha 1E subunit
  Uniprot ID: Q15878
  ENST ID: ENST00000621551
  CDS Start-End: 1-6942
atggctcgcttcggggaggcggtggtcgccaggccagggtccggcgatggagactcggaccagagcaggaaccggcaaggaacccccgtgccggcctcggggcaggcggccgcctacaagcagacgaaagcacagagggcgcggactatggctttgtacaaccccattcccgtccggcagaactgtttcaccgtcaacagatccctgttcatcttcggagaagataacattgtcaggaaatatgccaagaagctcatcgattggccaccatttgagtacatgatcctggccaccatcattgccaactgcatcgtcctggccctggagcagcatcttcctgaggatgacaagacccccatgtcccgaagactggagaagacagaaccttatttcattgggatcttttgctttgaagctgggatcaaaattgtggccctggggttcatcttccataagggctcttacctccgcaatggctggaatgtcatggacttcatcgtggtcctcagtggcatcctggccactgcaggaacccacttcaatactcacgtggacctgaggaccctccgggctgtgcgtgtcctgcggcctttgaagctcgtgtcagggatacctagcctgcagattgtgttgaagtccatcatgaaggccatggtacctcttctgcagattggccttctgctcttctttgccatcctgatgtttgctatcattggtttggagttctacagtggcaagttacatcgagcatgcttcatgaacaattcaggtattctagaaggatttgacccccctcacccatgtggtgtgcagggctgcccagctggttatgaatgcaaggactggatcggccccaatgatgggatcacccagtttgataacatcctttttgctgtgctgactgtcttccagtgcatcaccatggaagggtggaccactgtgctgtacaataccaatgatgccttaggagccacctggaattggctgtacttcatccccctcatcatcattggatccttctttgttctcaacctagtcctgggagtgctttccggggaatttgccaaagagagagagagagtggagaaccgaagggctttcatgaagctgcggcgccagcagcagattgagcgtgagctgaatggctaccgtgcctggatagacaaagcagaggaagtcatgctcgctgaagaaaataaaaatgctggaacatccgccttagaagtgcttcgaagggcaaccatcaagaggagccggacagaggccatgactcgagactccagtgatgagcactgtgttgatatctcctctgtgggcacacctctggcccgagccagtatcaaaagtgcaaaggtagacggggtctcttatttccggcacaaggaaaggcttctgcgcatctccattcgccacatggttaaatcccaggtgttttactggattgtgctgagccttgtggcactcaacactgcctgtgtggccattgtccatcacaaccagccccagtggctcacccacctcctctactatgcagaatttctgtttctgggactcttcctcttggagatgtccctgaagatgtatggcatggggcctcgcctttattttcactcttcattcaactgctttgattttggggtcacagtgggcagtatctttgaagtggtctgggcaatcttcagacctggtacgtcttttggaatcagtgtcttgcgagccctccggcttctaagaatatttaaaataaccaagtattgggcttccctacggaatttggtggtctccttgatgagctcaatgaagtctatcatcagtttgcttttcctcctcttcctcttcatcgttgtctttgctctcctaggaatgcagttatttggaggcaggtttaactttaatgatgggactccttcggcaaattttgataccttccctgcagccatcatgactgtgttccagatcctgacgggtgaggactggaatgaggtgatgtacaatgggatccgctcccagggtggggtcagctcaggcatgtggtctgccatctacttcattgtgctcaccttgtttggcaactacacgctactgaatgtgttcttggctatcgctgtggataatctcgccaacgcccaggaactgaccaaggatgaacaggaggaagaagaggccttcaaccagaaacatgcactgcagaaggccaaggaggtcagcccgatgtctgcacccaacatgccttcgatcgaaagagacagaaggagaagacaccacatgtcgatgtgggagccacgcagcagccacctgagggagcggaggcgccggcaccacatgtccgtgtgggagcagcgtaccagccagctgaggaagcacatgcagatgtccagccaggaggccctcaacagagaggaggcgccgaccatgaacccgctcaaccccctcaacccgctcagctccctcaacccgctcaatgcccaccccagcctttatcggcgacccagggccattgagggcctggccctgggcctggccctggagaagttcgaggaggagcgcatcagccgtggggggtccctcaagggggatggaggggaccgatccagtgccctggacaaccagaggacccctttgtccctgggccagcgggagccaccatggctggccaggccctgtcatggaaactgtgacccgactcagcaggaggcagggggaggagaggctgtggtgacctttgaggaccgggccaggcacaggcagagccaacggcgcagccggcatcgccgcgtcaggacagaaggcaaggagtcctcttcagcctcccggagcaggtctgccagccaggaacgcagtctggatgaagccatgcccactgaaggggagaaggaccatgagctcaggggcaaccatggtgccaaggagccaacgatccaagaagagagagcccaggatttaaggaggaccaacagtctgatggtgtccagaggctccgggctggcaggaggccttgatgaggctgacacccccctagtcctgccccatcctgagctggaagtggggaagcacgtggtgctgacggagcaggagccagaaggcagcagtgagcaggccctgctggggaatgtgcagctagacatgggccgggtcatcagccagagcgagcctgacctctcctgcatcacggccaacacggacaaggccaccaccgagagcaccagcgtcaccgtcgccatccccgacgtggaccccttggtggactcaaccgtggtgcacattagcaacaagacggatggggaagccagtcccttgaaggaggcagagatcagagaggatgaggaggaggtggagaagaagaagcagaagaaggagaagcgtgagacaggcaaagccatggtgccccacagctcaatgttcatcttcagcaccaccaacccgatccggagggcctgccactacatcgtgaacctgcgctactttgagatgtgcatcctcctggtgattgcagccagcagcatcgccctggcggcagaggaccccgtcctgaccaactcggagcgcaacaaagtcctgaggtattttgactatgtgttcacgggcgtgttcacctttgagatggttataaagatgatagaccaaggcttgatcctgcaggatgggtcctacttccgagacttgtggaacatcctggactttgtggtggtcgttggcgcattggtggcctttgctctggcgaacgctttgggaaccaacaaaggacgggacatcaagaccatcaagtctctgcgggtgctccgagttctaaggccactgaaaaccatcaagcgcttgcccaagctcaaggccgtcttcgactgcgtagtgacctccttgaagaatgtcttcaacatactcattgtgtacaagctcttcatgttcatctttgctgtcatcgcagttcagctcttcaagggaaagttcttttattgcacggacagttccaaggacacagagaaggagtgcataggcaactatgtagatcatgagaaaaacaagatggaggtgaagggccgggaatggaagcgccatgaattccactacgacaacattatctgggccctgctgaccctcttcaccgtctccacaggggaaggatggcctcaagttctgcagcactctgtagatgtgacagaggaagaccgaggcccaagccgcagcaaccgcatggagatgtctatcttttatgtagtctactttgtggtcttccccttcttctttgtcaatatctttgtggctctcatcatcatcaccttccaggagcaaggggataagatgatggaggagtgcagcctggagaagaatgagagggcgtgcatcgacttcgccatcagcgccaaacctctcacccgctacatgccgcagaacagacacaccttccagtaccgcgtgtggcactttgtggtgtctccgtcctttgagtacaccattatggccatgatcgccttgaatactgttgtgctgatgatgaagtattattctgctccctgtacctatgagctggccctgaagtacctgaatatcgccttcaccatggtgttttccctggaatgtgtcctgaaggtcatcgcttttggctttttgaactatttccgagacacctggaatatctttgacttcatcaccgtgattggcagtatcacagaaattatcctgacagacagcaagctggtgaacaccagtggcttcaatatgagctttctgaagctcttccgagctgcccgcctcataaagctcctgcgtcagggctataccatacgcattttgctgtggacctttgtgcagtcctttaaggccctcccttatgtctgccttttaattgccatgcttttcttcatttatgccatcattgggatgcaggtatttggaaacataaaattagacgaggagagtcacatcaaccggcacaacaacttccggagtttctttgggtccctaatgctactcttcaggagtgccacaggtgaggcctggcaggagattatgctgtcatgccttggggagaagggctgtgagcctgacaccaccgcaccatcagggcagaacgagaacgaacgctgcggcaccgatctggcctacgtgtactttgtctccttcatcttcttctgctccttcttgatgctcaacctgtttgtggccgtcatcatggacaactttgagtacctgactcgggactcctccatcctggggcctcaccacttggacgagtttgtccgcgtctgggcagaatatgaccgagcagcatgtggccgcatccattacactgagatgtatgaaatgctgactctcatgtcacctccgctaggcctcggcaagagatgtccctccaaagtggcatataagaggttggtcctgatgaacatgccagtagctgaggacatgacggtccacttcacctccacacttatggctctgatccggacagctctggacattaaaattgccaaaggtggtgcagacaggcagcagctagactcagagctacaaaaggagaccctagccatctggcctcacctatcccagaagatgctggatctgcttgtgcccatgcccaaagcctctgacctgactgtgggcaaaatctatgcagcaatgatgatcatggactactataagcagagtaaggtgaagaagcagaggcagcagctggaggaacagaaaaatgcccccatgttccagcgcatggagccttcatctctgcctcaggagatcattgctaatgccaaagccctgccttacctccagcaggaccccgtttcaggcctgagtggccggagtggatacccttcgatgagtccactctctccccaggatatattccagttggcttgtatggaccccgccgatgacggacagttccaagaacggcagtctctggagccagaggttagtgaattaaaaagcgtgcagccctctaaccatggcatctaccttccttcggacacccaggagcatgcgggatctgggagggcatcttctatgccacgtctgactgtggatccccaggtggtgacagaccctagctccatgagacgttcattttccactattcgggataagcgttcaaattcctcgtggttggaggaattctccatggagcgaagcagtgaaaatacctacaagtcccgtcgccggagttaccactcctccttgcggctgtcagcccaccgcctgaactctgattcaggccacaagtctgacactcaccgctcagggggcagggagcggggacgatcaaaagagcgaaagcatcttctctctcctgatgtctcccgctgcaattcagaagagcgagggacccaggctgactgggagtccccagagcgccgtcaatccaggtcacccagtgagggcaggtcacagacgcccaacagacagggcacaggttccctaagtgagagctccatcccctctgtctctgacaccagcaccccaagaagaagtcgtcggcagctcccacccgtcccgccaaagccccggcccctcctttcctacagctccctgattcgacacgcgggcagcatctctccacctgctgatggaagcgaggagggctccccgctgacctcccaagctctggagagcaacaatgcttgcctgaccgagtcttccaactctccgcacccccagcagagccaacatgcctccccacagcgctacatctccgagccctacttggccctgcacgaagactcccacgcctcagactgtggtgaggaggagacgctcactttcgaagcagccgtggctactagcctgggccgttccaacaccatcggctcagccccacccctgcggcatagctggcagatgcccaacgggcactatcggcggcggaggcgcggggggcctgggccaggcatgatgtgtggggctgtcaacaacctgctaagtgacacggaagaagatgacaaatgctagaggctgctcccccctccgatgcatgctcttctctcacatggagaaaaccaagacagaattgggaagccagtgcggcccgggggggaggaagagggaaaaggaagatggaaggacaccatgcattatcagagaagaggaagtaaaggacaatcagaacaccagtcaaacccaccaaattgctttattcccctttgcaagatgggcactgccatagttctgcctctttgctggggaaagaaaccaggaacgtggagggttattactgcgggagaagggacacgaggatggctttgcttccccttgccccttcccacttttctaaaagctgtggagggatctagctggcctatgtctacactcagtgccctgagaagcctggaagactttctggctcttaactggggagtagtggagaccataggagaggactctcctccctcaccagctcttacgcctcagccagcaccactgccaccagggcaactgcagcagcatctcatgcataaccctgtggcttgcttcccccagggcagcacaggctaagtcaggaacatcggatgccagggagggaggagaaagccgaagcgaaaggggtcagggtgctgaggcaacagcagcaagggctggtctggacaagaaaagccatagcccggcagcccctaccatgagggagacagagaaacagaactggtggtgctggggggtatagccccccatccttgaggcctgtcacccacacagtaggtgctgagagttaggacaggtcaggaagtcccccagggtccacaaaggtgcctgaggctctggtaagggtgaagataaaagtatttaacaaccgctatggcatcaatgtaagtggagtttggtcctagtgccggagcccatgctattccaggcattggctctttagatgccagtcatgggggaaccctgagggtgtgggtagagtagcaggggccacctaagagattaaaaacagtctgttttccaaccagtgtggaagcaattaaatatgcgtaacagtgctacggccacaccagcacctcctggctgaaggtcagcccacactctggtccatgaggcagcaaggccagtgctgtgccaagcccggtaaggccaagtgccgaggcccagccttccctgccactcctctgagagggcagaacacacatatccaagtaggctacccaccactgggtagggatttctgtaaagatgggaaaggctgatagattgaaataagcttctgtgaaagtctggatttactgaggacctcccctgaggagggaccgttgggaccgcagattctgcagctggtgtggggttcaggtcagtttgtcaggatgctttaaggtgattagtaaatatacctcagcttagacttgggctgctccttctagcaaagcaggctccagtggggcctcatcatacaggatgacaagactggggccctgttcaccttgaacatgcccctgggccaagatggggcttcacccctccccagagtaagagctggggctgacagtcccaccctgtcattcctaatagcccaaacgcagaagcactgagcaagagagccctttcttgccaagccagtgctcttttggtatatggcatacagctccattggaggggacacatcactggctttatctggtggaaatgtacctttcccttaagttcctccttagtgccatcacagcaggtgaatgggtgccctacggggccctccttcccccaccaggaacagatggaacctgccacccaggatcctgatctgccctgcactgagcactcagtggataaacactcctccagcccagacacactcctcctcttgggcaggagcaatccagagttgttatttttcttagaaggagcctcttttccctctattttttaaattgaaatataatagctgcatcagccctgaaaagccaaattcaaccacatggctggagaatcatttgtcatggccccgccttctcttctgatactaatggagcttcatgacccacggtcagcccccaaaccaaagttgtcccaacagaggaggccagtgaggcagagacagagctctcccactctcagaccctcttttgtcttcattttcctctcccacttagcacatgtgtgcttgagggtggctgggaatgtgatatacagcaccctgatcctaacaggtgtgattgttacgtaagacgctgatactgggccttgtattgcttttaaagtttcctctgctcagcatcatttcatgccaaagtgctgctatgggctgctttgtgtgcacaaaattgctttttccacctcggaaatgcagctttccctagggggaggcctacaacaggacgaccattctgagccagtgagtctattgcatggtgttttgagaaagggaattttagtgacaccttatgccatttcaagaggagaaatgcaggctggcagagcaatttccagaaatggaatttgcctgcaaatagtataaacaacactaaatttactgtgccaggaaatcttcctgaactccttgaactcatacacacaggtatttgagtcctgaataaagtgttggaaagcactgcagatgcggtcacctgactgaccacctgggttttctattaccagtgaatttcttttattcaccttcccttgaccaagaaattgggtttcttttccctcagcctgcacttactcttctattaagaccagaaaataaaataattttccgttgagtcacaaactcatcatcttgtttggtgttctgctgcctctgaacaaaagtgaatgccagccttcccttgctgggtgtcagagtctgcctcccttgaaaagaggcccctgtagaccccaacacctattcttttctctggttaattacagcagcatctgagaaattccatgcaaaagaagactacaaccagtgtttcagatataccacaagatcaaatttgggcactggtggtccacctcagaagactcttgagtcatatattcagtttctcttgctaatatatgactcgtcttcaccatctcctcaaaacaagagcaaagccaagatagaggaaggtaaaaggaggaggaaaggaaaccaaggcagggagatgttctaagtaggtttgcatttagttacccctcatttcacttaaggctccagacagactccaggtagggaatgcatgctgtctctttctctgtgtctgtctccccatctcctagaggacagagtgccagcgacctctggacaggggcagggctccagccaaggtgcccctgagccagggtcaacatagaatttcctgccccgtgaagggctggcaccagctagcatccccttggctccacatgagtcatgaacacaattgtcagtgggggtctctgctgctcttctggctgaagaatctgtttttcttctgggcttcacttgtagttcctattcaatgtctccatagggcactgagatcaccaagaacattacccagaagctgaagtccaaatgttctagattttgacctctcttgactctggggccacaaagagaaggccccataatccacctctcagccagtatctcccttctttgcacagattcctcccaaccccatagagcctatgtggtgagcatgagggtcgtcttccctctgttctcccatcccagcctctgttttgctgcatgttagcgctgatccagctcctgagatggttaattccacccaatccaagcttatttgcttgcctgactgactccaccactctctcagctatgggggaatattgcattctaatgaaatagggtttggaactcacctggtgctcctcgcaagacaactgacacaaggtgtagggtgtgggggtggacaaaatgcccacctactggataaaagctcactgcaggaaaatgaggtctcctggcataatgcaacaaaaatctcatataattttgatttttaaaaagttgttctcaatttttcattacatcctacttctcagccctctggatgtttcatttttttggacaaagtgtttctttagtggttggggccagggacaggttgagggatatttctcggctcatttataagatataaatattatgaggttgtatgtaaagaaagggcaaacgtacagcagaaggggagcaaatagctacctttcaaggattttgagatttgaaggttaaggaatttttactgctatttttgttcatcagtttcatgtctgttatgttttgagatcctcagaggcctagggttagcgtataccaagaatcctggtgagaggcgttgccatgccttggggtgaattcttccccactagctctctcacccagcctacaagtccttctctcatagatcccagagcaatgggcaccgtccaggaggtacaggagaggactttatgatgcaggaaagaaggaagaagtgggtcccttgcaagtggccagacagggaatgatggtttgactccagaaatcaggaatcaggttcaggtttggataacttctctttaaaatatctccacattgagactcttattttaacaaaatccaaacaaaattaactcagggcttgtgacctaacctttgtaagaaggtgatcaaagagatcctacattaataagcactgcctgtagcaccagctttgtctttttgtcttttgttgtttctttcctgaaccaccctgtacatcatagccaggtctaccccaaatagagcagcagctgatggcttctctgctgtctgtggagggagggctcggctgcagacctatggtgttttgtcagctgttaggtgctacagcccacccagtcagagtacatagacatagcgctttaagggacaaaggacaaacagaactatctttgctttccggaggccatctttttctttccttgaatcctttctgctttaaacttctgaggtttatgcatcccagagaggtcacaccaagccaaagagaaaaaattcatagattgtcccagcctacccaaagggcctgaaaagcctctctaaacaaaactcaagatagctgagaagtatgaatggggttcacagcaaagtccaattgatggcttttgaggctgggacacccccaaactgcccttctgtttttgtagttttgctttcttccacccaccctctctccgcatgctgtaagttaggggagttagtatcttgaacttctaaatgcaaaaggagattttataataagccatgctacctgtaaatacattattgaggtttgcatttttatttttggaggtatgaaagagttgagtagaccaagtcaaaagaggtgtggggatttatgtttatttttatttgtttggggttgtttggttggtggctgggtttcttgtaacagacctattctggaatagcaaagaaggataccttggtgatctgcaatgtttctgaatctgtttctctttaggaagtgattgccatcaaatttagtgatatgatatttgagtcaaaaatctgaggttatagtaccagctgtcttttctctctggtctcctttttgtcgtctttctctttctgtctaaattggcctctgtcttttcctaaggacttaaaatataacccaaattaatgaagaactgccccaaaacttcagtgaaagccaaggaggtacagaattttttcaggacatctttaaccaatacaaaatttatgtcttaagaagataatttttacaatagtgtagtaatctgataaatgaaaactattggaagtcaatagttttttatattccagctttctgtattcaaacttgtgccttcagcaagcatctcttcactttctttcccttgtcaattgaaacatgaatgtttggctaactcatgatgtaaagtgtctgttaagttaataatacataatttaaagcacttagtctccacaaagcaatttagaaaaatcttcacttgttagatcccatgaagtacctatgaaattctcagcattgctataagcatttgattttttttaaggaaacttcctgtttaatggaatctgaatccaagatttgctttaatttcactctattcttcccattttcccttattcttcttgttgtctctctaattaaaaaaaaaaaaaacctaggcttttttttttctatccagaaagttgggttttcatgatctgagcttccttatgtctccttctctttgtgcaaacttaaaccagtcatagattgtcacccagacatattctccaacccagcattggaaatctgaacgaatcttttctctttttgtcctacaagtttgtcagagatgagaatggattgctgtctacattctacaaccagaccctagactttataccaggctgtgccacttcctcttcacttcactcagaggatggccccaaaactgaaaaggaaatgaaataatcaaatataccaaatccgaatttgactttatttgatgactcaatattttccttccagtactctaatttttttttatggcaatggcctatatggcacaagaaccaccacttaaagcaaatctgttgaacatttttataagggatgagcaagaaaaacacactccaaaattttaaagtgccattaatcaatttttaagaataaaggtaatatgaaatgagggctaaacaatgtaatataactgccagttaaggtagacagtagttgtggtcttagttacatttgatatggagttgtgtaatattaagcagatcccagtggagttagtaaaaacataggtattgagttttaatggctaccaattgggatatatacttagcctgcaggctgaactttagtcagtgtttttctatcatgttgttttgtgaacaagtcaaaatttatacaaagctaccctaagtgctgcaattgcagaggaacttgcctcttcgtgatattagagggcagtccaactccgctcaaactgagtccaagatttgaattcatccagaaaaacaaatggaggagaaaagcctaatgcaccacatgtgtttggcatttcatggctgggacaatggagtagagggtaggaagacaagctgtagaacaaaagcaaagtgaggtagaaagtaacaggtcccagacgaggacagacttagagatgtgtaaccttggatcctctttttcacttagaatatgggtaaacttcttagcacaagactggattaagagaagttctttctgttaaactcacctagggtagtggctttgaaggcctcagaggattaatagattcccaaaattttcttccagacctgggagatggagagaaagaggttcttgctttaaagcggctcgaagacaatctttatgacttcagcaactcttcaacatagtagcaccaataaaggagagattatgttaacttcctagtggtgagaataccatgggatgggagaagggccagtgagtgggatgggaatgagcttcatcaggaacagatttcagactctgcagggtgcaccggttctagcctcaaataacaacattgcaaggaggtggactacagggtccacaccctctgtccttcggggcccatggtcaggccattccctctttgttttgctcctagaggatgagcatgtaagatgagatcaggagggaaattgggtgctctgcctcaggctgttaaaatgctgctacctgcattctaaaacgtgcaagtcatgccccacaagacacctccttagggcagcatccactgtggtgtgccagcctgacacccctgcagtcacggtgtttgaatggcagctgatgctggcccacccagagtatcggtgcatctctcctaaagccacagttcagcactgcatgttgaccaggcggatatcctataatatagatgctcgtttggatccaaaaggaaaaccattaaaaataaaagaaagatgaaaaactttaatgttttgggggggataaaagaaaagaataaataaaaccttgttgt

SEQ ID NO: 113234 - DNA, 7848 bp, Homo sapiens
  Payload ID: 2145
  Gene Symbol: CACNA1G
  Gene Name: calcium channel, voltage-dependent, T type, alpha 1G subunit
  Uniprot ID: O43497
  ENST ID: ENST00000352832
  CDS Start-End: 373-7125
ccttttcgttcgccctctcggggcggcttcgccgaaggtagcgccgaatccggcaaccggagcctgggcgcgaagcgaagaagccggaacaaagtgagggggagccggccggctggcccgggaagccccaggggcgcaggggaagcgggactcgcgccgggcggggtttccctgcgccccggcgccccgcgggcagcatgcccctgcgggcagggggagctgggctgaactggccctcccgggggctcagcttgcgccctagagcccaccagatgtgcccccgccggggcccccgggttgcgtgaggacacctcctctgaggggcgccgcttgcccctctccggatcgcccggggccccggctggccagaggatggacgaggaggaggatggagcgggcgccgaggagtcgggacagccccggagcttcatgcggctcaacgacctgtcgggggccgggggccggccggggccggggtcagcagaaaaggacccgggcagcgcggactccgaggcggaggggctgccgtacccggcgctggccccggtggttttcttctacttgagccaggacagccgcccgcggagctggtgtctccgcacggtctgtaacccctggtttgagcgcatcagcatgttggtcatccttctcaactgcgtgaccctgggcatgttccggccatgcgaggacatcgcctgtgactcccagcgctgccggatcctgcaggcctttgatgacttcatctttgccttctttgccgtggagatggtggtgaagatggtggccttgggcatctttgggaaaaagtgttacctgggagacacttggaaccggcttgactttttcatcgtcatcgcagggatgctggagtactcgctggacctgcagaacgtcagcttctcagctgtcaggacagtccgtgtgctgcgaccgctcagggccattaaccgggtgcccagcatgcgcatccttgtcacgttgctgctggatacgctgcccatgctgggcaacgtcctgctgctctgcttcttcgtcttcttcatcttcggcatcgtcggcgtccagctgtgggcagggctgcttcggaaccgatgcttcctacctgagaatttcagcctccccctgagcgtggacctggagcgctattaccagacagagaacgaggatgagagccccttcatctgctcccagccacgcgagaacggcatgcggtcctgcagaagcgtgcccacgctgcgcggggacgggggcggtggcccaccttgcggtctggactatgaggcctacaacagctccagcaacaccacctgtgtcaactggaaccagtactacaccaactgctcagcgggggagcacaaccccttcaagggcgccatcaactttgacaacattggctatgcctggatcgccatcttccaggtcatcacgctggagggctgggtcgacatcatgtactttgtgatggatgctcattccttctacaatttcatctacttcatcctcctcatcatcgtgggctccttcttcatgatcaacctgtgcctggtggtgattgccacgcagttctcagagaccaagcagcgggaaagccagctgatgcgggagcagcgtgtgcggttcctgtccaacgccagcaccctggctagcttctctgagcccggcagctgctatgaggagctgctcaagtacctggtgtacatccttcgtaaggcagcccgcaggctggctcaggtctctcgggcagcaggtgtgcgggttgggctgctcagcagcccagcacccctcgggggccaggagacccagcccagcagcagctgctctcgctcccaccgccgcctatccgtccaccacctggtgcaccaccaccaccaccatcaccaccactaccacctgggcaatgggacgctcagggccccccgggccagcccggagatccaggacagggatgccaatgggtcccgccggctcatgctgccaccaccctcgacgcctgccctctccggggccccccctggtggcgcagagtctgtgcacagcttctaccatgccgactgccacttagagccagtccgctgccaggcgccccctcccaggtccccatctgaggcatccggcaggactgtgggcagcgggaaggtgtatcccaccgtgcacaccagccctccaccggagacgctgaaggagaaggcactagtagaggtggctgccagctctgggcccccaaccctcaccagcctcaacatcccacccgggccctacagctccatgcacaagctgctggagacacagagtacaggtgcctgccaaagctcttgcaagatctccagcccttgcttgaaagcagacagtggagcctgtggtccagacagctgcccctactgtgcccgggccggggcaggggaggtggagctcgccgaccgtgaaatgcctgactcagacagcgaggcagtttatgagttcacacaggatgcccagcacagcgacctccgggacccccacagccggcggcaacggagcctgggcccagatgcagagcccagctctgtgctggccttctggaggctaatctgtgacaccttccgaaagattgtggacagcaagtactttggccggggaatcatgatcgccatcctggtcaacacactcagcatgggcatcgaataccacgagcagcccgaggagcttaccaacgccctagaaatcagcaacatcgtcttcaccagcctctttgccctggagatgctgctgaagctgcttgtgtatggtccctttggctacatcaagaatccctacaacatcttcgatggtgtcattgtggtcatcagcgtgtgggagatcgtgggccagcaggggggcggcctgtcggtgctgcggaccttccgcctgatgcgtgtgctgaagctggtgcgcttcctgccggcgctgcagcggcagctggtggtgctcatgaagaccatggacaacgtggccaccttctgcatgctgcttatgctcttcatcttcatcttcagcatcctgggcatgcatctcttcggctgcaagtttgcctctgagcgggatggggacaccctgccagaccggaagaattttgactccttgctctgggccatcgtcactgtctttcagatcctgacccaggaggactggaacaaagtcctctacaatggtatggcctccacgtcgtcctgggcggccctttatttcattgccctcatgaccttcggcaactacgtgctcttcaatttgctggtcgccattctggtggagggcttccaggcggagggagatgccaacaagtccgaatcagagcccgatttcttctcacccagcctggatggtgatggggacaggaagaagtgcttggccttggtgtccctgggagagcacccggagctgcggaagagcctgctgccgcctctcatcatccacacggccgccacacccatgtcgctgcccaagagcaccagcacgggcctgggcgaggcgctgggccctgcgtcgcgccgcaccagcagcagcgggtcggcagagcctggggcggcccacgagatgaagtcaccgcccagcgcccgcagctctccgcacagcccctggagcgctgcaagcagctggaccagcaggcgctccagccggaacagcctcggccgtgcacccagcctgaagcggagaagcccaagtggagagcggcggtccctgttgtcgggagaaggccaggagagccaggatgaagaggagagctcagaagaggagcgggccagccctgcgggcagtgaccatcgccacagggggtccctggagcgggaggccaagagttcctttgacctgccagacacactgcaggtgccagggctgcatcgcactgccagtggccgagggtctgcttctgagcaccaggactgcaatggcaagtcggcttcagggcgcctggcccgggccctgcggcctgatgaccccccactggatggggatgacgccgatgacgagggcaacctgagcaaaggggaacgggtccgcgcgtggatccgagcccgactccctgcctgctgcctcgagcgagactcctggtcagcctacatcttccctcctcagtccaggttccgcctcctgtgtcaccggatcatcacccacaagatgttcgaccacgtggtccttgtcatcatcttccttaactgcatcaccatcgccatggagcgccccaaaattgacccccacagcgctgaacgcatcttcctgaccctctccaattacatcttcaccgcagtctttctggctgaaatgacagtgaaggtggtggcactgggctggtgcttcggggagcaggcgtacctgcggagcagttggaacgtgctggacgggctgttggtgctcatctccgtcatcgacattctggtgtccatggtctctgacagcggcaccaagatcctgggcatgctgagggtgctgcggctgctgcggaccctgcgcccgctcagggtgatcagccgggcgcaggggctgaagctggtggtggagacgctgatgtcctcactgaaacccatcggcaacattgtagtcatctgctgtgccttcttcatcattttcggcatcttgggggtgcagctcttcaaagggaagtttttcgtgtgccagggcgaggataccaggaacatcaccaataaatcggactgtgccgaggccagttaccggtgggtccggcacaagtacaactttgacaaccttggccaggccctgatgtccctgttcgttttggcctccaaggatggttgggtggacatcatgtacgatgggctggatgctgtgggcgtggaccagcagcccatcatgaaccacaacccctggatgctgctgtacttcatctcgttcctgctcattgtggccttctttgtcctgaacatgtttgtgggtgtggtggtggagaacttccacaagtgtcggcagcaccaggaggaagaggaggcccggcggcgggaggagaagcgcctacgaagactggagaaaaagagaaggagtaaggagaagcagatggctgaagcccagtgcaaaccttactactccgactactcccgcttccggctcctcgtccaccacttgtgcaccagccactacctggacctcttcatcacaggtgtcatcgggctgaacgtggtcaccatggccatggagcactaccagcagccccagattctggatgaggctctgaagatctgcaactacatcttcactgtcatctttgtcttggagtcagttttcaaacttgtggcctttggtttccgtcggttcttccaggacaggtggaaccagctggacctggccattgtgctgctgtccatcatgggcatcacgctggaggaaatcgaggtcaacgcctcgctgcccatcaaccccaccatcatccgcatcatgagggtgctgcgcattgcccgagtgctgaagctgctgaagatggctgtgggcatgcgggcgctgctggacacggtgatgcaggccctgccccaggtggggaacctgggacttctcttcatgttgttgtttttcatctttgcagctctgggcgtggagctctttggagacctggagtgtgacgagacacacccctgtgagggcctgggccgtcatgccacctttcggaactttggcatggccttcctaaccctcttccgagtctccacaggtgacaattggaatggcattatgaaggacaccctccgggactgtgaccaggagtccacctgctacaacacggtcatctcgcctatctactttgtgtccttcgtgctgacggcccagttcgtgctagtcaacgtggtgatcgccgtgctgatgaagcacctggaggagagcaacaaggaggccaaggaggaggccgagctagaggctgagctggagctggagatgaagaccctcagcccccagccccactcgccactgggcagccccttcctctggcctggggtcgagggccccgacagccccgacagccccaagcctggggctctgcacccagcggcccacgcgagatcagcctcccacttttccctggagcaccccacgatgcagccccaccccacggagctgccaggaccagacttactgactgtgcggaagtctggggtcagccgaacgcactctctgcccaatgacagctacatgtgtcggcatgggagcactgccgaggggcccctgggacacaggggctgggggctccccaaagctcagtcaggctccgtcttgtccgttcactcccagccagcagataccagctacatcctgcagcttcccaaagatgcacctcatctgctccagccccacagcgccccaacctggggcaccatccccaaactgcccccaccaggacgctcccctttggctcagaggccactcaggcgccaggcagcaataaggactgactccttggacgttcagggtctgggcagccgggaagacctgctggcagaggtgagtgggccctccccgcccctggcccgggcctactctttctggggccagtcaagtacccaggcacagcagcactcccgcagccacagcaagatctccaagcacatgaccccgccagccccttgcccaggcccagaacccaactggggcaagggccctccagagaccagaagcagcttagagttggacacggagctgagctggatttcaggagacctcctgccccctggcggccaggaggagcccccatccccacgggacctgaagaagtgctacagcgtggaggcccagagctgccagcgccggcctacgtcctggctggatgagcagaggagacactctatcgccgtcagctgcctggacagcggctcccaaccccacctgggcacagacccctctaaccttgggggccagcctcttggggggcctgggagccggcccaagaaaaaactcagcccgcctagtatcaccatagacccccccgagagccaaggtcctcggaccccgcccagccctggtatctgcctccggaggagggctccgtccagcgactccaaggatcccttggcctctggcccccctgacagcatggctgcctcgccctccccaaagaaagatgtgctgagtctctccggtttatcctctgacccagcagacctggacccctgagtcctgccccactttcccactcacctttctccactgggtgccaagtcctagctcctcctcctgggctatattcctgacaaaagttccatatagacaccaaggaggcggaggcgctcctccctgcctcagtggctctgggtacctgcaagcagaacttccaaagagagttaaaagcagcagccccggcaactctggctccaggcagaaggagaggcccggtgcagctgaggttcccgacaccagaagctgttgggagaaagcaatacgtttgtgcagaatctctatgtatattctattttattaaattaattgaatctagtatatgcgggatgtacgacattttgtgactgaagagacttgtttccttctacttttatgtgtctcagaatatttttgaggcgaaggcgtctgtctcttggctattttaacctaaaataacagtctagttatattccctcttcttgcaaagcacaagctgggaccgcgagcacattgcagccccaacggtggcccatcttcagcggagagcgagaaccattttggaaactgtaatgtaacttattttttcctttaacctcgtcatcattttctgtagggaaaaaaaaaagaaaaagaaaaaatgagattttacaagtgaaatggaacctttttatatatacatacatacatatctatctatctatctatatatatataaaataaagtaattttcctaaataaaaa

SEQ ID NO: 113235 - DNA, 8138 bp, Homo sapiens
  Payload ID: 2145
  Gene Symbol: CACNA1G
  Gene Name: calcium channel, voltage-dependent, T type, alpha 1G subunit
  Uniprot ID: O43497
  ENST ID: ENST00000354983
  CDS Start-End: 393-7424
ccgccctccgccgctgccccccttttcgttcgccctctcggggcggcttcgccgaaggtagcgccgaatccggcaaccggagcctgggcgcgaagcgaagaagccggaacaaagtgagggggagccggccggctggcccgggaagccccaggggcgcaggggaagcgggactcgcgccgggcggggtttccctgcgccccggcgccccgcgggcagcatgcccctgcgggcagggggagctgggctgaactggccctcccgggggctcagcttgcgccctagagcccaccagatgtgcccccgccggggcccccgggttgcgtgaggacacctcctctgaggggcgccgcttgcccctctccggatcgcccggggccccggctggccagaggatggacgaggaggaggatggagcgggcgccgaggagtcgggacagccccggagcttcatgcggctcaacgacctgtcgggggccgggggccggccggggccggggtcagcagaaaaggacccgggcagcgcggactccgaggcggaggggctgccgtacccggcgctggccccggtggttttcttctacttgagccaggacagccgcccgcggagctggtgtctccgcacggtctgtaacccctggtttgagcgcatcagcatgttggtcatccttctcaactgcgtgaccctgggcatgttccggccatgcgaggacatcgcctgtgactcccagcgctgccggatcctgcaggcctttgatgacttcatctttgccttctttgccgtggagatggtggtgaagatggtggccttgggcatctttgggaaaaagtgttacctgggagacacttggaaccggcttgactttttcatcgtcatcgcagggatgctggagtactcgctggacctgcagaacgtcagcttctcagctgtcaggacagtccgtgtgctgcgaccgctcagggccattaaccgggtgcccagcatgcgcatccttgtcacgttgctgctggatacgctgcccatgctgggcaacgtcctgctgctctgcttcttcgtcttcttcatcttcggcatcgtcggcgtccagctgtgggcagggctgcttcggaaccgatgcttcctacctgagaatttcagcctccccctgagcgtggacctggagcgctattaccagacagagaacgaggatgagagccccttcatctgctcccagccacgcgagaacggcatgcggtcctgcagaagcgtgcccacgctgcgcggggacgggggcggtggcccaccttgcggtctggactatgaggcctacaacagctccagcaacaccacctgtgtcaactggaaccagtactacaccaactgctcagcgggggagcacaaccccttcaagggcgccatcaactttgacaacattggctatgcctggatcgccatcttccaggtcatcacgctggagggctgggtcgacatcatgtactttgtgatggatgctcattccttctacaatttcatctacttcatcctcctcatcatcgtgggctccttcttcatgatcaacctgtgcctggtggtgattgccacgcagttctcagagaccaagcagcgggaaagccagctgatgcgggagcagcgtgtgcggttcctgtccaacgccagcaccctggctagcttctctgagcccggcagctgctatgaggagctgctcaagtacctggtgtacatccttcgtaaggcagcccgcaggctggctcaggtctctcgggcagcaggtgtgcgggttgggctgctcagcagcccagcacccctcgggggccaggagacccagcccagcagcagctgctctcgctcccaccgccgcctatccgtccaccacctggtgcaccaccaccaccaccatcaccaccactaccacctgggcaatgggacgctcagggccccccgggccagcccggagatccaggacagggatgccaatgggtcccgccggctcatgctgccaccaccctcgacgcctgccctctccggggccccccctggtggcgcagagtctgtgcacagcttctaccatgccgactgccacttagagccagtccgctgccaggcgccccctcccaggtccccatctgaggcatccggcaggactgtgggcagcgggaaggtgtatcccaccgtgcacaccagccctccaccggagacgctgaaggagaaggcactagtagaggtggctgccagctctgggcccccaaccctcaccagcctcaacatcccacccgggccctacagctccatgcacaagctgctggagacacagagtacaggtgcctgccaaagctcttgcaagatctccagcccttgcttgaaagcagacagtggagcctgtggtccagacagctgcccctactgtgcccgggccggggcaggggaggtggagctcgccgaccgtgaaatgcctgactcagacagcgaggcagtttatgagttcacacaggatgcccagcacagcgacctccgggacccccacagccggcggcaacggagcctgggcccagatgcagagcccagctctgtgctggccttctggaggctaatctgtgacaccttccgaaagattgtggacagcaagtactttggccggggaatcatgatcgccatcctggtcaacacactcagcatgggcatcgaataccacgagcagcccgaggagcttaccaacgccctagaaatcagcaacatcgtcttcaccagcctctttgccctggagatgctgctgaagctgcttgtgtatggtccctttggctacatcaagaatccctacaacatcttcgatggtgtcattgtggtcatcagcgtgtgggagatcgtgggccagcaggggggcggcctgtcggtgctgcggaccttccgcctgatgcgtgtgctgaagctggtgcgcttcctgccggcgctgcagcggcagctggtggtgctcatgaagaccatggacaacgtggccaccttctgcatgctgcttatgctcttcatcttcatcttcagcatcctgggcatgcatctcttcggctgcaagtttgcctctgagcgggatggggacaccctgccagaccggaagaattttgactccttgctctgggccatcgtcactgtctttcagatcctgacccaggaggactggaacaaagtcctctacaatggtatggcctccacgtcgtcctgggcggccctttatttcattgccctcatgaccttcggcaactacgtgctcttcaatttgctggtcgccattctggtggagggcttccaggcggagggagatgccaacaagtccgaatcagagcccgatttcttctcacccagcctggatggtgatggggacaggaagaagtgcttggccttggtgtccctgggagagcacccggagctgcggaagagcctgctgccgcctctcatcatccacacggccgccacacccatgtcgctgcccaagagcaccagcacgggcctgggcgaggcgctgggccctgcgtcgcgccgcaccagcagcagcgggtcggcagagcctggggcggcccacgagatgaagtcaccgcccagcgcccgcagctctccgcacagcccctggagcgctgcaagcagctggaccagcaggcgctccagccggaacagcctcggccgtgcacccagcctgaagcggagaagcccaagtggagagcggcggtccctgttgtcgggagaaggccaggagagccaggatgaagaggagagctcagaagaggagcgggccagccctgcgggcagtgaccatcgccacagggggtccctggagcgggaggccaagagttcctttgacctgccagacacactgcaggtgccagggctgcatcgcactgccagtggccgagggtctgcttctgagcaccaggactgcaatggcaagtcggcttcagggcgcctggcccgggccctgcggcctgatgaccccccactggatggggatgacgccgatgacgagggcaacctgagcaaaggggaacgggtccgcgcgtggatccgagcccgactccctgcctgctgcctcgagcgagactcctggtcagcctacatcttccctcctcagtccaggttccgcctcctgtgtcaccggatcatcacccacaagatgttcgaccacgtggtccttgtcatcatcttccttaactgcatcaccatcgccatggagcgccccaaaattgacccccacagcgctgaacgcatcttcctgaccctctccaattacatcttcaccgcagtctttctggctgaaatgacagtgaaggtggtggcactgggctggtgcttcggggagcaggcgtacctgcggagcagttggaacgtgctggacgggctgttggtgctcatctccgtcatcgacattctggtgtccatggtctctgacagcggcaccaagatcctgggcatgctgagggtgctgcggctgctgcggaccctgcgcccgctcagggtgatcagccgggcgcaggggctgaagctggtggtggagacgctgatgtcctcactgaaacccatcggcaacattgtagtcatctgctgtgccttcttcatcattttcggcatcttgggggtgcagctcttcaaagggaagtttttcgtgtgccagggcgaggataccaggaacatcaccaataaatcggactgtgccgaggccagttaccggtgggtccggcacaagtacaactttgacaaccttggccaggccctgatgtccctgttcgttttggcctccaaggatggttgggtggacatcatgtacgatgggctggatgctgtgggcgtggaccagcagcccatcatgaaccacaacccctggatgctgctgtacttcatctcgttcctgctcattgtggccttctttgtcctgaacatgtttgtgggtgtggtggtggagaacttccacaagtgtcggcagcaccaggaggaagaggaggcccggcggcgggaggagaagcgcctacgaagactggagaaaaagagaaggagtaaggagaagcagatggctgaagcccagtgcaaaccttactactccgactactcccgcttccggctcctcgtccaccacttgtgcaccagccactacctggacctcttcatcacaggtgtcatcgggctgaacgtggtcaccatggccatggagcactaccagcagccccagattctggatgaggctctgaagatctgcaactacatcttcactgtcatctttgtcttggagtcagttttcaaacttgtggcctttggtttccgtcggttcttccaggacaggtggaaccagctggacctggccattgtgctgctgtccatcatgggcatcacgctggaggaaatcgaggtcaacgcctcgctgcccatcaaccccaccatcatccgcatcatgagggtgctgcgcattgcccgagtgctgaagctgctgaagatggctgtgggcatgcgggcgctgctggacacggtgatgcaggccctgccccaggtggggaacctgggacttctcttcatgttgttgtttttcatctttgcagctctgggcgtggagctctttggagacctggagtgtgacgagacacacccctgtgagggcctgggccgtcatgccacctttcggaactttggcatggccttcctaaccctcttccgagtctccacaggtgacaattggaatggcattatgaaggacaccctccgggactgtgaccaggagtccacctgctacaacacggtcatctcgcctatctactttgtgtccttcgtgctgacggcccagttcgtgctagtcaacgtggtgatcgccgtgctgatgaagcacctggaggagagcaacaaggaggccaaggaggaggccgagctagaggctgagctggagctggagatgaagaccctcagcccccagccccactcgccactgggcagccccttcctctggcctggggtcgagggccccgacagccccgacagccccaagcctggggctctgcacccagcggcccacgcgagatcagcctcccacttttccctggagcaccccacggacaggcagctgtttgacaccatatccctgctgatccagggctccctggagtgggagctgaagctgatggacgagctggcaggcccagggggccagccctctgccttcccttctgcccccagcctgggaggctccgacccacagatccctctagctgagatggaggctctgtctctgacgtcagagattgtgtctgaaccgtcctgctctctagctctgacggatgactctttgcctgatgacatgcacacactcttacttagtgccctggagagcaatatgcagccccaccccacggagctgccaggaccagacttactgactgtgcggaagtctggggtcagccgaacgcactctctgcccaatgacagctacatgtgtcggcatgggagcactgccgaggggcccctgggacacaggggctgggggctccccaaagctcagtcaggctccgtcttgtccgttcactcccagccagcagataccagctacatcctgcagcttcccaaagatgcacctcatctgctccagccccacagcgccccaacctggggcaccatccccaaactgcccccaccaggacgctcccctttggctcagaggccactcaggcgccaggcagcaataaggactgactccttggacgttcagggtctgggcagccgggaagacctgctggcagaggtgagtgggccctccccgcccctggcccgggcctactctttctggggccagtcaagtacccaggcacagcagcactcccgcagccacagcaagatctccaagcacatgaccccgccagccccttgcccaggcccagaacccaactggggcaagggccctccagagaccagaagcagcttagagttggacacggagctgagctggatttcaggagacctcctgccccctggcggccaggaggagcccccatccccacgggacctgaagaagtgctacagcgtggaggcccagagctgccagcgccggcctacgtcctggctggatgagcagaggagacactctatcgccgtcagctgcctggacagcggctcccaaccccacctgggcacagacccctctaaccttgggggccagcctcttggggggcctgggagccggcccaagaaaaaactcagcccgcctagtatcaccatagacccccccgagagccaaggtcctcggaccccgcccagccctggtatctgcctccggaggagggctccgtccagcgactccaaggatcccttggcctctggcccccctgacagcatggctgcctcgccctccccaaagaaagatgtgctgagtctctccggtttatcctctgacccagcagacctggacccctgagtcctgccccactttcccactcacctttctccactgggtgccaagtcctagctcctcctcctgggctatattcctgacaaaagttccatatagacaccaaggaggcggaggcgctcctccctgcctcagtggctctgggtacctgcaagcagaacttccaaagagagttaaaagcagcagccccggcaactctggctccaggcagaaggagaggcccggtgcagctgaggttcccgacaccagaagctgttgggagaaagcaatacgtttgtgcagaatctctatgtatattctattttattaaattaattgaatctagtatatgcgggatgtacgacattttgtgactgaagagacttgtttccttctacttttatgtgtctcagaatatttttgaggcgaaggcgtctgtctcttggctattttaacctaaaataacagtctagttatattccctcttcttgcaaagcacaagctgggaccgcgagcacattgcagccccaacggtggcccatcttcagcggagagcgagaaccattttggaaactgtaatgtaacttattttttcctttaacctcgtcatcattttctgtagggaaaaaaaaaagaaaaagaaaaaatgagattttacaagtgaaatggaacctttttatatatacatacatacatatctatctatctatctatatatatataaaataaagtaattttcct

SEQ ID NO: 113236 - DNA, 7030 bp, Homo sapiens
  Payload ID: 2145
  Gene Symbol: CACNA1G
  Gene Name: calcium channel, voltage-dependent, T type, alpha 1G subunit
  Uniprot ID: O43497
  ENST ID: ENST00000358244
  CDS Start-End: 1-6516
atggacgaggaggaggatggagcgggcgccgaggagtcgggacagccccggagcttcatgcggctcaacgacctgtcgggggccgggggccggccggggccggggtcagcagaaaaggacccgggcagcgcggactccgaggcggaggggctgccgtacccggcgctggccccggtggttttcttctacttgagccaggacagccgcccgcggagctggtgtctccgcacggtctgtaacccctggtttgagcgcatcagcatgttggtcatccttctcaactgcgtgaccctgggcatgttccggccatgcgaggacatcgcctgtgactcccagcgctgccggatcctgcaggcctttgatgacttcatctttgccttctttgccgtggagatggtggtgaagatggtggccttgggcatctttgggaaaaagtgttacctgggagacacttggaaccggcttgactttttcatcgtcatcgcagggatgctggagtactcgctggacctgcagaacgtcagcttctcagctgtcaggacagtccgtgtgctgcgaccgctcagggccattaaccgggtgcccagcatgcgcatccttgtcacgttgctgctggatacgctgcccatgctgggcaacgtcctgctgctctgcttcttcgtcttcttcatcttcggcatcgtcggcgtccagctgtgggcagggctgcttcggaaccgatgcttcctacctgagaatttcagcctccccctgagcgtggacctggagcgctattaccagacagagaacgaggatgagagccccttcatctgctcccagccacgcgagaacggcatgcggtcctgcagaagcgtgcccacgctgcgcggggacgggggcggtggcccaccttgcggtctggactatgaggcctacaacagctccagcaacaccacctgtgtcaactggaaccagtactacaccaactgctcagcgggggagcacaaccccttcaagggcgccatcaactttgacaacattggctatgcctggatcgccatcttccaggtcatcacgctggagggctgggtcgacatcatgtactttgtgatggatgctcattccttctacaatttcatctacttcatcctcctcatcatcgtgggctccttcttcatgatcaacctgtgcctggtggtgattgccacgcagttctcagagaccaagcagcgggaaagccagctgatgcgggagcagcgtgtgcggttcctgtccaacgccagcaccctggctagcttctctgagcccggcagctgctatgaggagctgctcaagtacctggtgtacatccttcgtaaggcagcccgcaggctggctcaggtctctcgggcagcaggtgtgcgggttgggctgctcagcagcccagcacccctcgggggccaggagacccagcccagcagcagctgctctcgctcccaccgccgcctatccgtccaccacctggtgcaccaccaccaccaccatcaccaccactaccacctgggcaatgggacgctcagggccccccgggccagcccggagatccaggacagggatgccaatgggtcccgccggctcatgctgccaccaccctcgacgcctgccctctccggggccccccctggtggcgcagagtctgtgcacagcttctaccatgccgactgccacttagagccagtccgctgccaggcgccccctcccaggtccccatctgaggcatccggcaggactgtgggcagcgggaaggtgtatcccaccgtgcacaccagccctccaccggagacgctgaaggagaaggcactagtagaggtggctgccagctctgggcccccaaccctcaccagcctcaacatcccacccgggccctacagctccatgcacaagctgctggagacacagagtacaggtgcctgccaaagctcttgcaagatctccagcccttgcttgaaagcagacagtggagcctgtggtccagacagctgcccctactgtgcccgggccggggcaggggaggtggagctcgccgaccgtgaaatgcctgactcagacagcgaggcagtttatgagttcacacaggatgcccagcacagcgacctccgggacccccacagccggcggcaacggagcctgggcccagatgcagagcccagctctgtgctggccttctggaggctaatctgtgacaccttccgaaagattgtggacagcaagtactttggccggggaatcatgatcgccatcctggtcaacacactcagcatgggcatcgaataccacgagcagcccgaggagcttaccaacgccctagaaatcagcaacatcgtcttcaccagcctctttgccctggagatgctgctgaagctgcttgtgtatggtccctttggctacatcaagaatccctacaacatcttcgatggtgtcattgtggtcatcagcgtgtgggagatcgtgggccagcaggggggcggcctgtcggtgctgcggaccttccgcctgatgcgtgtgctgaagctggtgcgcttcctgccggcgctgcagcggcagctggtggtgctcatgaagaccatggacaacgtggccaccttctgcatgctgcttatgctcttcatcttcatcttcagcatcctgggcatgcatctcttcggctgcaagtttgcctctgagcgggatggggacaccctgccagaccggaagaattttgactccttgctctgggccatcgtcactgtctttcagatcctgacccaggaggactggaacaaagtcctctacaatggtatggcctccacgtcgtcctgggcggccctttatttcattgccctcatgaccttcggcaactacgtgctcttcaatttgctggtcgccattctggtggagggcttccaggcggagggagatgccaacaagtccgaatcagagcccgatttcttctcacccagcctggatggtgatggggacaggaagaagtgcttggccttggtgtccctgggagagcacccggagctgcggaagagcctgctgccgcctctcatcatccacacggccgccacacccatgtcgctgcccaagagcaccagcacgggcctgggcgaggcgctgggccctgcgtcgcgccgcaccagcagcagcgggtcggcagagcctggggcggcccacgagatgaagtcaccgcccagcgcccgcagctctccgcacagcccctggagcgctgcaagcagctggaccagcaggcgctccagccggaacagcctcggccgtgcacccagcctgaagcggagaagcccaagtggagagcggcggtccctgttgtcgggagaaggccaggagagccaggatgaagaggagagctcagaagaggagcgggccagccctgcgggcagtgaccatcgccacagggggtccctggagcgggaggccaagagttcctttgacctgccagacacactgcaggtgccagggctgcatcgcactgccagtggccgagggtctgcttctgagcaccaggactgcaatggcaagtcggcttcagggcgcctggcccgggccctgcggcctgatgaccccccactggatggggatgacgccgatgacgagggcaacctgagcaaaggggaacgggtccgcgcgtggatccgagcccgactccctgcctgctgcctcgagcgagactcctggtcagcctacatcttccctcctcagtccaggttccgcctcctgtgtcaccggatcatcacccacaagatgttcgaccacgtggtccttgtcatcatcttccttaactgcatcaccatcgccatggagcgccccaaaattgacccccacagcgctgaacgcatcttcctgaccctctccaattacatcttcaccgcagtctttctggctgaaatgacagtgaaggtggtggcactgggctggtgcttcggggagcaggcgtacctgcggagcagttggaacgtgctggacgggctgttggtgctcatctccgtcatcgacattctggtgtccatggtctctgacagcggcaccaagatcctgggcatgctgagggtgctgcggctgctgcggaccctgcgcccgctcagggtgatcagccgggcgcaggggctgaagctggtggtggagacgctgatgtcctcactgaaacccatcggcaacattgtagtcatctgctgtgccttcttcatcattttcggcatcttgggggtgcagctcttcaaagggaagtttttcgtgtgccagggcgaggataccaggaacatcaccaataaatcggactgtgccgaggccagttaccggtgggtccggcacaagtacaactttgacaaccttggccaggccctgatgtccctgttcgttttggcctccaaggatggttgggtggacatcatgtacgatgggctggatgctgtgggcgtggaccagcagcccatcatgaaccacaacccctggatgctgctgtacttcatctcgttcctgctcattgtggccttctttgtcctgaacatgtttgtgggtgtggtggtggagaacttccacaagtgtcggcagcaccaggaggaagaggaggcccggcggcgggaggagaagcgcctacgaagactggagaaaaagagaaggagtaaggagaagcagatggctgaagcccagtgcaaaccttactactccgactactcccgcttccggctcctcgtccaccacttgtgcaccagccactacctggacctcttcatcacaggtgtcatcgggctgaacgtggtcaccatggccatggagcactaccagcagccccagattctggatgaggctctgaagatctgcaactacatcttcactgtcatctttgtcttggagtcagttttcaaacttgtggcctttggtttccgtcggttcttccaggacaggtggaaccagctggacctggccattgtgctgctgtccatcatgggcatcacgctggaggaaatcgaggtcaacgcctcgctgcccatcaaccccaccatcatccgcatcatgagggtgctgcgcattgcccgagtgctgaagctgctgaagatggctgtgggcatgcgggcgctgctggacacggtgatgcaggccctgccccaggtggggaacctgggacttctcttcatgttgttgtttttcatctttgcagctctgggcgtggagctctttggagacctggagtgtgacgagacacacccctgtgagggcctgggccgtcatgccacctttcggaactttggcatggccttcctaaccctcttccgagtctccacaggtgacaattggaatggcattatgaaggacaccctccgggactgtgaccaggagtccacctgctacaacacggtcatctcgcctatctactttgtgtccttcgtgctgacggcccagttcgtgctagtcaacgtggtgatcgccgtgctgatgaagcacctggaggagagcaacaaggaggccaaggaggaggccgagctagaggctgagctggagctggagatgaagaccctcagcccccagccccactcgccactgggcagccccttcctctggcctggggtcgagggccccgacagccccgacagccccaagcctggggctctgcacccagcggcccacgcgagatcagcctcccacttttccctggagcaccccacgatgcagccccaccccacggagctgccaggaccagacttactgactgtgcggaagtctggggtcagccgaacgcactctctgcccaatgacagctacatgtgtcggcatgggagcactgccgaggggcccctgggacacaggggctgggggctccccaaagctcagtcaggctccgtcttgtccgttcactcccagccagcagataccagctacatcctgcagcttcccaaagatgcacctcatctgctccagccccacagcgccccaacctggggcaccatccccaaactgcccccaccaggacgctcccctttggctcagaggccactcaggcgccaggcagcaataaggactgactccttggacgttcagggtctgggcagccgggaagacctgctggcagaggaggagcccccatccccacgggacctgaagaagtgctacagcgtggaggcccagagctgccagcgccggcctacgtcctggctggatgagcagaggagacactctatcgccgtcagctgcctggacagcggctcccaaccccacctgggcacagacccctctaaccttgggggccagcctcttggggggcctgggagccggcccaagaaaaaactcagcccgcctagtatcaccatagacccccccgagagccaaggtcctcggaccccgcccagccctggtatctgcctccggaggagggctccgtccagcgactccaaggatcccttggcctctggcccccctgacagcatggctgcctcgccctccccaaagaaagatgtgctgagtctctccggtttatcctctgacccagcagacctggacccctgagtcctgccccactttcccactcacctttctccactgggtgccaagtcctagctcctcctcctgggctatattcctgacaaaagttccatatagacaccaaggaggcggaggcgctcctccctgcctcagtggctctgggtacctgcaagcagaacttccaaagagagttaaaagcagcagccccggcaactctggctccaggcagaaggagaggcccggtgcagctgaggttcccgacaccagaagctgttgggagaaagcaatacgtttgtgcagaatctctatgtatattctattttattaaattaattgaatctagtatatgcgggatgtacgacattttgtgactgaagagacttgtttccttctacttttatgtgtctcagaatatttttgaggcgaaggcgtctgtctcttggctattttaacctaaaataacagtctagttatattccctcttcttgcaaagcacaagctgggaccgcgagcacattgcagccccaacggtggccca

SEQ ID NO: 113237 - DNA, 7648 bp, Homo sapiens
  Payload ID: 2145
  Gene Symbol: CACNA1G
  Gene Name: calcium channel, voltage-dependent, T type, alpha 1G subunit
  Uniprot ID: O43497
  ENST ID: ENST00000359106
  CDS Start-End: 1-7134
atggacgaggaggaggatggagcgggcgccgaggagtcgggacagccccggagcttcatgcggctcaacgacctgtcgggggccgggggccggccggggccggggtcagcagaaaaggacccgggcagcgcggactccgaggcggaggggctgccgtacccggcgctggccccggtggttttcttctacttgagccaggacagccgcccgcggagctggtgtctccgcacggtctgtaacccctggtttgagcgcatcagcatgttggtcatccttctcaactgcgtgaccctgggcatgttccggccatgcgaggacatcgcctgtgactcccagcgctgccggatcctgcaggcctttgatgacttcatctttgccttctttgccgtggagatggtggtgaagatggtggccttgggcatctttgggaaaaagtgttacctgggagacacttggaaccggcttgactttttcatcgtcatcgcagggatgctggagtactcgctggacctgcagaacgtcagcttctcagctgtcaggacagtccgtgtgctgcgaccgctcagggccattaaccgggtgcccagcatgcgcatccttgtcacgttgctgctggatacgctgcccatgctgggcaacgtcctgctgctctgcttcttcgtcttcttcatcttcggcatcgtcggcgtccagctgtgggcagggctgcttcggaaccgatgcttcctacctgagaatttcagcctccccctgagcgtggacctggagcgctattaccagacagagaacgaggatgagagccccttcatctgctcccagccacgcgagaacggcatgcggtcctgcagaagcgtgcccacgctgcgcggggacgggggcggtggcccaccttgcggtctggactatgaggcctacaacagctccagcaacaccacctgtgtcaactggaaccagtactacaccaactgctcagcgggggagcacaaccccttcaagggcgccatcaactttgacaacattggctatgcctggatcgccatcttccaggtcatcacgctggagggctgggtcgacatcatgtactttgtgatggatgctcattccttctacaatttcatctacttcatcctcctcatcatcgtgggctccttcttcatgatcaacctgtgcctggtggtgattgccacgcagttctcagagaccaagcagcgggaaagccagctgatgcgggagcagcgtgtgcggttcctgtccaacgccagcaccctggctagcttctctgagcccggcagctgctatgaggagctgctcaagtacctggtgtacatccttcgtaaggcagcccgcaggctggctcaggtctctcgggcagcaggtgtgcgggttgggctgctcagcagcccagcacccctcgggggccaggagacccagcccagcagcagctgctctcgctcccaccgccgcctatccgtccaccacctggtgcaccaccaccaccaccatcaccaccactaccacctgggcaatgggacgctcagggccccccgggccagcccggagatccaggacagggatgccaatgggtcccgccggctcatgctgccaccaccctcgacgcctgccctctccggggccccccctggtggcgcagagtctgtgcacagcttctaccatgccgactgccacttagagccagtccgctgccaggcgccccctcccaggtccccatctgaggcatccggcaggactgtgggcagcgggaaggtgtatcccaccgtgcacaccagccctccaccggagacgctgaaggagaaggcactagtagaggtggctgccagctctgggcccccaaccctcaccagcctcaacatcccacccgggccctacagctccatgcacaagctgctggagacacagagtacaggtgcctgccaaagctcttgcaagatctccagcccttgcttgaaagcagacagtggagcctgtggtccagacagctgcccctactgtgcccgggccggggcaggggaggtggagctcgccgaccgtgaaatgcctgactcagacagcgaggcagtttatgagttcacacaggatgcccagcacagcgacctccgggacccccacagccggcggcaacggagcctgggcccagatgcagagcccagctctgtgctggccttctggaggctaatctgtgacaccttccgaaagattgtggacagcaagtactttggccggggaatcatgatcgccatcctggtcaacacactcagcatgggcatcgaataccacgagcagcccgaggagcttaccaacgccctagaaatcagcaacatcgtcttcaccagcctctttgccctggagatgctgctgaagctgcttgtgtatggtccctttggctacatcaagaatccctacaacatcttcgatggtgtcattgtggtcatcagcgtgtgggagatcgtgggccagcaggggggcggcctgtcggtgctgcggaccttccgcctgatgcgtgtgctgaagctggtgcgcttcctgccggcgctgcagcggcagctggtggtgctcatgaagaccatggacaacgtggccaccttctgcatgctgcttatgctcttcatcttcatcttcagcatcctgggcatgcatctcttcggctgcaagtttgcctctgagcgggatggggacaccctgccagaccggaagaattttgactccttgctctgggccatcgtcactgtctttcagatcctgacccaggaggactggaacaaagtcctctacaatggtatggcctccacgtcgtcctgggcggccctttatttcattgccctcatgaccttcggcaactacgtgctcttcaatttgctggtcgccattctggtggagggcttccaggcggaggaaatcagcaaacgggaagatgcgagtggacagttaagctgtattcagctgcctgtcgactcccaggggggagatgccaacaagtccgaatcagagcccgatttcttctcacccagcctggatggtgatggggacaggaagaagtgcttggccttggtgtccctgggagagcacccggagctgcggaagagcctgctgccgcctctcatcatccacacggccgccacacccatgtcgctgcccaagagcaccagcacgggcctgggcgaggcgctgggccctgcgtcgcgccgcaccagcagcagcgggtcggcagagcctggggcggcccacgagatgaagtcaccgcccagcgcccgcagctctccgcacagcccctggagcgctgcaagcagctggaccagcaggcgctccagccggaacagcctcggccgtgcacccagcctgaagcggagaagcccaagtggagagcggcggtccctgttgtcgggagaaggccaggagagccaggatgaagaggagagctcagaagaggagcgggccagccctgcgggcagtgaccatcgccacagggggtccctggagcgggaggccaagagttcctttgacctgccagacacactgcaggtgccagggctgcatcgcactgccagtggccgagggtctgcttctgagcaccaggactgcaatggcaagtcggcttcagggcgcctggcccgggccctgcggcctgatgaccccccactggatggggatgacgccgatgacgagggcaacctgagcaaaggggaacgggtccgcgcgtggatccgagcccgactccctgcctgctgcctcgagcgagactcctggtcagcctacatcttccctcctcagtccaggttccgcctcctgtgtcaccggatcatcacccacaagatgttcgaccacgtggtccttgtcatcatcttccttaactgcatcaccatcgccatggagcgccccaaaattgacccccacagcgctgaacgcatcttcctgaccctctccaattacatcttcaccgcagtctttctggctgaaatgacagtgaaggtggtggcactgggctggtgcttcggggagcaggcgtacctgcggagcagttggaacgtgctggacgggctgttggtgctcatctccgtcatcgacattctggtgtccatggtctctgacagcggcaccaagatcctgggcatgctgagggtgctgcggctgctgcggaccctgcgcccgctcagggtgatcagccgggcgcaggggctgaagctggtggtggagacgctgatgtcctcactgaaacccatcggcaacattgtagtcatctgctgtgccttcttcatcattttcggcatcttgggggtgcagctcttcaaagggaagtttttcgtgtgccagggcgaggataccaggaacatcaccaataaatcggactgtgccgaggccagttaccggtgggtccggcacaagtacaactttgacaaccttggccaggccctgatgtccctgttcgttttggcctccaaggatggttgggtggacatcatgtacgatgggctggatgctgtgggcgtggaccagcagcccatcatgaaccacaacccctggatgctgctgtacttcatctcgttcctgctcattgtggccttctttgtcctgaacatgtttgtgggtgtggtggtggagaacttccacaagtgtcggcagcaccaggaggaagaggaggcccggcggcgggaggagaagcgcctacgaagactggagaaaaagagaaggaatctaatgctggacgatgtaattgcttccggcagctcagccagcgctgcgtcagaagcccagtgcaaaccttactactccgactactcccgcttccggctcctcgtccaccacttgtgcaccagccactacctggacctcttcatcacaggtgtcatcgggctgaacgtggtcaccatggccatggagcactaccagcagccccagattctggatgaggctctgaagatctgcaactacatcttcactgtcatctttgtcttggagtcagttttcaaacttgtggcctttggtttccgtcggttcttccaggacaggtggaaccagctggacctggccattgtgctgctgtccatcatgggcatcacgctggaggaaatcgaggtcaacgcctcgctgcccatcaaccccaccatcatccgcatcatgagggtgctgcgcattgcccgagtgctgaagctgctgaagatggctgtgggcatgcgggcgctgctggacacggtgatgcaggccctgccccaggtggggaacctgggacttctcttcatgttgttgtttttcatctttgcagctctgggcgtggagctctttggagacctggagtgtgacgagacacacccctgtgagggcctgggccgtcatgccacctttcggaactttggcatggccttcctaaccctcttccgagtctccacaggtgacaattggaatggcattatgaaggacaccctccgggactgtgaccaggagtccacctgctacaacacggtcatctcgcctatctactttgtgtccttcgtgctgacggcccagttcgtgctagtcaacgtggtgatcgccgtgctgatgaagcacctggaggagagcaacaaggaggccaaggaggaggccgagctagaggctgagctggagctggagatgaagaccctcagcccccagccccactcgccactgggcagccccttcctctggcctggggtcgagggccccgacagccccgacagccccaagcctggggctctgcacccagcggcccacgcgagatcagcctcccacttttccctggagcaccccacggacaggcagctgtttgacaccatatccctgctgatccagggctccctggagtgggagctgaagctgatggacgagctggcaggcccagggggccagccctctgccttcccttctgcccccagcctgggaggctccgacccacagatccctctagctgagatggaggctctgtctctgacgtcagagattgtgtctgaaccgtcctgctctctagctctgacggatgactctttgcctgatgacatgcacacactcttacttagtgccctggagagcaatatgcagccccaccccacggagctgccaggaccagacttactgactgtgcggaagtctggggtcagccgaacgcactctctgcccaatgacagctacatgtgtcggcatgggagcactgccgaggggcccctgggacacaggggctgggggctccccaaagctcagtcaggctccgtcttgtccgttcactcccagccagcagataccagctacatcctgcagcttcccaaagatgcacctcatctgctccagccccacagcgccccaacctggggcaccatccccaaactgcccccaccaggacgctcccctttggctcagaggccactcaggcgccaggcagcaataaggactgactccttggacgttcagggtctgggcagccgggaagacctgctggcagaggtgagtgggccctccccgcccctggcccgggcctactctttctggggccagtcaagtacccaggcacagcagcactcccgcagccacagcaagatctccaagcacatgaccccgccagccccttgcccaggcccagaacccaactggggcaagggccctccagagaccagaagcagcttagagttggacacggagctgagctggatttcaggagacctcctgccccctggcggccaggaggagcccccatccccacgggacctgaagaagtgctacagcgtggaggcccagagctgccagcgccggcctacgtcctggctggatgagcagaggagacactctatcgccgtcagctgcctggacagcggctcccaaccccacctgggcacagacccctctaaccttgggggccagcctcttggggggcctgggagccggcccaagaaaaaactcagcccgcctagtatcaccatagacccccccgagagccaaggtcctcggaccccgcccagccctggtatctgcctccggaggagggctccgtccagcgactccaaggatcccttggcctctggcccccctgacagcatggctgcctcgccctccccaaagaaagatgtgctgagtctctccggtttatcctctgacccagcagacctggacccctgagtcctgccccactttcccactcacctttctccactgggtgccaagtcctagctcctcctcctgggctatattcctgacaaaagttccatatagacaccaaggaggcggaggcgctcctccctgcctcagtggctctgggtacctgcaagcagaacttccaaagagagttaaaagcagcagccccggcaactctggctccaggcagaaggagaggcccggtgcagctgaggttcccgacaccagaagctgttgggagaaagcaatacgtttgtgcagaatctctatgtatattctattttattaaattaattgaatctagtatatgcgggatgtacgacattttgtgactgaagagacttgtttccttctacttttatgtgtctcagaatatttttgaggcgaaggcgtctgtctcttggctattttaacctaaaataacagtctagttatattccctcttcttgcaaagcacaagctgggaccgcgagcacattgcagccccaacggtggccca

SEQ ID NO: 113238 - DNA, 7497 bp, Homo sapiens
  Payload ID: 2145
  Gene Symbol: CACNA1G
  Gene Name: calcium channel, voltage-dependent, T type, alpha 1G subunit
  Uniprot ID: O43497
  ENST ID: ENST00000360761
  CDS Start-End: 393-7178
ccgccctccgccgctgccccccttttcgttcgccctctcggggcggcttcgccgaaggtagcgccgaatccggcaaccggagcctgggcgcgaagcgaagaagccggaacaaagtgagggggagccggccggctggcccgggaagccccaggggcgcaggggaagcgggactcgcgccgggcggggtttccctgcgccccggcgccccgcgggcagcatgcccctgcgggcagggggagctgggctgaactggccctcccgggggctcagcttgcgccctagagcccaccagatgtgcccccgccggggcccccgggttgcgtgaggacacctcctctgaggggcgccgcttgcccctctccggatcgcccggggccccggctggccagaggatggacgaggaggaggatggagcgggcgccgaggagtcgggacagccccggagcttcatgcggctcaacgacctgtcgggggccgggggccggccggggccggggtcagcagaaaaggacccgggcagcgcggactccgaggcggaggggctgccgtacccggcgctggccccggtggttttcttctacttgagccaggacagccgcccgcggagctggtgtctccgcacggtctgtaacccctggtttgagcgcatcagcatgttggtcatccttctcaactgcgtgaccctgggcatgttccggccatgcgaggacatcgcctgtgactcccagcgctgccggatcctgcaggcctttgatgacttcatctttgccttctttgccgtggagatggtggtgaagatggtggccttgggcatctttgggaaaaagtgttacctgggagacacttggaaccggcttgactttttcatcgtcatcgcagggatgctggagtactcgctggacctgcagaacgtcagcttctcagctgtcaggacagtccgtgtgctgcgaccgctcagggccattaaccgggtgcccagcatgcgcatccttgtcacgttgctgctggatacgctgcccatgctgggcaacgtcctgctgctctgcttcttcgtcttcttcatcttcggcatcgtcggcgtccagctgtgggcagggctgcttcggaaccgatgcttcctacctgagaatttcagcctccccctgagcgtggacctggagcgctattaccagacagagaacgaggatgagagccccttcatctgctcccagccacgcgagaacggcatgcggtcctgcagaagcgtgcccacgctgcgcggggacgggggcggtggcccaccttgcggtctggactatgaggcctacaacagctccagcaacaccacctgtgtcaactggaaccagtactacaccaactgctcagcgggggagcacaaccccttcaagggcgccatcaactttgacaacattggctatgcctggatcgccatcttccaggtcatcacgctggagggctgggtcgacatcatgtactttgtgatggatgctcattccttctacaatttcatctacttcatcctcctcatcatcgtgggctccttcttcatgatcaacctgtgcctggtggtgattgccacgcagttctcagagaccaagcagcgggaaagccagctgatgcgggagcagcgtgtgcggttcctgtccaacgccagcaccctggctagcttctctgagcccggcagctgctatgaggagctgctcaagtacctggtgtacatccttcgtaaggcagcccgcaggctggctcaggtctctcgggcagcaggtgtgcgggttgggctgctcagcagcccagcacccctcgggggccaggagacccagcccagcagcagctgctctcgctcccaccgccgcctatccgtccaccacctggtgcaccaccaccaccaccatcaccaccactaccacctgggcaatgggacgctcagggccccccgggccagcccggagatccaggacagggatgccaatgggtcccgccggctcatgctgccaccaccctcgacgcctgccctctccggggccccccctggtggcgcagagtctgtgcacagcttctaccatgccgactgccacttagagccagtccgctgccaggcgccccctcccaggtccccatctgaggcatccggcaggactgtgggcagcgggaaggtgtatcccaccgtgcacaccagccctccaccggagacgctgaaggagaaggcactagtagaggtggctgccagctctgggcccccaaccctcaccagcctcaacatcccacccgggccctacagctccatgcacaagctgctggagacacagagtacaggtgcctgccaaagctcttgcaagatctccagcccttgcttgaaagcagacagtggagcctgtggtccagacagctgcccctactgtgcccgggccggggcaggggaggtggagctcgccgaccgtgaaatgcctgactcagacagcgaggcagtttatgagttcacacaggatgcccagcacagcgacctccgggacccccacagccggcggcaacggagcctgggcccagatgcagagcccagctctgtgctggccttctggaggctaatctgtgacaccttccgaaagattgtggacagcaagtactttggccggggaatcatgatcgccatcctggtcaacacactcagcatgggcatcgaataccacgagcagcccgaggagcttaccaacgccctagaaatcagcaacatcgtcttcaccagcctctttgccctggagatgctgctgaagctgcttgtgtatggtccctttggctacatcaagaatccctacaacatcttcgatggtgtcattgtggtcatcagcgtgtgggagatcgtgggccagcaggggggcggcctgtcggtgctgcggaccttccgcctgatgcgtgtgctgaagctggtgcgcttcctgccggcgctgcagcggcagctggtggtgctcatgaagaccatggacaacgtggccaccttctgcatgctgcttatgctcttcatcttcatcttcagcatcctgggcatgcatctcttcggctgcaagtttgcctctgagcgggatggggacaccctgccagaccggaagaattttgactccttgctctgggccatcgtcactgtctttcagatcctgacccaggaggactggaacaaagtcctctacaatggtatggcctccacgtcgtcctgggcggccctttatttcattgccctcatgaccttcggcaactacgtgctcttcaatttgctggtcgccattctggtggagggcttccaggcggagggagatgccaacaagtccgaatcagagcccgatttcttctcacccagcctggatggtgatggggacaggaagaagtgcttggccttggtgtccctgggagagcacccggagctgcggaagagcctgctgccgcctctcatcatccacacggccgccacacccatgtcgctgcccaagagcaccagcacgggcctgggcgaggcgctgggccctgcgtcgcgccgcaccagcagcagcgggtcggcagagcctggggcggcccacgagatgaagtcaccgcccagcgcccgcagctctccgcacagcccctggagcgctgcaagcagctggaccagcaggcgctccagccggaacagcctcggccgtgcacccagcctgaagcggagaagcccaagtggagagcggcggtccctgttgtcgggagaaggccaggagagccaggatgaagaggagagctcagaagaggagcgggccagccctgcgggcagtgaccatcgccacagggggtccctggagcgggaggccaagagttcctttgacctgccagacacactgcaggtgccagggctgcatcgcactgccagtggccgagggtctgcttctgagcaccaggactgcaatggcaagtcggcttcagggcgcctggcccgggccctgcggcctgatgaccccccactggatggggatgacgccgatgacgagggcaacctgagcaaaggggaacgggtccgcgcgtggatccgagcccgactccctgcctgctgcctcgagcgagactcctggtcagcctacatcttccctcctcagtccaggttccgcctcctgtgtcaccggatcatcacccacaagatgttcgaccacgtggtccttgtcatcatcttccttaactgcatcaccatcgccatggagcgccccaaaattgacccccacagcgctgaacgcatcttcctgaccctctccaattacatcttcaccgcagtctttctggctgaaatgacagtgaaggtggtggcactgggctggtgcttcggggagcaggcgtacctgcggagcagttggaacgtgctggacgggctgttggtgctcatctccgtcatcgacattctggtgtccatggtctctgacagcggcaccaagatcctgggcatgctgagggtgctgcggctgctgcggaccctgcgcccgctcagggtgatcagccgggcgcaggggctgaagctggtggtggagacgctgatgtcctcactgaaacccatcggcaacattgtagtcatctgctgtgccttcttcatcattttcggcatcttgggggtgcagctcttcaaagggaagtttttcgtgtgccagggcgaggataccaggaacatcaccaataaatcggactgtgccgaggccagttaccggtgggtccggcacaagtacaactttgacaaccttggccaggccctgatgtccctgttcgttttggcctccaaggatggttgggtggacatcatgtacgatgggctggatgctgtgggcgtggaccagcagcccatcatgaaccacaacccctggatgctgctgtacttcatctcgttcctgctcattgtggccttctttgtcctgaacatgtttgtgggtgtggtggtggagaacttccacaagtgtcggcagcaccaggaggaagaggaggcccggcggcgggaggagaagcgcctacgaagactggagaaaaagagaaggaatctaatgctggacgatgtaattgcttccggcagctcagccagcgctgcgtcagaagcccagtgcaaaccttactactccgactactcccgcttccggctcctcgtccaccacttgtgcaccagccactacctggacctcttcatcacaggtgtcatcgggctgaacgtggtcaccatggccatggagcactaccagcagccccagattctggatgaggctctgaagatctgcaactacatcttcactgtcatctttgtcttggagtcagttttcaaacttgtggcctttggtttccgtcggttcttccaggacaggtggaaccagctggacctggccattgtgctgctgtccatcatgggcatcacgctggaggaaatcgaggtcaacgcctcgctgcccatcaaccccaccatcatccgcatcatgagggtgctgcgcattgcccgagtgctgaagctgctgaagatggctgtgggcatgcgggcgctgctggacacggtgatgcaggccctgccccaggtggggaacctgggacttctcttcatgttgttgtttttcatctttgcagctctgggcgtggagctctttggagacctggagtgtgacgagacacacccctgtgagggcctgggccgtcatgccacctttcggaactttggcatggccttcctaaccctcttccgagtctccacaggtgacaattggaatggcattatgaaggacaccctccgggactgtgaccaggagtccacctgctacaacacggtcatctcgcctatctactttgtgtccttcgtgctgacggcccagttcgtgctagtcaacgtggtgatcgccgtgctgatgaagcacctggaggagagcaacaaggaggccaaggaggaggccgagctagaggctgagctggagctggagatgaagaccctcagcccccagccccactcgccactgggcagccccttcctctggcctggggtcgagggccccgacagccccgacagccccaagcctggggctctgcacccagcggcccacgcgagatcagcctcccacttttccctggagcaccccacgatgcagccccaccccacggagctgccaggaccagacttactgactgtgcggaagtctggggtcagccgaacgcactctctgcccaatgacagctacatgtgtcggcatgggagcactgccgaggggcccctgggacacaggggctgggggctccccaaagctcagtcaggctccgtcttgtccgttcactcccagccagcagataccagctacatcctgcagcttcccaaagatgcacctcatctgctccagccccacagcgccccaacctggggcaccatccccaaactgcccccaccaggacgctcccctttggctcagaggccactcaggcgccaggcagcaataaggactgactccttggacgttcagggtctgggcagccgggaagacctgctggcagaggtgagtgggccctccccgcccctggcccgggcctactctttctggggccagtcaagtacccaggcacagcagcactcccgcagccacagcaagatctccaagcacatgaccccgccagccccttgcccaggcccagaacccaactggggcaagggccctccagagaccagaagcagcttagagttggacacggagctgagctggatttcaggagacctcctgccccctggcggccaggaggagcccccatccccacgggacctgaagaagtgctacagcgtggaggcccagagctgccagcgccggcctacgtcctggctggatgagcagaggagacactctatcgccgtcagctgcctggacagcggctcccaaccccacctgggcacagacccctctaaccttgggggccagcctcttggggggcctgggagccggcccaagaaaaaactcagcccgcctagtatcaccatagacccccccgagagccaaggtcctcggaccccgcccagccctggtatctgcctccggaggagggctccgtccagcgactccaaggatcccttggcctctggcccccctgacagcatggctgcctcgccctccccaaagaaagatgtgctgagtctctccggtttatcctctgacccagcagacctggacccctgagtcctgccccactttcccactcacctttctccactgggtgccaagtcctagctcctcctcctgggctatattcctgacaaaagttccatatagacaccaaggaggcggaggcgctcctccctgcctcagtggctctgggtacctgcaagcagaacttccaaagagagttaaaagcagcagccccggcaactctggctccaggcagaaggagaggcccggtgcagctgaggttcccgacaccagaagctgttgggagaaagcaatacgtttgtgcagaatctctatgtatattctattttattaaattaattgaatctag

SEQ ID NO: 113239 - DNA, 4899 bp, Homo sapiens
  Payload ID: 2145
  Gene Symbol: CACNA1G
  Gene Name: calcium channel, voltage-dependent, T type, alpha 1G subunit
  ENST ID: ENST00000416767
  CDS Start-End: 29-4696
atcgcccggggccccggctggccagaggatggacgaggaggaggatggagcgggcgccgaggagtcgggacagccccggagcttcatgcggctcaacgacctgtcgggggccgggggccggccggggccggggtcagcagaaaaggacccgggcagcgcggactccgaggcggaggggctgccgtacccggcgctggccccggtggttttcttctacttgagccaggacagccgcccgcggagctggtgtctccgcacggtctgtaacccctggtttgagcgcatcagcatgttggtcatccttctcaactgcgtgaccctgggcatgttccggccatgcgaggacatcgcctgtgactcccagcgctgccggatcctgcaggcctttgatgacttcatctttgccttctttgccgtggagatggtggtgaagatggtggccttgggcatctttgggaaaaagtgttacctgggagacacttggaaccggcttgactttttcatcgtcatcgcagggatgctggagtactcgctggacctgcagaacgtcagcttctcagctgtcaggacagtccgtgtgctgcgaccgctcagggccattaaccgggtgcccagcatgcgcatccttgtcacgttgctgctggatacgctgcccatgctgggcaacgtcctgctgctctgcttcttcgtcttcttcatcttcggcatcgtcggcgtccagctgtgggcagggctgcttcggaaccgatgcttcctacctgagaatttcagcctccccctgagcgtggacctggagcgctattaccagacagagaacgaggatgagagccccttcatctgctcccagccacgcgagaacggcatgcggtcctgcagaagcgtgcccacgctgcgcggggacgggggcggtggcccaccttgcggtctggactatgaggcctacaacagctccagcaacaccacctgtgtcaactggaaccagtactacaccaactgctcagcgggggagcacaaccccttcaagggcgccatcaactttgacaacattggctatgcctggatcgccatcttccaggtcatcacgctggagggctgggtcgacatcatgtactttgtgatggatgctcattccttctacaatttcatctacttcatcctcctcatcatcgtgggctccttcttcatgatcaacctgtgcctggtggtgattgccacgcagttctcagagaccaagcagcgggaaagccagctgatgcgggagcagcgtgtgcggttcctgtccaacgccagcaccctggctagcttctctgagcccggcagctgctatgaggagctgctcaagtacctggtgtacatccttcgtaaggcagcccgcaggctggctcaggtctctcgggcagcaggtgtgcgggttgggctgctcagcagcccagcacccctcgggggccaggagacccagcccagcagcagctgctctcgctcccaccgccgcctatccgtccaccacctggtgcaccaccaccaccaccatcaccaccactaccacctgggcaatgggacgctcagggccccccgggccagcccggagatccaggacagggatgccaatgggtcccgccggctcatgctgccaccaccctcgacgcctgccctctccggggccccccctggtggcgcagagtctgtgcacagcttctaccatgccgactgccacttagagccagtccgctgccaggcgccccctcccaggtccccatctgaggcatccggcaggactgtgggcagcgggaaggtgtatcccaccgtgcacaccagccctccaccggagacgctgaaggagaaggcactagtagaggtggctgccagctctgggcccccaaccctcaccagcctcaacatcccacccgggccctacagctccatgcacaagctgctggagacacagagtacaggtgcctgccaaagctcttgcaagatctccagcccttgcttgaaagcagacagtggagcctgtggtccagacagctgcccctactgtgcccgggccggggcaggggaggtggagctcgccgaccgtgaaatgcctgactcagacagcgaggcagtttatgagttcacacaggatgcccagcacagcgacctccgggacccccacagccggcggcaacggagcctgggcccagatgcagagcccagctctgtgctggccttctggaggctaatctgtgacaccttccgaaagattgtggacagcaagtactttggccggggaatcatgatcgccatcctggtcaacacactcagcatgggcatcgaataccacgagcagcccgaggagcttaccaacgccctagaaatcagcaacatcgtcttcaccagcctctttgccctggagatgctgctgaagctgcttgtgtatggtccctttggctacatcaagaatccctacaacatcttcgatggtgtcattgtggtcatcagcgtgtgggagatcgtgggccagcaggggggcggcctgtcggtgctgcggaccttccgcctgatgcgtgtgctgaagctggtgcgcttcctgccggcgctgcagcggcagctggtggtgctcatgaagaccatggacaacgtggccaccttctgcatgctgcttatgctcttcatcttcatcttcagcatcctgggcatgcatctcttcggctgcaagtttgcctctgagcgggatggggacaccctgccagaccggaagaattttgactccttgctctgggccatcgtcactgtctttcagatcctgacccaggaggactggaacaaagtcctctacaatggtatggcctccacgtcgtcctgggcggccctttatttcattgccctcatgaccttcggcaactacgtgctcttcaatttgctggtcgccattctggtggagggcttccaggcggaggaaatcagcaaacgggaagatgcgagtggacagttaagctgtattcagctgcctgtcgactcccaggggggagatgccaacaagtccgaatcagagcccgatttcttctcacccagcctggatggtgatggggacaggaagaagtgcttggccttggtgtccctgggagagcacccggagctgcggaagagcctgctgccgcctctcatcatccacacggccgccacacccatgtcgctgcccaagagcaccagcacgggcctgggcgaggcgctgggccctgcgtcgcgccgcaccagcagcagcgggtcggcagagcctggggcggcccacgagatgaagtcaccgcccagcgcccgcagctctccgcacagcccctggagcgctgcaagcagctggaccagcaggcgctccagccggaacagcctcggccgtgcacccagcctgaagcggagaagcccaagtggagagcggcggtccctgttgtcgggagaaggccaggagagccaggatgaagaggagagctcagaagaggagcgggccagccctgcgggcagtgaccatcgccacagggggtccctggagcgggaggccaagagttcctttgacctgccagacacactgcaggtgccagggctgcatcgcactgccagtggccgagggtctgcttctgagcaccaggactgcaatggcaagtcggcttcagggcgcctggcccgggccctgcggcctgatgaccccccactggatggggatgacgccgatgacgagggcaacctgagcaaaggggaacgggtccgcgcgtggatccgagcccgactccctgcctgctgcctcgagcgagactcctggtcagcctacatcttccctcctcagtccaggttccgcctcctgtgtcaccggatcatcacccacaagatgttcgaccacgtggtccttgtcatcatcttccttaactgcatcaccatcgccatggagcgccccaaaattgacccccacagcgctgaacgcatcttcctgaccctctccaattacatcttcaccgcagtctttctggctgaaatgacagtgaaggtggtggcactgggctggtgcttcggggagcaggcgtacctgcggagcagttggaacgtgctggacgggctgttggtgctcatctccgtcatcgacattctggtgtccatggtctctgacagcggcaccaagatcctgggcatgctgagggtgctgcggctgctgcggaccctgcgcccgctcagggtgatcagccgggcgcaggggctgaagctggtggtggagacgctgatgtcctcactgaaacccatcggcaacattgtagtcatctgctgtgccttcttcatcattttcggcatcttgggggtgcagctcttcaaagggaagtttttcgtgtgccagggcgaggataccaggaacatcaccaataaatcggactgtgccgaggccagttaccggtgggtccggcacaagtacaactttgacaaccttggccaggtgagccccaggctcagaggtggggctgtggtgaaggaggctggagggggcacagggccatgcttagtgatacctgctgactccggtggaggtgggctccacgaagagatcagcccttcacaccctctgctgtctaaccaccagcatgtcgcaaagcccagtccatcccacagtgccccaaaaagtgggcccatggggtctctagccgtccttaaagatgaagaaacagaggctcagagagggtaaggggcttgcccagggccacagagctacatggtggagcaggaagcacacgtggcagtgggggcaggcagccctggatgtgaatcctgtgcaaatcctgaccccaccattgtcagctcaatgacctggagcagctgacttaccagggcctcagtttcattaactggtgaatggagtcataatagaatctcctcggaggtcacaat

SEQ ID NO: 113240 - DNA, 7226 bp, Homo sapiens
  Payload ID: 2145
  Gene Symbol: CACNA1G
  Gene Name: calcium channel, voltage-dependent, T type, alpha 1G subunit
  Uniprot ID: O43497
  ENST ID: ENST00000442258
  CDS Start-End: 176-6907
atgcccctgcgggcagggggagctgggctgaactggccctcccgggggctcagcttgcgccctagagcccaccagatgtgcccccgccggggcccccgggttgcgtgaggacacctcctctgaggggcgccgcttgcccctctccggatcgcccggggccccggctggccagaggatggacgaggaggaggatggagcgggcgccgaggagtcgggacagccccggagcttcatgcggctcaacgacctgtcgggggccgggggccggccggggccggggtcagcagaaaaggacccgggcagcgcggactccgaggcggaggggctgccgtacccggcgctggccccggtggttttcttctacttgagccaggacagccgcccgcggagctggtgtctccgcacggtctgtaacccctggtttgagcgcatcagcatgttggtcatccttctcaactgcgtgaccctgggcatgttccggccatgcgaggacatcgcctgtgactcccagcgctgccggatcctgcaggcctttgatgacttcatctttgccttctttgccgtggagatggtggtgaagatggtggccttgggcatctttgggaaaaagtgttacctgggagacacttggaaccggcttgactttttcatcgtcatcgcagggatgctggagtactcgctggacctgcagaacgtcagcttctcagctgtcaggacagtccgtgtgctgcgaccgctcagggccattaaccgggtgcccagcatgcgcatccttgtcacgttgctgctggatacgctgcccatgctgggcaacgtcctgctgctctgcttcttcgtcttcttcatcttcggcatcgtcggcgtccagctgtgggcagggctgcttcggaaccgatgcttcctacctgagaatttcagcctccccctgagcgtggacctggagcgctattaccagacagagaacgaggatgagagccccttcatctgctcccagccacgcgagaacggcatgcggtcctgcagaagcgtgcccacgctgcgcggggacgggggcggtggcccaccttgcggtctggactatgaggcctacaacagctccagcaacaccacctgtgtcaactggaaccagtactacaccaactgctcagcgggggagcacaaccccttcaagggcgccatcaactttgacaacattggctatgcctggatcgccatcttccaggtcatcacgctggagggctgggtcgacatcatgtactttgtgatggatgctcattccttctacaatttcatctacttcatcctcctcatcatcgtgggctccttcttcatgatcaacctgtgcctggtggtgattgccacgcagttctcagagaccaagcagcgggaaagccagctgatgcgggagcagcgtgtgcggttcctgtccaacgccagcaccctggctagcttctctgagcccggcagctgctatgaggagctgctcaagtacctggtgtacatccttcgtaaggcagcccgcaggctggctcaggtctctcgggcagcaggtgtgcgggttgggctgctcagcagcccagcacccctcgggggccaggagacccagcccagcagcagctgctctcgctcccaccgccgcctatccgtccaccacctggtgcaccaccaccaccaccatcaccaccactaccacctgggcaatgggacgctcagggccccccgggccagcccggagatccaggacagggatgccaatgggtcccgccggctcatgctgccaccaccctcgacgcctgccctctccggggccccccctggtggcgcagagtctgtgcacagcttctaccatgccgactgccacttagagccagtccgctgccaggcgccccctcccaggtccccatctgaggcatccggcaggactgtgggcagcgggaaggtgtatcccaccgtgcacaccagccctccaccggagacgctgaaggagaaggcactagtagaggtggctgccagctctgggcccccaaccctcaccagcctcaacatcccacccgggccctacagctccatgcacaagctgctggagacacagagtacaggtgcctgccaaagctcttgcaagatctccagcccttgcttgaaagcagacagtggagcctgtggtccagacagctgcccctactgtgcccgggccggggcaggggaggtggagctcgccgaccgtgaaatgcctgactcagacagcgaggcagtttatgagttcacacaggatgcccagcacagcgacctccgggacccccacagccggcggcaacggagcctgggcccagatgcagagcccagctctgtgctggccttctggaggctaatctgtgacaccttccgaaagattgtggacagcaagtactttggccggggaatcatgatcgccatcctggtcaacacactcagcatgggcatcgaataccacgagcagcccgaggagcttaccaacgccctagaaatcagcaacatcgtcttcaccagcctctttgccctggagatgctgctgaagctgcttgtgtatggtccctttggctacatcaagaatccctacaacatcttcgatggtgtcattgtggtcatcagcgtgtgggagatcgtgggccagcaggggggcggcctgtcggtgctgcggaccttccgcctgatgcgtgtgctgaagctggtgcgcttcctgccggcgctgcagcggcagctggtggtgctcatgaagaccatggacaacgtggccaccttctgcatgctgcttatgctcttcatcttcatcttcagcatcctgggcatgcatctcttcggctgcaagtttgcctctgagcgggatggggacaccctgccagaccggaagaattttgactccttgctctgggccatcgtcactgtctttcagatcctgacccaggaggactggaacaaagtcctctacaatggtatggcctccacgtcgtcctgggcggccctttatttcattgccctcatgaccttcggcaactacgtgctcttcaatttgctggtcgccattctggtggagggcttccaggcggagggagatgccaacaagtccgaatcagagcccgatttcttctcacccagcctggatggtgatggggacaggaagaagtgcttggccttggtgtccctgggagagcacccggagctgcggaagagcctgctgccgcctctcatcatccacacggccgccacacccatgtcgctgcccaagagcaccagcacgggcctgggcgaggcgctgggccctgcgtcgcgccgcaccagcagcagcgggtcggcagagcctggggcggcccacgagatgaagtcaccgcccagcgcccgcagctctccgcacagcccctggagcgctgcaagcagctggaccagcaggcgctccagccggaacagcctcggccgtgcacccagcctgaagcggagaagcccaagtggagagcggcggtccctgttgtcgggagaaggccaggagagccaggatgaagaggagagctcagaagaggagcgggccagccctgcgggcagtgaccatcgccacagggggtccctggagcgggaggccaagagttcctttgacctgccagacacactgcaggtgccagggctgcatcgcactgccagtggccgagggtctgcttctgagcaccaggactgcaatggcaagtcggcttcagggcgcctggcccgggccctgcggcctgatgaccccccactggatggggatgacgccgatgacgagggcaacctgagcaaaggggaacgggtccgcgcgtggatccgagcccgactccctgcctgctgcctcgagcgagactcctggtcagcctacatcttccctcctcagtccaggttccgcctcctgtgtcaccggatcatcacccacaagatgttcgaccacgtggtccttgtcatcatcttccttaactgcatcaccatcgccatggagcgccccaaaattgacccccacagcgctgaacgcatcttcctgaccctctccaattacatcttcaccgcagtctttctggctgaaatgacagtgaaggtggtggcactgggctggtgcttcggggagcaggcgtacctgcggagcagttggaacgtgctggacgggctgttggtgctcatctccgtcatcgacattctggtgtccatggtctctgacagcggcaccaagatcctgggcatgctgagggtgctgcggctgctgcggaccctgcgcccgctcagggtgatcagccgggcgcaggggctgaagctggtggtggagacgctgatgtcctcactgaaacccatcggcaacattgtagtcatctgctgtgccttcttcatcattttcggcatcttgggggtgcagctcttcaaagggaagtttttcgtgtgccagggcgaggataccaggaacatcaccaataaatcggactgtgccgaggccagttaccggtgggtccggcacaagtacaactttgacaaccttggccaggccctgatgtccctgttcgttttggcctccaaggatggttgggtggacatcatgtacgatgggctggatgctgtgggcgtggaccagcagcccatcatgaaccacaacccctggatgctgctgtacttcatctcgttcctgctcattgtggccttctttgtcctgaacatgtttgtgggtgtggtggtggagaacttccacaagtgtcggcagcaccaggaggaagaggaggcccggcggcgggaggagaagcgcctacgaagactggagaaaaagagaaggaaagcccagtgcaaaccttactactccgactactcccgcttccggctcctcgtccaccacttgtgcaccagccactacctggacctcttcatcacaggtgtcatcgggctgaacgtggtcaccatggccatggagcactaccagcagccccagattctggatgaggctctgaagatctgcaactacatcttcactgtcatctttgtcttggagtcagttttcaaacttgtggcctttggtttccgtcggttcttccaggacaggtggaaccagctggacctggccattgtgctgctgtccatcatgggcatcacgctggaggaaatcgaggtcaacgcctcgctgcccatcaaccccaccatcatccgcatcatgagggtgctgcgcattgcccgagtgctgaagctgctgaagatggctgtgggcatgcgggcgctgctggacacggtgatgcaggccctgccccaggtggggaacctgggacttctcttcatgttgttgtttttcatctttgcagctctgggcgtggagctctttggagacctggagtgtgacgagacacacccctgtgagggcctgggccgtcatgccacctttcggaactttggcatggccttcctaaccctcttccgagtctccacaggtgacaattggaatggcattatgaaggacaccctccgggactgtgaccaggagtccacctgctacaacacggtcatctcgcctatctactttgtgtccttcgtgctgacggcccagttcgtgctagtcaacgtggtgatcgccgtgctgatgaagcacctggaggagagcaacaaggaggccaaggaggaggccgagctagaggctgagctggagctggagatgaagaccctcagcccccagccccactcgccactgggcagccccttcctctggcctggggtcgagggccccgacagccccgacagccccaagcctggggctctgcacccagcggcccacgcgagatcagcctcccacttttccctggagcaccccacgatgcagccccaccccacggagctgccaggaccagacttactgactgtgcggaagtctggggtcagccgaacgcactctctgcccaatgacagctacatgtgtcggcatgggagcactgccgaggggcccctgggacacaggggctgggggctccccaaagctcagtcaggctccgtcttgtccgttcactcccagccagcagataccagctacatcctgcagcttcccaaagatgcacctcatctgctccagccccacagcgccccaacctggggcaccatccccaaactgcccccaccaggacgctcccctttggctcagaggccactcaggcgccaggcagcaataaggactgactccttggacgttcagggtctgggcagccgggaagacctgctggcagaggtgagtgggccctccccgcccctggcccgggcctactctttctggggccagtcaagtacccaggcacagcagcactcccgcagccacagcaagatctccaagcacatgaccccgccagccccttgcccaggcccagaacccaactggggcaagggccctccagagaccagaagcagcttagagttggacacggagctgagctggatttcaggagacctcctgccccctggcggccaggaggagcccccatccccacgggacctgaagaagtgctacagcgtggaggcccagagctgccagcgccggcctacgtcctggctggatgagcagaggagacactctatcgccgtcagctgcctggacagcggctcccaaccccacctgggcacagacccctctaaccttgggggccagcctcttggggggcctgggagccggcccaagaaaaaactcagcccgcctagtatcaccatagacccccccgagagccaaggtcctcggaccccgcccagccctggtatctgcctccggaggagggctccgtccagcgactccaaggatcccttggcctctggcccccctgacagcatggctgcctcgccctccccaaagaaagatgtgctgagtctctccggtttatcctctgacccagcagacctggacccctgagtcctgccccactttcccactcacctttctccactgggtgccaagtcctagctcctcctcctgggctatattcctgacaaaagttccatatagacaccaaggaggcggaggcgctcctccctgcctcagtggctctgggtacctgcaagcagaacttccaaagagagttaaaagcagcagccccggcaactctggctccaggcagaaggagaggcccggtgcagctgaggttcccgacaccagaagctgttgggagaaagcaatacgtttgtgcagaatctctatgtatattctattttattaaattaattgaatctag

SEQ ID NO: 113241 - DNA, 7120 bp, Homo sapiens
  Payload ID: 2145
  Gene Symbol: CACNA1G
  Gene Name: calcium channel, voltage-dependent, T type, alpha 1G subunit
  Uniprot ID: O43497
  ENST ID: ENST00000429973
  CDS Start-End: 1-6801
atggacgaggaggaggatggagcgggcgccgaggagtcgggacagccccggagcttcatgcggctcaacgacctgtcgggggccgggggccggccggggccggggtcagcagaaaaggacccgggcagcgcggactccgaggcggaggggctgccgtacccggcgctggccccggtggttttcttctacttgagccaggacagccgcccgcggagctggtgtctccgcacggtctgtaacccctggtttgagcgcatcagcatgttggtcatccttctcaactgcgtgaccctgggcatgttccggccatgcgaggacatcgcctgtgactcccagcgctgccggatcctgcaggcctttgatgacttcatctttgccttctttgccgtggagatggtggtgaagatggtggccttgggcatctttgggaaaaagtgttacctgggagacacttggaaccggcttgactttttcatcgtcatcgcagggatgctggagtactcgctggacctgcagaacgtcagcttctcagctgtcaggacagtccgtgtgctgcgaccgctcagggccattaaccgggtgcccagcatgcgcatccttgtcacgttgctgctggatacgctgcccatgctgggcaacgtcctgctgctctgcttcttcgtcttcttcatcttcggcatcgtcggcgtccagctgtgggcagggctgcttcggaaccgatgcttcctacctgagaatttcagcctccccctgagcgtggacctggagcgctattaccagacagagaacgaggatgagagccccttcatctgctcccagccacgcgagaacggcatgcggtcctgcagaagcgtgcccacgctgcgcggggacgggggcggtggcccaccttgcggtctggactatgaggcctacaacagctccagcaacaccacctgtgtcaactggaaccagtactacaccaactgctcagcgggggagcacaaccccttcaagggcgccatcaactttgacaacattggctatgcctggatcgccatcttccaggtcatcacgctggagggctgggtcgacatcatgtactttgtgatggatgctcattccttctacaatttcatctacttcatcctcctcatcatcgtgggctccttcttcatgatcaacctgtgcctggtggtgattgccacgcagttctcagagaccaagcagcgggaaagccagctgatgcgggagcagcgtgtgcggttcctgtccaacgccagcaccctggctagcttctctgagcccggcagctgctatgaggagctgctcaagtacctggtgtacatccttcgtaaggcagcccgcaggctggctcaggtctctcgggcagcaggtgtgcgggttgggctgctcagcagcccagcacccctcgggggccaggagacccagcccagcagcagctgctctcgctcccaccgccgcctatccgtccaccacctggtgcaccaccaccaccaccatcaccaccactaccacctgggcaatgggacgctcagggccccccgggccagcccggagatccaggacagggatgccaatgggtcccgccggctcatgctgccaccaccctcgacgcctgccctctccggggccccccctggtggcgcagagtctgtgcacagcttctaccatgccgactgccacttagagccagtccgctgccaggcgccccctcccaggtccccatctgaggcatccggcaggactgtgggcagcgggaaggtgtatcccaccgtgcacaccagccctccaccggagacgctgaaggagaaggcactagtagaggtggctgccagctctgggcccccaaccctcaccagcctcaacatcccacccgggccctacagctccatgcacaagctgctggagacacagagtacaggtgcctgccaaagctcttgcaagatctccagcccttgcttgaaagcagacagtggagcctgtggtccagacagctgcccctactgtgcccgggccggggcaggggaggtggagctcgccgaccgtgaaatgcctgactcagacagcgaggcagtttatgagttcacacaggatgcccagcacagcgacctccgggacccccacagccggcggcaacggagcctgggcccagatgcagagcccagctctgtgctggccttctggaggctaatctgtgacaccttccgaaagattgtggacagcaagtactttggccggggaatcatgatcgccatcctggtcaacacactcagcatgggcatcgaataccacgagcagcccgaggagcttaccaacgccctagaaatcagcaacatcgtcttcaccagcctctttgccctggagatgctgctgaagctgcttgtgtatggtccctttggctacatcaagaatccctacaacatcttcgatggtgtcattgtggtcatcagcgtgtgggagatcgtgggccagcaggggggcggcctgtcggtgctgcggaccttccgcctgatgcgtgtgctgaagctggtgcgcttcctgccggcgctgcagcggcagctggtggtgctcatgaagaccatggacaacgtggccaccttctgcatgctgcttatgctcttcatcttcatcttcagcatcctgggcatgcatctcttcggctgcaagtttgcctctgagcgggatggggacaccctgccagaccggaagaattttgactccttgctctgggccatcgtcactgtctttcagatcctgacccaggaggactggaacaaagtcctctacaatggtatggcctccacgtcgtcctgggcggccctttatttcattgccctcatgaccttcggcaactacgtgctcttcaatttgctggtcgccattctggtggagggcttccaggcggaggaaatcagcaaacgggaagatgcgagtggacagttaagctgtattcagctgcctgtcgactcccaggggggagatgccaacaagtccgaatcagagcccgatttcttctcacccagcctggatggtgatggggacaggaagaagtgcttggccttggtgtccctgggagagcacccggagctgcggaagagcctgctgccgcctctcatcatccacacggccgccacacccatgtcgctgcccaagagcaccagcacgggcctgggcgaggcgctgggccctgcgtcgcgccgcaccagcagcagcgggtcggcagagcctggggcggcccacgagatgaagtcaccgcccagcgcccgcagctctccgcacagcccctggagcgctgcaagcagctggaccagcaggcgctccagccggaacagcctcggccgtgcacccagcctgaagcggagaagcccaagtggagagcggcggtccctgttgtcgggagaaggccaggagagccaggatgaagaggagagctcagaagaggagcgggccagccctgcgggcagtgaccatcgccacagggggtccctggagcgggaggccaagagttcctttgacctgccagacacactgcaggtgccagggctgcatcgcactgccagtggccgagggtctgcttctgagcaccaggactgcaatggcaagtcggcttcagggcgcctggcccgggccctgcggcctgatgaccccccactggatggggatgacgccgatgacgagggcaacctgagcaaaggggaacgggtccgcgcgtggatccgagcccgactccctgcctgctgcctcgagcgagactcctggtcagcctacatcttccctcctcagtccaggttccgcctcctgtgtcaccggatcatcacccacaagatgttcgaccacgtggtccttgtcatcatcttccttaactgcatcaccatcgccatggagcgccccaaaattgacccccacagcgctgaacgcatcttcctgaccctctccaattacatcttcaccgcagtctttctggctgaaatgacagtgaaggtggtggcactgggctggtgcttcggggagcaggcgtacctgcggagcagttggaacgtgctggacgggctgttggtgctcatctccgtcatcgacattctggtgtccatggtctctgacagcggcaccaagatcctgggcatgctgagggtgctgcggctgctgcggaccctgcgcccgctcagggtgatcagccgggcgcaggggctgaagctggtggtggagacgctgatgtcctcactgaaacccatcggcaacattgtagtcatctgctgtgccttcttcatcattttcggcatcttgggggtgcagctcttcaaagggaagtttttcgtgtgccagggcgaggataccaggaacatcaccaataaatcggactgtgccgaggccagttaccggtgggtccggcacaagtacaactttgacaaccttggccaggccctgatgtccctgttcgttttggcctccaaggatggttgggtggacatcatgtacgatgggctggatgctgtgggcgtggaccagcagcccatcatgaaccacaacccctggatgctgctgtacttcatctcgttcctgctcattgtggccttctttgtcctgaacatgtttgtgggtgtggtggtggagaacttccacaagtgtcggcagcaccaggaggaagaggaggcccggcggcgggaggagaagcgcctacgaagactggagaaaaagagaaggaaagcccagtgcaaaccttactactccgactactcccgcttccggctcctcgtccaccacttgtgcaccagccactacctggacctcttcatcacaggtgtcatcgggctgaacgtggtcaccatggccatggagcactaccagcagccccagattctggatgaggctctgaagatctgcaactacatcttcactgtcatctttgtcttggagtcagttttcaaacttgtggcctttggtttccgtcggttcttccaggacaggtggaaccagctggacctggccattgtgctgctgtccatcatgggcatcacgctggaggaaatcgaggtcaacgcctcgctgcccatcaaccccaccatcatccgcatcatgagggtgctgcgcattgcccgagtgctgaagctgctgaagatggctgtgggcatgcgggcgctgctggacacggtgatgcaggccctgccccaggtggggaacctgggacttctcttcatgttgttgtttttcatctttgcagctctgggcgtggagctctttggagacctggagtgtgacgagacacacccctgtgagggcctgggccgtcatgccacctttcggaactttggcatggccttcctaaccctcttccgagtctccacaggtgacaattggaatggcattatgaaggacaccctccgggactgtgaccaggagtccacctgctacaacacggtcatctcgcctatctactttgtgtccttcgtgctgacggcccagttcgtgctagtcaacgtggtgatcgccgtgctgatgaagcacctggaggagagcaacaaggaggccaaggaggaggccgagctagaggctgagctggagctggagatgaagaccctcagcccccagccccactcgccactgggcagccccttcctctggcctggggtcgagggccccgacagccccgacagccccaagcctggggctctgcacccagcggcccacgcgagatcagcctcccacttttccctggagcaccccacgatgcagccccaccccacggagctgccaggaccagacttactgactgtgcggaagtctggggtcagccgaacgcactctctgcccaatgacagctacatgtgtcggcatgggagcactgccgaggggcccctgggacacaggggctgggggctccccaaagctcagtcaggctccgtcttgtccgttcactcccagccagcagataccagctacatcctgcagcttcccaaagatgcacctcatctgctccagccccacagcgccccaacctggggcaccatccccaaactgcccccaccaggacgctcccctttggctcagaggccactcaggcgccaggcagcaataaggactgactccttggacgttcagggtctgggcagccgggaagacctgctggcagaggtgagtgggccctccccgcccctggcccgggcctactctttctggggccagtcaagtacccaggcacagcagcactcccgcagccacagcaagatctccaagcacatgaccccgccagccccttgcccaggcccagaacccaactggggcaagggccctccagagaccagaagcagcttagagttggacacggagctgagctggatttcaggagacctcctgccccctggcggccaggaggagcccccatccccacgggacctgaagaagtgctacagcgtggaggcccagagctgccagcgccggcctacgtcctggctggatgagcagaggagacactctatcgccgtcagctgcctggacagcggctcccaaccccacctgggcacagacccctctaaccttgggggccagcctcttggggggcctgggagccggcccaagaaaaaactcagcccgcctagtatcaccatagacccccccgagagccaaggtcctcggaccccgcccagccctggtatctgcctccggaggagggctccgtccagcgactccaaggatcccttggcctctggcccccctgacagcatggctgcctcgccctccccaaagaaagatgtgctgagtctctccggtttatcctctgacccagcagacctggacccctgagtcctgccccactttcccactcacctttctccactgggtgccaagtcctagctcctcctcctgggctatattcctgacaaaagttccatatagacaccaaggaggcggaggcgctcctccctgcctcagtggctctgggtacctgcaagcagaacttccaaagagagttaaaagcagcagccccggcaactctggctccaggcagaaggagaggcccggtgcagctgaggttcccgacaccagaagctgttgggagaaagcaatacgtttgtgcagaatctctatgtatattctattttattaaattaattgaatctag

SEQ ID NO: 113242 - DNA, 7116 bp, Homo sapiens
  Payload ID: 2145
  Gene Symbol: CACNA1G
  Gene Name: calcium channel, voltage-dependent, T type, alpha 1G subunit
  Uniprot ID: O43497
  ENST ID: ENST00000507336
  CDS Start-End: 1-7101
atggacgaggaggaggatggagcgggcgccgaggagtcgggacagccccggagcttcatgcggctcaacgacctgtcgggggccgggggccggccggggccggggtcagcagaaaaggacccgggcagcgcggactccgaggcggaggggctgccgtacccggcgctggccccggtggttttcttctacttgagccaggacagccgcccgcggagctggtgtctccgcacggtctgtaacccctggtttgagcgcatcagcatgttggtcatccttctcaactgcgtgaccctgggcatgttccggccatgcgaggacatcgcctgtgactcccagcgctgccggatcctgcaggcctttgatgacttcatctttgccttctttgccgtggagatggtggtgaagatggtggccttgggcatctttgggaaaaagtgttacctgggagacacttggaaccggcttgactttttcatcgtcatcgcagggatgctggagtactcgctggacctgcagaacgtcagcttctcagctgtcaggacagtccgtgtgctgcgaccgctcagggccattaaccgggtgcccagcatgcgcatccttgtcacgttgctgctggatacgctgcccatgctgggcaacgtcctgctgctctgcttcttcgtcttcttcatcttcggcatcgtcggcgtccagctgtgggcagggctgcttcggaaccgatgcttcctacctgagaatttcagcctccccctgagcgtggacctggagcgctattaccagacagagaacgaggatgagagccccttcatctgctcccagccacgcgagaacggcatgcggtcctgcagaagcgtgcccacgctgcgcggggacgggggcggtggcccaccttgcggtctggactatgaggcctacaacagctccagcaacaccacctgtgtcaactggaaccagtactacaccaactgctcagcgggggagcacaaccccttcaagggcgccatcaactttgacaacattggctatgcctggatcgccatcttccaggtcatcacgctggagggctgggtcgacatcatgtactttgtgatggatgctcattccttctacaatttcatctacttcatcctcctcatcatcgtgggctccttcttcatgatcaacctgtgcctggtggtgattgccacgcagttctcagagaccaagcagcgggaaagccagctgatgcgggagcagcgtgtgcggttcctgtccaacgccagcaccctggctagcttctctgagcccggcagctgctatgaggagctgctcaagtacctggtgtacatccttcgtaaggcagcccgcaggctggctcaggtctctcgggcagcaggtgtgcgggttgggctgctcagcagcccagcacccctcgggggccaggagacccagcccagcagcagctgctctcgctcccaccgccgcctatccgtccaccacctggtgcaccaccaccaccaccatcaccaccactaccacctgggcaatgggacgctcagggccccccgggccagcccggagatccaggacagggatgccaatgggtcccgccggctcatgctgccaccaccctcgacgcctgccctctccggggccccccctggtggcgcagagtctgtgcacagcttctaccatgccgactgccacttagagccagtccgctgccaggcgccccctcccaggtccccatctgaggcatccggcaggactgtgggcagcgggaaggtgtatcccaccgtgcacaccagccctccaccggagacgctgaaggagaaggcactagtagaggtggctgccagctctgggcccccaaccctcaccagcctcaacatcccacccgggccctacagctccatgcacaagctgctggagacacagagtacaggtgcctgccaaagctcttgcaagatctccagcccttgcttgaaagcagacagtggagcctgtggtccagacagctgcccctactgtgcccgggccggggcaggggaggtggagctcgccgaccgtgaaatgcctgactcagacagcgaggcagtttatgagttcacacaggatgcccagcacagcgacctccgggacccccacagccggcggcaacggagcctgggcccagatgcagagcccagctctgtgctggccttctggaggctaatctgtgacaccttccgaaagattgtggacagcaagtactttggccggggaatcatgatcgccatcctggtcaacacactcagcatgggcatcgaataccacgagcagcccgaggagcttaccaacgccctagaaatcagcaacatcgtcttcaccagcctctttgccctggagatgctgctgaagctgcttgtgtatggtccctttggctacatcaagaatccctacaacatcttcgatggtgtcattgtggtcatcagcgtgtgggagatcgtgggccagcaggggggcggcctgtcggtgctgcggaccttccgcctgatgcgtgtgctgaagctggtgcgcttcctgccggcgctgcagcggcagctggtggtgctcatgaagaccatggacaacgtggccaccttctgcatgctgcttatgctcttcatcttcatcttcagcatcctgggcatgcatctcttcggctgcaagtttgcctctgagcgggatggggacaccctgccagaccggaagaattttgactccttgctctgggccatcgtcactgtctttcagatcctgacccaggaggactggaacaaagtcctctacaatggtatggcctccacgtcgtcctgggcggccctttatttcattgccctcatgaccttcggcaactacgtgctcttcaatttgctggtcgccattctggtggagggcttccaggcggaggaaatcagcaaacgggaagatgcgagtggacagttaagctgtattcagctgcctgtcgactcccaggggggagatgccaacaagtccgaatcagagcccgatttcttctcacccagcctggatggtgatggggacaggaagaagtgcttggccttggtgtccctgggagagcacccggagctgcggaagagcctgctgccgcctctcatcatccacacggccgccacacccatgtcgctgcccaagagcaccagcacgggcctgggcgaggcgctgggccctgcgtcgcgccgcaccagcagcagcgggtcggcagagcctggggcggcccacgagatgaagtcaccgcccagcgcccgcagctctccgcacagcccctggagcgctgcaagcagctggaccagcaggcgctccagccggaacagcctcggccgtgcacccagcctgaagcggagaagcccaagtggagagcggcggtccctgttgtcgggagaaggccaggagagccaggatgaagaggagagctcagaagaggagcgggccagccctgcgggcagtgaccatcgccacagggggtccctggagcgggaggccaagagttcctttgacctgccagacacactgcaggtgccagggctgcatcgcactgccagtggccgagggtctgcttctgagcaccaggactgcaatggcaagtcggcttcagggcgcctggcccgggccctgcggcctgatgaccccccactggatggggatgacgccgatgacgagggcaacctgagcaaaggggaacgggtccgcgcgtggatccgagcccgactccctgcctgctgcctcgagcgagactcctggtcagcctacatcttccctcctcagtccaggttccgcctcctgtgtcaccggatcatcacccacaagatgttcgaccacgtggtccttgtcatcatcttccttaactgcatcaccatcgccatggagcgccccaaaattgacccccacagcgctgaacgcatcttcctgaccctctccaattacatcttcaccgcagtctttctggctgaaatgacagtgaaggtggtggcactgggctggtgcttcggggagcaggcgtacctgcggagcagttggaacgtgctggacgggctgttggtgctcatctccgtcatcgacattctggtgtccatggtctctgacagcggcaccaagatcctgggcatgctgagggtgctgcggctgctgcggaccctgcgcccgctcagggtgatcagccgggcgcaggggctgaagctggtggtggagacgctgatgtcctcactgaaacccatcggcaacattgtagtcatctgctgtgccttcttcatcattttcggcatcttgggggtgcagctcttcaaagggaagtttttcgtgtgccagggcgaggataccaggaacatcaccaataaatcggactgtgccgaggccagttaccggtgggtccggcacaagtacaactttgacaaccttggccaggccctgatgtccctgttcgttttggcctccaaggatggttgggtggacatcatgtacgatgggctggatgctgtgggcgtggaccagcagcccatcatgaaccacaacccctggatgctgctgtacttcatctcgttcctgctcattgtggccttctttgtcctgaacatgtttgtgggtgtggtggtggagaacttccacaagtgtcggcagcaccaggaggaagaggaggcccggcggcgggaggagaagcgcctacgaagactggagaaaaagagaaggagtaaggagaagcagatggctgaagcccagtgcaaaccttactactccgactactcccgcttccggctcctcgtccaccacttgtgcaccagccactacctggacctcttcatcacaggtgtcatcgggctgaacgtggtcaccatggccatggagcactaccagcagccccagattctggatgaggctctgaagatctgcaactacatcttcactgtcatctttgtcttggagtcagttttcaaacttgtggcctttggtttccgtcggttcttccaggacaggtggaaccagctggacctggccattgtgctgctgtccatcatgggcatcacgctggaggaaatcgaggtcaacgcctcgctgcccatcaaccccaccatcatccgcatcatgagggtgctgcgcattgcccgagtgctgaagctgctgaagatggctgtgggcatgcgggcgctgctggacacggtgatgcaggccctgccccaggtggggaacctgggacttctcttcatgttgttgtttttcatctttgcagctctgggcgtggagctctttggagacctggagtgtgacgagacacacccctgtgagggcctgggccgtcatgccacctttcggaactttggcatggccttcctaaccctcttccgagtctccacaggtgacaattggaatggcattatgaaggacaccctccgggactgtgaccaggagtccacctgctacaacacggtcatctcgcctatctactttgtgtccttcgtgctgacggcccagttcgtgctagtcaacgtggtgatcgccgtgctgatgaagcacctggaggagagcaacaaggaggccaaggaggaggccgagctagaggctgagctggagctggagatgaagaccctcagcccccagccccactcgccactgggcagccccttcctctggcctggggtcgagggccccgacagccccgacagccccaagcctggggctctgcacccagcggcccacgcgagatcagcctcccacttttccctggagcaccccacggacaggcagctgtttgacaccatatccctgctgatccagggctccctggagtgggagctgaagctgatggacgagctggcaggcccagggggccagccctctgccttcccttctgcccccagcctgggaggctccgacccacagatccctctagctgagatggaggctctgtctctgacgtcagagattgtgtctgaaccgtcctgctctctagctctgacggatgactctttgcctgatgacatgcacacactcttacttagtgccctggagagcaatatgcagccccaccccacggagctgccaggaccagacttactgactgtgcggaagtctggggtcagccgaacgcactctctgcccaatgacagctacatgtgtcggcatgggagcactgccgaggggcccctgggacacaggggctgggggctccccaaagctcagtcaggctccgtcttgtccgttcactcccagccagcagataccagctacatcctgcagcttcccaaagatgcacctcatctgctccagccccacagcgccccaacctggggcaccatccccaaactgcccccaccaggacgctcccctttggctcagaggccactcaggcgccaggcagcaataaggactgactccttggacgttcagggtctgggcagccgggaagacctgctggcagaggtgagtgggccctccccgcccctggcccgggcctactctttctggggccagtcaagtacccaggcacagcagcactcccgcagccacagcaagatctccaagcacatgaccccgccagccccttgcccaggcccagaacccaactggggcaagggccctccagagaccagaagcagcttagagttggacacggagctgagctggatttcaggagacctcctgccccctggcggccaggaggagcccccatccccacgggacctgaagaagtgctacagcgtggaggcccagagctgccagcgccggcctacgtcctggctggatgagcagaggagacactctatcgccgtcagctgcctggacagcggctcccaaccccacctgggcacagacccctctaaccttgggggccagcctcttggggggcctgggagccggcccaagaaaaaactcagcccgcctagtatcaccatagacccccccgagagccaaggtcctcggaccccgcccagccctggtatctgcctccggaggagggctccgtccagcgactccaaggatcccttggcctctggcccccctgacagcatggctgcctcgccctccccaaagaaagatgtgctgagtctctccggtttatcctctgacccagcagacctggacccctgagtcctgccccacttt

SEQ ID NO: 113243 - DNA, 6600 bp, Homo sapiens
  Payload ID: 2145
  Gene Symbol: CACNA1G
  Gene Name: calcium channel, voltage-dependent, T type, alpha 1G subunit
  Uniprot ID: O43497
  ENST ID: ENST00000507896
  CDS Start-End: 1-6585
atggacgaggaggaggatggagcgggcgccgaggagtcgggacagccccggagcttcatgcggctcaacgacctgtcgggggccgggggccggccggggccggggtcagcagaaaaggacccgggcagcgcggactccgaggcggaggggctgccgtacccggcgctggccccggtggttttcttctacttgagccaggacagccgcccgcggagctggtgtctccgcacggtctgtaacccctggtttgagcgcatcagcatgttggtcatccttctcaactgcgtgaccctgggcatgttccggccatgcgaggacatcgcctgtgactcccagcgctgccggatcctgcaggcctttgatgacttcatctttgccttctttgccgtggagatggtggtgaagatggtggccttgggcatctttgggaaaaagtgttacctgggagacacttggaaccggcttgactttttcatcgtcatcgcagggatgctggagtactcgctggacctgcagaacgtcagcttctcagctgtcaggacagtccgtgtgctgcgaccgctcagggccattaaccgggtgcccagcatgcgcatccttgtcacgttgctgctggatacgctgcccatgctgggcaacgtcctgctgctctgcttcttcgtcttcttcatcttcggcatcgtcggcgtccagctgtgggcagggctgcttcggaaccgatgcttcctacctgagaatttcagcctccccctgagcgtggacctggagcgctattaccagacagagaacgaggatgagagccccttcatctgctcccagccacgcgagaacggcatgcggtcctgcagaagcgtgcccacgctgcgcggggacgggggcggtggcccaccttgcggtctggactatgaggcctacaacagctccagcaacaccacctgtgtcaactggaaccagtactacaccaactgctcagcgggggagcacaaccccttcaagggcgccatcaactttgacaacattggctatgcctggatcgccatcttccaggtcatcacgctggagggctgggtcgacatcatgtactttgtgatggatgctcattccttctacaatttcatctacttcatcctcctcatcatcgtgggctccttcttcatgatcaacctgtgcctggtggtgattgccacgcagttctcagagaccaagcagcgggaaagccagctgatgcgggagcagcgtgtgcggttcctgtccaacgccagcaccctggctagcttctctgagcccggcagctgctatgaggagctgctcaagtacctggtgtacatccttcgtaaggcagcccgcaggctggctcaggtctctcgggcagcaggtgtgcgggttgggctgctcagcagcccagcacccctcgggggccaggagacccagcccagcagcagctgctctcgctcccaccgccgcctatccgtccaccacctggtgcaccaccaccaccaccatcaccaccactaccacctgggcaatgggacgctcagggccccccgggccagcccggagatccaggacagggatgccaatgggtcccgccggctcatgctgccaccaccctcgacgcctgccctctccggggccccccctggtggcgcagagtctgtgcacagcttctaccatgccgactgccacttagagccagtccgctgccaggcgccccctcccaggtccccatctgaggcatccggcaggactgtgggcagcgggaaggtgtatcccaccgtgcacaccagccctccaccggagacgctgaaggagaaggcactagtagaggtggctgccagctctgggcccccaaccctcaccagcctcaacatcccacccgggccctacagctccatgcacaagctgctggagacacagagtacaggtgcctgccaaagctcttgcaagatctccagcccttgcttgaaagcagacagtggagcctgtggtccagacagctgcccctactgtgcccgggccggggcaggggaggtggagctcgccgaccgtgaaatgcctgactcagacagcgaggcagtttatgagttcacacaggatgcccagcacagcgacctccgggacccccacagccggcggcaacggagcctgggcccagatgcagagcccagctctgtgctggccttctggaggctaatctgtgacaccttccgaaagattgtggacagcaagtactttggccggggaatcatgatcgccatcctggtcaacacactcagcatgggcatcgaataccacgagcagcccgaggagcttaccaacgccctagaaatcagcaacatcgtcttcaccagcctctttgccctggagatgctgctgaagctgcttgtgtatggtccctttggctacatcaagaatccctacaacatcttcgatggtgtcattgtggtcatcagcgtgtgggagatcgtgggccagcaggggggcggcctgtcggtgctgcggaccttccgcctgatgcgtgtgctgaagctggtgcgcttcctgccggcgctgcagcggcagctggtggtgctcatgaagaccatggacaacgtggccaccttctgcatgctgcttatgctcttcatcttcatcttcagcatcctgggcatgcatctcttcggctgcaagtttgcctctgagcgggatggggacaccctgccagaccggaagaattttgactccttgctctgggccatcgtcactgtctttcagatcctgacccaggaggactggaacaaagtcctctacaatggtatggcctccacgtcgtcctgggcggccctttatttcattgccctcatgaccttcggcaactacgtgctcttcaatttgctggtcgccattctggtggagggcttccaggcggaggaaatcagcaaacgggaagatgcgagtggacagttaagctgtattcagctgcctgtcgactcccaggggggagatgccaacaagtccgaatcagagcccgatttcttctcacccagcctggatggtgatggggacaggaagaagtgcttggccttggtgtccctgggagagcacccggagctgcggaagagcctgctgccgcctctcatcatccacacggccgccacacccatgtcgctgcccaagagcaccagcacgggcctgggcgaggcgctgggccctgcgtcgcgccgcaccagcagcagcgggtcggcagagcctggggcggcccacgagatgaagtcaccgcccagcgcccgcagctctccgcacagcccctggagcgctgcaagcagctggaccagcaggcgctccagccggaacagcctcggccgtgcacccagcctgaagcggagaagcccaagtggagagcggcggtccctgttgtcgggagaaggccaggagagccaggatgaagaggagagctcagaagaggagcgggccagccctgcgggcagtgaccatcgccacagggggtccctggagcgggaggccaagagttcctttgacctgccagacacactgcaggtgccagggctgcatcgcactgccagtggccgagggtctgcttctgagcaccaggactgcaatggcaagtcggcttcagggcgcctggcccgggccctgcggcctgatgaccccccactggatggggatgacgccgatgacgagggcaacctgagcaaaggggaacgggtccgcgcgtggatccgagcccgactccctgcctgctgcctcgagcgagactcctggtcagcctacatcttccctcctcagtccaggttccgcctcctgtgtcaccggatcatcacccacaagatgttcgaccacgtggtccttgtcatcatcttccttaactgcatcaccatcgccatggagcgccccaaaattgacccccacagcgctgaacgcatcttcctgaccctctccaattacatcttcaccgcagtctttctggctgaaatgacagtgaaggtggtggcactgggctggtgcttcggggagcaggcgtacctgcggagcagttggaacgtgctggacgggctgttggtgctcatctccgtcatcgacattctggtgtccatggtctctgacagcggcaccaagatcctgggcatgctgagggtgctgcggctgctgcggaccctgcgcccgctcagggtgatcagccgggcgcaggggctgaagctggtggtggagacgctgatgtcctcactgaaacccatcggcaacattgtagtcatctgctgtgccttcttcatcattttcggcatcttgggggtgcagctcttcaaagggaagtttttcgtgtgccagggcgaggataccaggaacatcaccaataaatcggactgtgccgaggccagttaccggtgggtccggcacaagtacaactttgacaaccttggccaggccctgatgtccctgttcgttttggcctccaaggatggttgggtggacatcatgtacgatgggctggatgctgtgggcgtggaccagcagcccatcatgaaccacaacccctggatgctgctgtacttcatctcgttcctgctcattgtggccttctttgtcctgaacatgtttgtgggtgtggtggtggagaacttccacaagtgtcggcagcaccaggaggaagaggaggcccggcggcgggaggagaagcgcctacgaagactggagaaaaagagaaggagtaaggagaagcagatggctgaagcccagtgcaaaccttactactccgactactcccgcttccggctcctcgtccaccacttgtgcaccagccactacctggacctcttcatcacaggtgtcatcgggctgaacgtggtcaccatggccatggagcactaccagcagccccagattctggatgaggctctgaagatctgcaactacatcttcactgtcatctttgtcttggagtcagttttcaaacttgtggcctttggtttccgtcggttcttccaggacaggtggaaccagctggacctggccattgtgctgctgtccatcatgggcatcacgctggaggaaatcgaggtcaacgcctcgctgcccatcaaccccaccatcatccgcatcatgagggtgctgcgcattgcccgagtgctgaagctgctgaagatggctgtgggcatgcgggcgctgctggacacggtgatgcaggccctgccccaggtggggaacctgggacttctcttcatgttgttgtttttcatctttgcagctctgggcgtggagctctttggagacctggagtgtgacgagacacacccctgtgagggcctgggccgtcatgccacctttcggaactttggcatggccttcctaaccctcttccgagtctccacaggtgacaattggaatggcattatgaaggacaccctccgggactgtgaccaggagtccacctgctacaacacggtcatctcgcctatctactttgtgtccttcgtgctgacggcccagttcgtgctagtcaacgtggtgatcgccgtgctgatgaagcacctggaggagagcaacaaggaggccaaggaggaggccgagctagaggctgagctggagctggagatgaagaccctcagcccccagccccactcgccactgggcagccccttcctctggcctggggtcgagggccccgacagccccgacagccccaagcctggggctctgcacccagcggcccacgcgagatcagcctcccacttttccctggagcaccccacgatgcagccccaccccacggagctgccaggaccagacttactgactgtgcggaagtctggggtcagccgaacgcactctctgcccaatgacagctacatgtgtcggcatgggagcactgccgaggggcccctgggacacaggggctgggggctccccaaagctcagtcaggctccgtcttgtccgttcactcccagccagcagataccagctacatcctgcagcttcccaaagatgcacctcatctgctccagccccacagcgccccaacctggggcaccatccccaaactgcccccaccaggacgctcccctttggctcagaggccactcaggcgccaggcagcaataaggactgactccttggacgttcagggtctgggcagccgggaagacctgctggcagaggaggagcccccatccccacgggacctgaagaagtgctacagcgtggaggcccagagctgccagcgccggcctacgtcctggctggatgagcagaggagacactctatcgccgtcagctgcctggacagcggctcccaaccccacctgggcacagacccctctaaccttgggggccagcctcttggggggcctgggagccggcccaagaaaaaactcagcccgcctagtatcaccatagacccccccgagagccaaggtcctcggaccccgcccagccctggtatctgcctccggaggagggctccgtccagcgactccaaggatcccttggcctctggcccccctgacagcatggctgcctcgccctccccaaagaaagatgtgctgagtctctccggtttatcctctgacccagcagacctggacccctgagtcctgccccacttt

SEQ ID NO: 113244 - DNA, 6633 bp, Homo sapiens
  Payload ID: 2145
  Gene Symbol: CACNA1G
  Gene Name: calcium channel, voltage-dependent, T type, alpha 1G subunit
  Uniprot ID: O43497
  ENST ID: ENST00000505165
  CDS Start-End: 1-6618
atggacgaggaggaggatggagcgggcgccgaggagtcgggacagccccggagcttcatgcggctcaacgacctgtcgggggccgggggccggccggggccggggtcagcagaaaaggacccgggcagcgcggactccgaggcggaggggctgccgtacccggcgctggccccggtggttttcttctacttgagccaggacagccgcccgcggagctggtgtctccgcacggtctgtaacccctggtttgagcgcatcagcatgttggtcatccttctcaactgcgtgaccctgggcatgttccggccatgcgaggacatcgcctgtgactcccagcgctgccggatcctgcaggcctttgatgacttcatctttgccttctttgccgtggagatggtggtgaagatggtggccttgggcatctttgggaaaaagtgttacctgggagacacttggaaccggcttgactttttcatcgtcatcgcagggatgctggagtactcgctggacctgcagaacgtcagcttctcagctgtcaggacagtccgtgtgctgcgaccgctcagggccattaaccgggtgcccagcatgcgcatccttgtcacgttgctgctggatacgctgcccatgctgggcaacgtcctgctgctctgcttcttcgtcttcttcatcttcggcatcgtcggcgtccagctgtgggcagggctgcttcggaaccgatgcttcctacctgagaatttcagcctccccctgagcgtggacctggagcgctattaccagacagagaacgaggatgagagccccttcatctgctcccagccacgcgagaacggcatgcggtcctgcagaagcgtgcccacgctgcgcggggacgggggcggtggcccaccttgcggtctggactatgaggcctacaacagctccagcaacaccacctgtgtcaactggaaccagtactacaccaactgctcagcgggggagcacaaccccttcaagggcgccatcaactttgacaacattggctatgcctggatcgccatcttccaggtcatcacgctggagggctgggtcgacatcatgtactttgtgatggatgctcattccttctacaatttcatctacttcatcctcctcatcatcgtgggctccttcttcatgatcaacctgtgcctggtggtgattgccacgcagttctcagagaccaagcagcgggaaagccagctgatgcgggagcagcgtgtgcggttcctgtccaacgccagcaccctggctagcttctctgagcccggcagctgctatgaggagctgctcaagtacctggtgtacatccttcgtaaggcagcccgcaggctggctcaggtctctcgggcagcaggtgtgcgggttgggctgctcagcagcccagcacccctcgggggccaggagacccagcccagcagcagctgctctcgctcccaccgccgcctatccgtccaccacctggtgcaccaccaccaccaccatcaccaccactaccacctgggcaatgggacgctcagggccccccgggccagcccggagatccaggacagggatgccaatgggtcccgccggctcatgctgccaccaccctcgacgcctgccctctccggggccccccctggtggcgcagagtctgtgcacagcttctaccatgccgactgccacttagagccagtccgctgccaggcgccccctcccaggtccccatctgaggcatccggcaggactgtgggcagcgggaaggtgtatcccaccgtgcacaccagccctccaccggagacgctgaaggagaaggcactagtagaggtggctgccagctctgggcccccaaccctcaccagcctcaacatcccacccgggccctacagctccatgcacaagctgctggagacacagagtacaggtgcctgccaaagctcttgcaagatctccagcccttgcttgaaagcagacagtggagcctgtggtccagacagctgcccctactgtgcccgggccggggcaggggaggtggagctcgccgaccgtgaaatgcctgactcagacagcgaggcagtttatgagttcacacaggatgcccagcacagcgacctccgggacccccacagccggcggcaacggagcctgggcccagatgcagagcccagctctgtgctggccttctggaggctaatctgtgacaccttccgaaagattgtggacagcaagtactttggccggggaatcatgatcgccatcctggtcaacacactcagcatgggcatcgaataccacgagcagcccgaggagcttaccaacgccctagaaatcagcaacatcgtcttcaccagcctctttgccctggagatgctgctgaagctgcttgtgtatggtccctttggctacatcaagaatccctacaacatcttcgatggtgtcattgtggtcatcagcgtgtgggagatcgtgggccagcaggggggcggcctgtcggtgctgcggaccttccgcctgatgcgtgtgctgaagctggtgcgcttcctgccggcgctgcagcggcagctggtggtgctcatgaagaccatggacaacgtggccaccttctgcatgctgcttatgctcttcatcttcatcttcagcatcctgggcatgcatctcttcggctgcaagtttgcctctgagcgggatggggacaccctgccagaccggaagaattttgactccttgctctgggccatcgtcactgtctttcagatcctgacccaggaggactggaacaaagtcctctacaatggtatggcctccacgtcgtcctgggcggccctttatttcattgccctcatgaccttcggcaactacgtgctcttcaatttgctggtcgccattctggtggagggcttccaggcggaggaaatcagcaaacgggaagatgcgagtggacagttaagctgtattcagctgcctgtcgactcccaggggggagatgccaacaagtccgaatcagagcccgatttcttctcacccagcctggatggtgatggggacaggaagaagtgcttggccttggtgtccctgggagagcacccggagctgcggaagagcctgctgccgcctctcatcatccacacggccgccacacccatgtcgctgcccaagagcaccagcacgggcctgggcgaggcgctgggccctgcgtcgcgccgcaccagcagcagcgggtcggcagagcctggggcggcccacgagatgaagtcaccgcccagcgcccgcagctctccgcacagcccctggagcgctgcaagcagctggaccagcaggcgctccagccggaacagcctcggccgtgcacccagcctgaagcggagaagcccaagtggagagcggcggtccctgttgtcgggagaaggccaggagagccaggatgaagaggagagctcagaagaggagcgggccagccctgcgggcagtgaccatcgccacagggggtccctggagcgggaggccaagagttcctttgacctgccagacacactgcaggtgccagggctgcatcgcactgccagtggccgagggtctgcttctgagcaccaggactgcaatggcaagtcggcttcagggcgcctggcccgggccctgcggcctgatgaccccccactggatggggatgacgccgatgacgagggcaacctgagcaaaggggaacgggtccgcgcgtggatccgagcccgactccctgcctgctgcctcgagcgagactcctggtcagcctacatcttccctcctcagtccaggttccgcctcctgtgtcaccggatcatcacccacaagatgttcgaccacgtggtccttgtcatcatcttccttaactgcatcaccatcgccatggagcgccccaaaattgacccccacagcgctgaacgcatcttcctgaccctctccaattacatcttcaccgcagtctttctggctgaaatgacagtgaaggtggtggcactgggctggtgcttcggggagcaggcgtacctgcggagcagttggaacgtgctggacgggctgttggtgctcatctccgtcatcgacattctggtgtccatggtctctgacagcggcaccaagatcctgggcatgctgagggtgctgcggctgctgcggaccctgcgcccgctcagggtgatcagccgggcgcaggggctgaagctggtggtggagacgctgatgtcctcactgaaacccatcggcaacattgtagtcatctgctgtgccttcttcatcattttcggcatcttgggggtgcagctcttcaaagggaagtttttcgtgtgccagggcgaggataccaggaacatcaccaataaatcggactgtgccgaggccagttaccggtgggtccggcacaagtacaactttgacaaccttggccaggccctgatgtccctgttcgttttggcctccaaggatggttgggtggacatcatgtacgatgggctggatgctgtgggcgtggaccagcagcccatcatgaaccacaacccctggatgctgctgtacttcatctcgttcctgctcattgtggccttctttgtcctgaacatgtttgtgggtgtggtggtggagaacttccacaagtgtcggcagcaccaggaggaagaggaggcccggcggcgggaggagaagcgcctacgaagactggagaaaaagagaaggaatctaatgctggacgatgtaattgcttccggcagctcagccagcgctgcgtcagaagcccagtgcaaaccttactactccgactactcccgcttccggctcctcgtccaccacttgtgcaccagccactacctggacctcttcatcacaggtgtcatcgggctgaacgtggtcaccatggccatggagcactaccagcagccccagattctggatgaggctctgaagatctgcaactacatcttcactgtcatctttgtcttggagtcagttttcaaacttgtggcctttggtttccgtcggttcttccaggacaggtggaaccagctggacctggccattgtgctgctgtccatcatgggcatcacgctggaggaaatcgaggtcaacgcctcgctgcccatcaaccccaccatcatccgcatcatgagggtgctgcgcattgcccgagtgctgaagctgctgaagatggctgtgggcatgcgggcgctgctggacacggtgatgcaggccctgccccaggtggggaacctgggacttctcttcatgttgttgtttttcatctttgcagctctgggcgtggagctctttggagacctggagtgtgacgagacacacccctgtgagggcctgggccgtcatgccacctttcggaactttggcatggccttcctaaccctcttccgagtctccacaggtgacaattggaatggcattatgaaggacaccctccgggactgtgaccaggagtccacctgctacaacacggtcatctcgcctatctactttgtgtccttcgtgctgacggcccagttcgtgctagtcaacgtggtgatcgccgtgctgatgaagcacctggaggagagcaacaaggaggccaaggaggaggccgagctagaggctgagctggagctggagatgaagaccctcagcccccagccccactcgccactgggcagccccttcctctggcctggggtcgagggccccgacagccccgacagccccaagcctggggctctgcacccagcggcccacgcgagatcagcctcccacttttccctggagcaccccacgatgcagccccaccccacggagctgccaggaccagacttactgactgtgcggaagtctggggtcagccgaacgcactctctgcccaatgacagctacatgtgtcggcatgggagcactgccgaggggcccctgggacacaggggctgggggctccccaaagctcagtcaggctccgtcttgtccgttcactcccagccagcagataccagctacatcctgcagcttcccaaagatgcacctcatctgctccagccccacagcgccccaacctggggcaccatccccaaactgcccccaccaggacgctcccctttggctcagaggccactcaggcgccaggcagcaataaggactgactccttggacgttcagggtctgggcagccgggaagacctgctggcagaggaggagcccccatccccacgggacctgaagaagtgctacagcgtggaggcccagagctgccagcgccggcctacgtcctggctggatgagcagaggagacactctatcgccgtcagctgcctggacagcggctcccaaccccacctgggcacagacccctctaaccttgggggccagcctcttggggggcctgggagccggcccaagaaaaaactcagcccgcctagtatcaccatagacccccccgagagccaaggtcctcggaccccgcccagccctggtatctgcctccggaggagggctccgtccagcgactccaaggatcccttggcctctggcccccctgacagcatggctgcctcgccctccccaaagaaagatgtgctgagtctctccggtttatcctctgacccagcagacctggacccctgagtcctgccccacttt

SEQ ID NO: 113245 - DNA, 6699 bp, Homo sapiens
  Payload ID: 2145
  Gene Symbol: CACNA1G
  Gene Name: calcium channel, voltage-dependent, T type, alpha 1G subunit
  Uniprot ID: O43497
  ENST ID: ENST00000514717
  CDS Start-End: 1-6684
atggacgaggaggaggatggagcgggcgccgaggagtcgggacagccccggagcttcatgcggctcaacgacctgtcgggggccgggggccggccggggccggggtcagcagaaaaggacccgggcagcgcggactccgaggcggaggggctgccgtacccggcgctggccccggtggttttcttctacttgagccaggacagccgcccgcggagctggtgtctccgcacggtctgtaacccctggtttgagcgcatcagcatgttggtcatccttctcaactgcgtgaccctgggcatgttccggccatgcgaggacatcgcctgtgactcccagcgctgccggatcctgcaggcctttgatgacttcatctttgccttctttgccgtggagatggtggtgaagatggtggccttgggcatctttgggaaaaagtgttacctgggagacacttggaaccggcttgactttttcatcgtcatcgcagggatgctggagtactcgctggacctgcagaacgtcagcttctcagctgtcaggacagtccgtgtgctgcgaccgctcagggccattaaccgggtgcccagcatgcgcatccttgtcacgttgctgctggatacgctgcccatgctgggcaacgtcctgctgctctgcttcttcgtcttcttcatcttcggcatcgtcggcgtccagctgtgggcagggctgcttcggaaccgatgcttcctacctgagaatttcagcctccccctgagcgtggacctggagcgctattaccagacagagaacgaggatgagagccccttcatctgctcccagccacgcgagaacggcatgcggtcctgcagaagcgtgcccacgctgcgcggggacgggggcggtggcccaccttgcggtctggactatgaggcctacaacagctccagcaacaccacctgtgtcaactggaaccagtactacaccaactgctcagcgggggagcacaaccccttcaagggcgccatcaactttgacaacattggctatgcctggatcgccatcttccaggtcatcacgctggagggctgggtcgacatcatgtactttgtgatggatgctcattccttctacaatttcatctacttcatcctcctcatcatcgtgggctccttcttcatgatcaacctgtgcctggtggtgattgccacgcagttctcagagaccaagcagcgggaaagccagctgatgcgggagcagcgtgtgcggttcctgtccaacgccagcaccctggctagcttctctgagcccggcagctgctatgaggagctgctcaagtacctggtgtacatccttcgtaaggcagcccgcaggctggctcaggtctctcgggcagcaggtgtgcgggttgggctgctcagcagcccagcacccctcgggggccaggagacccagcccagcagcagctgctctcgctcccaccgccgcctatccgtccaccacctggtgcaccaccaccaccaccatcaccaccactaccacctgggcaatgggacgctcagggccccccgggccagcccggagatccaggacagggatgccaatgggtcccgccggctcatgctgccaccaccctcgacgcctgccctctccggggccccccctggtggcgcagagtctgtgcacagcttctaccatgccgactgccacttagagccagtccgctgccaggcgccccctcccaggtccccatctgaggcatccggcaggactgtgggcagcgggaaggtgtatcccaccgtgcacaccagccctccaccggagacgctgaaggagaaggcactagtagaggtggctgccagctctgggcccccaaccctcaccagcctcaacatcccacccgggccctacagctccatgcacaagctgctggagacacagagtacaggtgcctgccaaagctcttgcaagatctccagcccttgcttgaaagcagacagtggagcctgtggtccagacagctgcccctactgtgcccgggccggggcaggggaggtggagctcgccgaccgtgaaatgcctgactcagacagcgaggcagtttatgagttcacacaggatgcccagcacagcgacctccgggacccccacagccggcggcaacggagcctgggcccagatgcagagcccagctctgtgctggccttctggaggctaatctgtgacaccttccgaaagattgtggacagcaagtactttggccggggaatcatgatcgccatcctggtcaacacactcagcatgggcatcgaataccacgagcagcccgaggagcttaccaacgccctagaaatcagcaacatcgtcttcaccagcctctttgccctggagatgctgctgaagctgcttgtgtatggtccctttggctacatcaagaatccctacaacatcttcgatggtgtcattgtggtcatcagcgtgtgggagatcgtgggccagcaggggggcggcctgtcggtgctgcggaccttccgcctgatgcgtgtgctgaagctggtgcgcttcctgccggcgctgcagcggcagctggtggtgctcatgaagaccatggacaacgtggccaccttctgcatgctgcttatgctcttcatcttcatcttcagcatcctgggcatgcatctcttcggctgcaagtttgcctctgagcgggatggggacaccctgccagaccggaagaattttgactccttgctctgggccatcgtcactgtctttcagatcctgacccaggaggactggaacaaagtcctctacaatggtatggcctccacgtcgtcctgggcggccctttatttcattgccctcatgaccttcggcaactacgtgctcttcaatttgctggtcgccattctggtggagggcttccaggcggagggagatgccaacaagtccgaatcagagcccgatttcttctcacccagcctggatggtgatggggacaggaagaagtgcttggccttggtgtccctgggagagcacccggagctgcggaagagcctgctgccgcctctcatcatccacacggccgccacacccatgtcgctgcccaagagcaccagcacgggcctgggcgaggcgctgggccctgcgtcgcgccgcaccagcagcagcgggtcggcagagcctggggcggcccacgagatgaagtcaccgcccagcgcccgcagctctccgcacagcccctggagcgctgcaagcagctggaccagcaggcgctccagccggaacagcctcggccgtgcacccagcctgaagcggagaagcccaagtggagagcggcggtccctgttgtcgggagaaggccaggagagccaggatgaagaggagagctcagaagaggagcgggccagccctgcgggcagtgaccatcgccacagggggtccctggagcgggaggccaagagttcctttgacctgccagacacactgcaggtgccagggctgcatcgcactgccagtggccgagggtctgcttctgagcaccaggactgcaatggcaagtcggcttcagggcgcctggcccgggccctgcggcctgatgaccccccactggatggggatgacgccgatgacgagggcaacctgagcaaaggggaacgggtccgcgcgtggatccgagcccgactccctgcctgctgcctcgagcgagactcctggtcagcctacatcttccctcctcagtccaggttccgcctcctgtgtcaccggatcatcacccacaagatgttcgaccacgtggtccttgtcatcatcttccttaactgcatcaccatcgccatggagcgccccaaaattgacccccacagcgctgaacgcatcttcctgaccctctccaattacatcttcaccgcagtctttctggctgaaatgacagtgaaggtggtggcactgggctggtgcttcggggagcaggcgtacctgcggagcagttggaacgtgctggacgggctgttggtgctcatctccgtcatcgacattctggtgtccatggtctctgacagcggcaccaagatcctgggcatgctgagggtgctgcggctgctgcggaccctgcgcccgctcagggtgatcagccgggcgcaggggctgaagctggtggtggagacgctgatgtcctcactgaaacccatcggcaacattgtagtcatctgctgtgccttcttcatcattttcggcatcttgggggtgcagctcttcaaagggaagtttttcgtgtgccagggcgaggataccaggaacatcaccaataaatcggactgtgccgaggccagttaccggtgggtccggcacaagtacaactttgacaaccttggccaggccctgatgtccctgttcgttttggcctccaaggatggttgggtggacatcatgtacgatgggctggatgctgtgggcgtggaccagcagaacttccacaagtgtcggcagcaccaggaggaagaggaggcccggcggcgggaggagaagcgcctacgaagactggagaaaaagagaaggaatctaatgctggacgatgtaattgcttccggcagctcagccagcgctgcgtcagaagcccagtgcaaaccttactactccgactactcccgcttccggctcctcgtccaccacttgtgcaccagccactacctggacctcttcatcacaggtgtcatcgggctgaacgtggtcaccatggccatggagcactaccagcagccccagattctggatgaggctctgaagatctgcaactacatcttcactgtcatctttgtcttggagtcagttttcaaacttgtggcctttggtttccgtcggttcttccaggacaggtggaaccagctggacctggccattgtgctgctgtccatcatgggcatcacgctggaggaaatcgaggtcaacgcctcgctgcccatcaaccccaccatcatccgcatcatgagggtgctgcgcattgcccgagtgctgaagctgctgaagatggctgtgggcatgcgggcgctgctggacacggtgatgcaggccctgccccaggtggggaacctgggacttctcttcatgttgttgtttttcatctttgcagctctgggcgtggagctctttggagacctggagtgtgacgagacacacccctgtgagggcctgggccgtcatgccacctttcggaactttggcatggccttcctaaccctcttccgagtctccacaggtgacaattggaatggcattatgaaggacaccctccgggactgtgaccaggagtccacctgctacaacacggtcatctcgcctatctactttgtgtccttcgtgctgacggcccagttcgtgctagtcaacgtggtgatcgccgtgctgatgaagcacctggaggagagcaacaaggaggccaaggaggaggccgagctagaggctgagctggagctggagatgaagaccctcagcccccagccccactcgccactgggcagccccttcctctggcctggggtcgagggccccgacagccccgacagccccaagcctggggctctgcacccagcggcccacgcgagatcagcctcccacttttccctggagcaccccacgatgcagccccaccccacggagctgccaggaccagacttactgactgtgcggaagtctggggtcagccgaacgcactctctgcccaatgacagctacatgtgtcggcatgggagcactgccgaggggcccctgggacacaggggctgggggctccccaaagctcagtcaggctccgtcttgtccgttcactcccagccagcagataccagctacatcctgcagcttcccaaagatgcacctcatctgctccagccccacagcgccccaacctggggcaccatccccaaactgcccccaccaggacgctcccctttggctcagaggccactcaggcgccaggcagcaataaggactgactccttggacgttcagggtctgggcagccgggaagacctgctggcagaggtgagtgggccctccccgcccctggcccgggcctactctttctggggccagtcaagtacccaggcacagcagcactcccgcagccacagcaagatctccaagcacatgaccccgccagccccttgcccaggcccagaacccaactggggcaagggccctccagagaccagaagcagcttagagttggacacggagctgagctggatttcaggagacctcctgccccctggcggccaggaggagcccccatccccacgggacctgaagaagtgctacagcgtggaggcccagagctgccagcgccggcctacgtcctggctggatgagcagaggagacactctatcgccgtcagctgcctggacagcggctcccaaccccacctgggcacagacccctctaaccttgggggccagcctcttggggggcctgggagccggcccaagaaaaaactcagcccgcctagtatcaccatagacccccccgagagccaaggtcctcggaccccgcccagccctggtatctgcctccggaggagggctccgtccagcgactccaaggatcccttggcctctggcccccctgacagcatggctgcctcgccctccccaaagaaagatgtgctgagtctctccggtttatcctctgacccagcagacctggacccctgagtcctgccccacttt

SEQ ID NO: 113246 - DNA, 6849 bp, Homo sapiens
  Payload ID: 2145
  Gene Symbol: CACNA1G
  Gene Name: calcium channel, voltage-dependent, T type, alpha 1G subunit
  Uniprot ID: O43497
  ENST ID: ENST00000507609
  CDS Start-End: 1-6834
atggacgaggaggaggatggagcgggcgccgaggagtcgggacagccccggagcttcatgcggctcaacgacctgtcgggggccgggggccggccggggccggggtcagcagaaaaggacccgggcagcgcggactccgaggcggaggggctgccgtacccggcgctggccccggtggttttcttctacttgagccaggacagccgcccgcggagctggtgtctccgcacggtctgtaacccctggtttgagcgcatcagcatgttggtcatccttctcaactgcgtgaccctgggcatgttccggccatgcgaggacatcgcctgtgactcccagcgctgccggatcctgcaggcctttgatgacttcatctttgccttctttgccgtggagatggtggtgaagatggtggccttgggcatctttgggaaaaagtgttacctgggagacacttggaaccggcttgactttttcatcgtcatcgcagggatgctggagtactcgctggacctgcagaacgtcagcttctcagctgtcaggacagtccgtgtgctgcgaccgctcagggccattaaccgggtgcccagcatgcgcatccttgtcacgttgctgctggatacgctgcccatgctgggcaacgtcctgctgctctgcttcttcgtcttcttcatcttcggcatcgtcggcgtccagctgtgggcagggctgcttcggaaccgatgcttcctacctgagaatttcagcctccccctgagcgtggacctggagcgctattaccagacagagaacgaggatgagagccccttcatctgctcccagccacgcgagaacggcatgcggtcctgcagaagcgtgcccacgctgcgcggggacgggggcggtggcccaccttgcggtctggactatgaggcctacaacagctccagcaacaccacctgtgtcaactggaaccagtactacaccaactgctcagcgggggagcacaaccccttcaagggcgccatcaactttgacaacattggctatgcctggatcgccatcttccaggtcatcacgctggagggctgggtcgacatcatgtactttgtgatggatgctcattccttctacaatttcatctacttcatcctcctcatcatcgtgggctccttcttcatgatcaacctgtgcctggtggtgattgccacgcagttctcagagaccaagcagcgggaaagccagctgatgcgggagcagcgtgtgcggttcctgtccaacgccagcaccctggctagcttctctgagcccggcagctgctatgaggagctgctcaagtacctggtgtacatccttcgtaaggcagcccgcaggctggctcaggtctctcgggcagcaggtgtgcgggttgggctgctcagcagcccagcacccctcgggggccaggagacccagcccagcagcagctgctctcgctcccaccgccgcctatccgtccaccacctggtgcaccaccaccaccaccatcaccaccactaccacctgggcaatgggacgctcagggccccccgggccagcccggagatccaggacagggatgccaatgggtcccgccggctcatgctgccaccaccctcgacgcctgccctctccggggccccccctggtggcgcagagtctgtgcacagcttctaccatgccgactgccacttagagccagtccgctgccaggcgccccctcccaggtccccatctgaggcatccggcaggactgtgggcagcgggaaggtgtatcccaccgtgcacaccagccctccaccggagacgctgaaggagaaggcactagtagaggtggctgccagctctgggcccccaaccctcaccagcctcaacatcccacccgggccctacagctccatgcacaagctgctggagacacagagtacaggtgcctgccaaagctcttgcaagatctccagcccttgcttgaaagcagacagtggagcctgtggtccagacagctgcccctactgtgcccgggccggggcaggggaggtggagctcgccgaccgtgaaatgcctgactcagacagcgaggcagtttatgagttcacacaggatgcccagcacagcgacctccgggacccccacagccggcggcaacggagcctgggcccagatgcagagcccagctctgtgctggccttctggaggctaatctgtgacaccttccgaaagattgtggacagcaagtactttggccggggaatcatgatcgccatcctggtcaacacactcagcatgggcatcgaataccacgagcagcccgaggagcttaccaacgccctagaaatcagcaacatcgtcttcaccagcctctttgccctggagatgctgctgaagctgcttgtgtatggtccctttggctacatcaagaatccctacaacatcttcgatggtgtcattgtggtcatcagcgtgtgggagatcgtgggccagcaggggggcggcctgtcggtgctgcggaccttccgcctgatgcgtgtgctgaagctggtgcgcttcctgccggcgctgcagcggcagctggtggtgctcatgaagaccatggacaacgtggccaccttctgcatgctgcttatgctcttcatcttcatcttcagcatcctgggcatgcatctcttcggctgcaagtttgcctctgagcgggatggggacaccctgccagaccggaagaattttgactccttgctctgggccatcgtcactgtctttcagatcctgacccaggaggactggaacaaagtcctctacaatggtatggcctccacgtcgtcctgggcggccctttatttcattgccctcatgaccttcggcaactacgtgctcttcaatttgctggtcgccattctggtggagggcttccaggcggaggaaatcagcaaacgggaagatgcgagtggacagttaagctgtattcagctgcctgtcgactcccaggggggagatgccaacaagtccgaatcagagcccgatttcttctcacccagcctggatggtgatggggacaggaagaagtgcttggccttggtgtccctgggagagcacccggagctgcggaagagcctgctgccgcctctcatcatccacacggccgccacacccatgtcgctgcccaagagcaccagcacgggcctgggcgaggcgctgggccctgcgtcgcgccgcaccagcagcagcgggtcggcagagcctggggcggcccacgagatgaagtcaccgcccagcgcccgcagctctccgcacagcccctggagcgctgcaagcagctggaccagcaggcgctccagccggaacagcctcggccgtgcacccagcctgaagcggagaagcccaagtggagagcggcggtccctgttgtcgggagaaggccaggagagccaggatgaagaggagagctcagaagaggagcgggccagccctgcgggcagtgaccatcgccacagggggtccctggagcgggaggccaagagttcctttgacctgccagacacactgcaggtgccagggctgcatcgcactgccagtggccgagggtctgcttctgagcaccaggactgcaatggcaagtcggcttcagggcgcctggcccgggccctgcggcctgatgaccccccactggatggggatgacgccgatgacgagggcaacctgagcaaaggggaacgggtccgcgcgtggatccgagcccgactccctgcctgctgcctcgagcgagactcctggtcagcctacatcttccctcctcagtccaggttccgcctcctgtgtcaccggatcatcacccacaagatgttcgaccacgtggtccttgtcatcatcttccttaactgcatcaccatcgccatggagcgccccaaaattgacccccacagcgctgaacgcatcttcctgaccctctccaattacatcttcaccgcagtctttctggctgaaatgacagtgaaggtggtggcactgggctggtgcttcggggagcaggcgtacctgcggagcagttggaacgtgctggacgggctgttggtgctcatctccgtcatcgacattctggtgtccatggtctctgacagcggcaccaagatcctgggcatgctgagggtgctgcggctgctgcggaccctgcgcccgctcagggtgatcagccgggcgcaggggctgaagctggtggtggagacgctgatgtcctcactgaaacccatcggcaacattgtagtcatctgctgtgccttcttcatcattttcggcatcttgggggtgcagctcttcaaagggaagtttttcgtgtgccagggcgaggataccaggaacatcaccaataaatcggactgtgccgaggccagttaccggtgggtccggcacaagtacaactttgacaaccttggccaggccctgatgtccctgttcgttttggcctccaaggatggttgggtggacatcatgtacgatgggctggatgctgtgggcgtggaccagcagcccatcatgaaccacaacccctggatgctgctgtacttcatctcgttcctgctcattgtggccttctttgtcctgaacatgtttgtgggtgtggtggtggagaacttccacaagtgtcggcagcaccaggaggaagaggaggcccggcggcgggaggagaagcgcctacgaagactggagaaaaagagaaggaatctaatgctggacgatgtaattgcttccggcagctcagccagcgctgcgtcagaagcccagtgcaaaccttactactccgactactcccgcttccggctcctcgtccaccacttgtgcaccagccactacctggacctcttcatcacaggtgtcatcgggctgaacgtggtcaccatggccatggagcactaccagcagccccagattctggatgaggctctgaagatctgcaactacatcttcactgtcatctttgtcttggagtcagttttcaaacttgtggcctttggtttccgtcggttcttccaggacaggtggaaccagctggacctggccattgtgctgctgtccatcatgggcatcacgctggaggaaatcgaggtcaacgcctcgctgcccatcaaccccaccatcatccgcatcatgagggtgctgcgcattgcccgagtgctgaagctgctgaagatggctgtgggcatgcgggcgctgctggacacggtggggaacctgggacttctcttcatgttgttgtttttcatctttgcagctctgggcgtggagctctttggagacctggagtgtgacgagacacacccctgtgagggcctgggccgtcatgccacctttcggaactttggcatggccttcctaaccctcttccgagtctccacaggtgacaattggaatggcattatgaaggacaccctccgggactgtgaccaggagtccacctgctacaacacggtcatctcgcctatctactttgtgtccttcgtgctgacggcccagttcgtgctagtcaacgtggtgatcgccgtgctgatgaagcacctggaggagagcaacaaggaggccaaggaggaggccgagctagaggctgagctggagctggagatgaagaccctcagcccccagccccactcgccactgggcagccccttcctctggcctggggtcgagggccccgacagccccgacagccccaagcctggggctctgcacccagcggcccacgcgagatcagcctcccacttttccctggagcaccccacgatgcagccccaccccacggagctgccaggaccagacttactgactgtgcggaagtctggggtcagccgaacgcactctctgcccaatgacagctacatgtgtcggcatgggagcactgccgaggggcccctgggacacaggggctgggggctccccaaagctcagtcaggctccgtcttgtccgttcactcccagccagcagataccagctacatcctgcagcttcccaaagatgcacctcatctgctccagccccacagcgccccaacctggggcaccatccccaaactgcccccaccaggacgctcccctttggctcagaggccactcaggcgccaggcagcaataaggactgactccttggacgttcagggtctgggcagccgggaagacctgctggcagaggtgagtgggccctccccgcccctggcccgggcctactctttctggggccagtcaagtacccaggcacagcagcactcccgcagccacagcaagatctccaagcacatgaccccgccagccccttgcccaggcccagaacccaactggggcaagggccctccagagaccagaagcagcttagagttggacacggagctgagctggatttcaggagacctcctgccccctggcggccaggaggagcccccatccccacgggacctgaagaagtgctacagcgtggaggcccagagctgccagcgccggcctacgtcctggctggatgagcagaggagacactctatcgccgtcagctgcctggacagcggctcccaaccccacctgggcacagacccctctaaccttgggggccagcctcttggggggcctgggagccggcccaagaaaaaactcagcccgcctagtatcaccatagacccccccgagagccaaggtcctcggaccccgcccagccctggtatctgcctccggaggagggctccgtccagcgactccaaggatcccttggcctctggcccccctgacagcatggctgcctcgccctccccaaagaaagatgtgctgagtctctccggtttatcctctgacccagcagacctggacccctgagtcctgccccacttt

SEQ ID NO: 113247 - DNA, 7014 bp, Homo sapiens
  Payload ID: 2145
  Gene Symbol: CACNA1G
  Gene Name: calcium channel, voltage-dependent, T type, alpha 1G subunit
  Uniprot ID: O43497
  ENST ID: ENST00000507510
  CDS Start-End: 1-6999
atggacgaggaggaggatggagcgggcgccgaggagtcgggacagccccggagcttcatgcggctcaacgacctgtcgggggccgggggccggccggggccggggtcagcagaaaaggacccgggcagcgcggactccgaggcggaggggctgccgtacccggcgctggccccggtggttttcttctacttgagccaggacagccgcccgcggagctggtgtctccgcacggtctgtaacccctggtttgagcgcatcagcatgttggtcatccttctcaactgcgtgaccctgggcatgttccggccatgcgaggacatcgcctgtgactcccagcgctgccggatcctgcaggcctttgatgacttcatctttgccttctttgccgtggagatggtggtgaagatggtggccttgggcatctttgggaaaaagtgttacctgggagacacttggaaccggcttgactttttcatcgtcatcgcagggatgctggagtactcgctggacctgcagaacgtcagcttctcagctgtcaggacagtccgtgtgctgcgaccgctcagggccattaaccgggtgcccagcatgcgcatccttgtcacgttgctgctggatacgctgcccatgctgggcaacgtcctgctgctctgcttcttcgtcttcttcatcttcggcatcgtcggcgtccagctgtgggcagggctgcttcggaaccgatgcttcctacctgagaatttcagcctccccctgagcgtggacctggagcgctattaccagacagagaacgaggatgagagccccttcatctgctcccagccacgcgagaacggcatgcggtcctgcagaagcgtgcccacgctgcgcggggacgggggcggtggcccaccttgcggtctggactatgaggcctacaacagctccagcaacaccacctgtgtcaactggaaccagtactacaccaactgctcagcgggggagcacaaccccttcaagggcgccatcaactttgacaacattggctatgcctggatcgccatcttccaggtcatcacgctggagggctgggtcgacatcatgtactttgtgatggatgctcattccttctacaatttcatctacttcatcctcctcatcatcgtgggctccttcttcatgatcaacctgtgcctggtggtgattgccacgcagttctcagagaccaagcagcgggaaagccagctgatgcgggagcagcgtgtgcggttcctgtccaacgccagcaccctggctagcttctctgagcccggcagctgctatgaggagctgctcaagtacctggtgtacatccttcgtaaggcagcccgcaggctggctcaggtctctcgggcagcaggtgtgcgggttgggctgctcagcagcccagcacccctcgggggccaggagacccagcccagcagcagctgctctcgctcccaccgccgcctatccgtccaccacctggtgcaccaccaccaccaccatcaccaccactaccacctgggcaatgggacgctcagggccccccgggccagcccggagatccaggacagggatgccaatgggtcccgccggctcatgctgccaccaccctcgacgcctgccctctccggggccccccctggtggcgcagagtctgtgcacagcttctaccatgccgactgccacttagagccagtccgctgccaggcgccccctcccaggtccccatctgaggcatccggcaggactgtgggcagcgggaaggtgtatcccaccgtgcacaccagccctccaccggagacgctgaaggagaaggcactagtagaggtggctgccagctctgggcccccaaccctcaccagcctcaacatcccacccgggccctacagctccatgcacaagctgctggagacacagagtacaggtgcctgccaaagctcttgcaagatctccagcccttgcttgaaagcagacagtggagcctgtggtccagacagctgcccctactgtgcccgggccggggcaggggaggtggagctcgccgaccgtgaaatgcctgactcagacagcgaggcagtttatgagttcacacaggatgcccagcacagcgacctccgggacccccacagccggcggcaacggagcctgggcccagatgcagagcccagctctgtgctggccttctggaggctaatctgtgacaccttccgaaagattgtggacagcaagtactttggccggggaatcatgatcgccatcctggtcaacacactcagcatgggcatcgaataccacgagcagcccgaggagcttaccaacgccctagaaatcagcaacatcgtcttcaccagcctctttgccctggagatgctgctgaagctgcttgtgtatggtccctttggctacatcaagaatccctacaacatcttcgatggtgtcattgtggtcatcagcgtgtgggagatcgtgggccagcaggggggcggcctgtcggtgctgcggaccttccgcctgatgcgtgtgctgaagctggtgcgcttcctgccggcgctgcagcggcagctggtggtgctcatgaagaccatggacaacgtggccaccttctgcatgctgcttatgctcttcatcttcatcttcagcatcctgggcatgcatctcttcggctgcaagtttgcctctgagcgggatggggacaccctgccagaccggaagaattttgactccttgctctgggccatcgtcactgtctttcagatcctgacccaggaggactggaacaaagtcctctacaatggtatggcctccacgtcgtcctgggcggccctttatttcattgccctcatgaccttcggcaactacgtgctcttcaatttgctggtcgccattctggtggagggcttccaggcggaggaaatcagcaaacgggaagatgcgagtggacagttaagctgtattcagctgcctgtcgactcccaggggggagatgccaacaagtccgaatcagagcccgatttcttctcacccagcctggatggtgatggggacaggaagaagtgcttggccttggtgtccctgggagagcacccggagctgcggaagagcctgctgccgcctctcatcatccacacggccgccacacccatgtcgctgcccaagagcaccagcacgggcctgggcgaggcgctgggccctgcgtcgcgccgcaccagcagcagcgggtcggcagagcctggggcggcccacgagatgaagtcaccgcccagcgcccgcagctctccgcacagcccctggagcgctgcaagcagctggaccagcaggcgctccagccggaacagcctcggccgtgcacccagcctgaagcggagaagcccaagtggagagcggcggtccctgttgtcgggagaaggccaggagagccaggatgaagaggagagctcagaagaggagcgggccagccctgcgggcagtgaccatcgccacagggggtccctggagcgggaggccaagagttcctttgacctgccagacacactgcaggtgccagggctgcatcgcactgccagtggccgagggtctgcttctgagcaccaggactgcaatggcaagtcggcttcagggcgcctggcccgggccctgcggcctgatgaccccccactggatggggatgacgccgatgacgagggcaacctgagcaaaggggaacgggtccgcgcgtggatccgagcccgactccctgcctgctgcctcgagcgagactcctggtcagcctacatcttccctcctcagtccaggttccgcctcctgtgtcaccggatcatcacccacaagatgttcgaccacgtggtccttgtcatcatcttccttaactgcatcaccatcgccatggagcgccccaaaattgacccccacagcgctgaacgcatcttcctgaccctctccaattacatcttcaccgcagtctttctggctgaaatgacagtgaaggtggtggcactgggctggtgcttcggggagcaggcgtacctgcggagcagttggaacgtgctggacgggctgttggtgctcatctccgtcatcgacattctggtgtccatggtctctgacagcggcaccaagatcctgggcatgctgagggtgctgcggctgctgcggaccctgcgcccgctcagggtgatcagccgggcgcaggggctgaagctggtggtggagacgctgatgtcctcactgaaacccatcggcaacattgtagtcatctgctgtgccttcttcatcattttcggcatcttgggggtgcagctcttcaaagggaagtttttcgtgtgccagggcgaggataccaggaacatcaccaataaatcggactgtgccgaggccagttaccggtgggtccggcacaagtacaactttgacaaccttggccaggccctgatgtccctgttcgttttggcctccaaggatggttgggtggacatcatgtacgatgggctggatgctgtgggcgtggaccagcagcccatcatgaaccacaacccctggatgctgctgtacttcatctcgttcctgctcattgtggccttctttgtcctgaacatgtttgtgggtgtggtggtggagaacttccacaagtgtcggcagcaccaggaggaagaggaggcccggcggcgggaggagaagcgcctacgaagactggagaaaaagagaaggaatctaatgctggacgatgtaattgcttccggcagctcagccagcgctgcgtcagaagcccagtgcaaaccttactactccgactactcccgcttccggctcctcgtccaccacttgtgcaccagccactacctggacctcttcatcacaggtgtcatcgggctgaacgtggtcaccatggccatggagcactaccagcagccccagattctggatgaggctctgaagatctgcaactacatcttcactgtcatctttgtcttggagtcagttttcaaacttgtggcctttggtttccgtcggttcttccaggacaggtggaaccagctggacctggccattgtgctgctgtccatcatgggcatcacgctggaggaaatcgaggtcaacgcctcgctgcccatcaaccccaccatcatccgcatcatgagggtgctgcgcattgcccgagtgctgaagctgctgaagatggctgtgggcatgcgggcgctgctggacacggtgatgcaggccctgccccaggtggggaacctgggacttctcttcatgttgttgtttttcatctttgcagctctgggcgtggagctctttggagacctggagtgtgacgagacacacccctgtgagggcctgggccgtcatgccacctttcggaactttggcatggccttcctaaccctcttccgagtctccacaggtgacaattggaatggcattatgaaggacaccctccgggactgtgaccaggagtccacctgctacaacacggtcatctcgcctatctactttgtgtccttcgtgctgacggcccagttcgtgctagtcaacgtggtgatcgccgtgctgatgaagcacctggaggagagcaacaaggaggccaaggaggaggccgagctagaggctgagctggagctggagatgaagaccctcagcccccagccccactcgccactgggcagccccttcctctggcctggggtcgagggccccgacagccccgacagccccaagcctggggctctgcacccagcggcccacgcgagatcagcctcccacttttccctggagcaccccacggacaggcagctgtttgacaccatatccctgctgatccagggctccctggagtgggagctgaagctgatggacgagctggcaggcccagggggccagccctctgccttcccttctgcccccagcctgggaggctccgacccacagatgcagccccaccccacggagctgccaggaccagacttactgactgtgcggaagtctggggtcagccgaacgcactctctgcccaatgacagctacatgtgtcggcatgggagcactgccgaggggcccctgggacacaggggctgggggctccccaaagctcagtcaggctccgtcttgtccgttcactcccagccagcagataccagctacatcctgcagcttcccaaagatgcacctcatctgctccagccccacagcgccccaacctggggcaccatccccaaactgcccccaccaggacgctcccctttggctcagaggccactcaggcgccaggcagcaataaggactgactccttggacgttcagggtctgggcagccgggaagacctgctggcagaggtgagtgggccctccccgcccctggcccgggcctactctttctggggccagtcaagtacccaggcacagcagcactcccgcagccacagcaagatctccaagcacatgaccccgccagccccttgcccaggcccagaacccaactggggcaagggccctccagagaccagaagcagcttagagttggacacggagctgagctggatttcaggagacctcctgccccctggcggccaggaggagcccccatccccacgggacctgaagaagtgctacagcgtggaggcccagagctgccagcgccggcctacgtcctggctggatgagcagaggagacactctatcgccgtcagctgcctggacagcggctcccaaccccacctgggcacagacccctctaaccttgggggccagcctcttggggggcctgggagccggcccaagaaaaaactcagcccgcctagtatcaccatagacccccccgagagccaaggtcctcggaccccgcccagccctggtatctgcctccggaggagggctccgtccagcgactccaaggatcccttggcctctggcccccctgacagcatggctgcctcgccctccccaaagaaagatgtgctgagtctctccggtttatcctctgacccagcagacctggacccctgagtcctgccccacttt

SEQ ID NO: 113248 - DNA, 6960 bp, Homo sapiens
  Payload ID: 2145
  Gene Symbol: CACNA1G
  Gene Name: calcium channel, voltage-dependent, T type, alpha 1G subunit
  Uniprot ID: O43497
  ENST ID: ENST00000515411
  CDS Start-End: 1-6945
atggacgaggaggaggatggagcgggcgccgaggagtcgggacagccccggagcttcatgcggctcaacgacctgtcgggggccgggggccggccggggccggggtcagcagaaaaggacccgggcagcgcggactccgaggcggaggggctgccgtacccggcgctggccccggtggttttcttctacttgagccaggacagccgcccgcggagctggtgtctccgcacggtctgtaacccctggtttgagcgcatcagcatgttggtcatccttctcaactgcgtgaccctgggcatgttccggccatgcgaggacatcgcctgtgactcccagcgctgccggatcctgcaggcctttgatgacttcatctttgccttctttgccgtggagatggtggtgaagatggtggccttgggcatctttgggaaaaagtgttacctgggagacacttggaaccggcttgactttttcatcgtcatcgcagggatgctggagtactcgctggacctgcagaacgtcagcttctcagctgtcaggacagtccgtgtgctgcgaccgctcagggccattaaccgggtgcccagcatgcgcatccttgtcacgttgctgctggatacgctgcccatgctgggcaacgtcctgctgctctgcttcttcgtcttcttcatcttcggcatcgtcggcgtccagctgtgggcagggctgcttcggaaccgatgcttcctacctgagaatttcagcctccccctgagcgtggacctggagcgctattaccagacagagaacgaggatgagagccccttcatctgctcccagccacgcgagaacggcatgcggtcctgcagaagcgtgcccacgctgcgcggggacgggggcggtggcccaccttgcggtctggactatgaggcctacaacagctccagcaacaccacctgtgtcaactggaaccagtactacaccaactgctcagcgggggagcacaaccccttcaagggcgccatcaactttgacaacattggctatgcctggatcgccatcttccaggtcatcacgctggagggctgggtcgacatcatgtactttgtgatggatgctcattccttctacaatttcatctacttcatcctcctcatcatcgtgggctccttcttcatgatcaacctgtgcctggtggtgattgccacgcagttctcagagaccaagcagcgggaaagccagctgatgcgggagcagcgtgtgcggttcctgtccaacgccagcaccctggctagcttctctgagcccggcagctgctatgaggagctgctcaagtacctggtgtacatccttcgtaaggcagcccgcaggctggctcaggtctctcgggcagcaggtgtgcgggttgggctgctcagcagcccagcacccctcgggggccaggagacccagcccagcagcagctgctctcgctcccaccgccgcctatccgtccaccacctggtgcaccaccaccaccaccatcaccaccactaccacctgggcaatgggacgctcagggccccccgggccagcccggagatccaggacagggatgccaatgggtcccgccggctcatgctgccaccaccctcgacgcctgccctctccggggccccccctggtggcgcagagtctgtgcacagcttctaccatgccgactgccacttagagccagtccgctgccaggcgccccctcccaggtccccatctgaggcatccggcaggactgtgggcagcgggaaggtgtatcccaccgtgcacaccagccctccaccggagacgctgaaggagaaggcactagtagaggtggctgccagctctgggcccccaaccctcaccagcctcaacatcccacccgggccctacagctccatgcacaagctgctggagacacagagtacaggtgcctgccaaagctcttgcaagatctccagcccttgcttgaaagcagacagtggagcctgtggtccagacagctgcccctactgtgcccgggccggggcaggggaggtggagctcgccgaccgtgaaatgcctgactcagacagcgaggcagtttatgagttcacacaggatgcccagcacagcgacctccgggacccccacagccggcggcaacggagcctgggcccagatgcagagcccagctctgtgctggccttctggaggctaatctgtgacaccttccgaaagattgtggacagcaagtactttggccggggaatcatgatcgccatcctggtcaacacactcagcatgggcatcgaataccacgagcagcccgaggagcttaccaacgccctagaaatcagcaacatcgtcttcaccagcctctttgccctggagatgctgctgaagctgcttgtgtatggtccctttggctacatcaagaatccctacaacatcttcgatggtgtcattgtggtcatcagcgtgtgggagatcgtgggccagcaggggggcggcctgtcggtgctgcggaccttccgcctgatgcgtgtgctgaagctggtgcgcttcctgccggcgctgcagcggcagctggtggtgctcatgaagaccatggacaacgtggccaccttctgcatgctgcttatgctcttcatcttcatcttcagcatcctgggcatgcatctcttcggctgcaagtttgcctctgagcgggatggggacaccctgccagaccggaagaattttgactccttgctctgggccatcgtcactgtctttcagatcctgacccaggaggactggaacaaagtcctctacaatggtatggcctccacgtcgtcctgggcggccctttatttcattgccctcatgaccttcggcaactacgtgctcttcaatttgctggtcgccattctggtggagggcttccaggcggaggaaatcagcaaacgggaagatgcgagtggacagttaagctgtattcagctgcctgtcgactcccaggggggagatgccaacaagtccgaatcagagcccgatttcttctcacccagcctggatggtgatggggacaggaagaagtgcttggccttggtgtccctgggagagcacccggagctgcggaagagcctgctgccgcctctcatcatccacacggccgccacacccatgtcgctgcccaagagcaccagcacgggcctgggcgaggcgctgggccctgcgtcgcgccgcaccagcagcagcgggtcggcagagcctggggcggcccacgagatgaagtcaccgcccagcgcccgcagctctccgcacagcccctggagcgctgcaagcagctggaccagcaggcgctccagccggaacagcctcggccgtgcacccagcctgaagcggagaagcccaagtggagagcggcggtccctgttgtcgggagaaggccaggagagccaggatgaagaggagagctcagaagaggagcgggccagccctgcgggcagtgaccatcgccacagggggtccctggagcgggaggccaagagttcctttgacctgccagacacactgcaggtgccagggctgcatcgcactgccagtggccgagggtctgcttctgagcaccaggactgcaatggcaagtcggcttcagggcgcctggcccgggccctgcggcctgatgaccccccactggatggggatgacgccgatgacgagggcaacctgagcaaaggggaacgggtccgcgcgtggatccgagcccgactccctgcctgctgcctcgagcgagactcctggtcagcctacatcttccctcctcagtccaggttccgcctcctgtgtcaccggatcatcacccacaagatgttcgaccacgtggtccttgtcatcatcttccttaactgcatcaccatcgccatggagcgccccaaaattgacccccacagcgctgaacgcatcttcctgaccctctccaattacatcttcaccgcagtctttctggctgaaatgacagtgaaggtggtggcactgggctggtgcttcggggagcaggcgtacctgcggagcagttggaacgtgctggacgggctgttggtgctcatctccgtcatcgacattctggtgtccatggtctctgacagcggcaccaagatcctgggcatgctgagggtgctgcggctgctgcggaccctgcgcccgctcagggtgatcagccgggcgcaggggctgaagctggtggtggagacgctgatgtcctcactgaaacccatcggcaacattgtagtcatctgctgtgccttcttcatcattttcggcatcttgggggtgcagctcttcaaagggaagtttttcgtgtgccagggcgaggataccaggaacatcaccaataaatcggactgtgccgaggccagttaccggtgggtccggcacaagtacaactttgacaaccttggccaggccctgatgtccctgttcgttttggcctccaaggatggttgggtggacatcatgtacgatgggctggatgctgtgggcgtggaccagcagcccatcatgaaccacaacccctggatgctgctgtacttcatctcgttcctgctcattgtggccttctttgtcctgaacatgtttgtgggtgtggtggtggagaacttccacaagtgtcggcagcaccaggaggaagaggaggcccggcggcgggaggagaagcgcctacgaagactggagaaaaagagaaggaaagcccagtgcaaaccttactactccgactactcccgcttccggctcctcgtccaccacttgtgcaccagccactacctggacctcttcatcacaggtgtcatcgggctgaacgtggtcaccatggccatggagcactaccagcagccccagattctggatgaggctctgaagatctgcaactacatcttcactgtcatctttgtcttggagtcagttttcaaacttgtggcctttggtttccgtcggttcttccaggacaggtggaaccagctggacctggccattgtgctgctgtccatcatgggcatcacgctggaggaaatcgaggtcaacgcctcgctgcccatcaaccccaccatcatccgcatcatgagggtgctgcgcattgcccgagtgctgaagctgctgaagatggctgtgggcatgcgggcgctgctggacacggtgatgcaggccctgccccaggtggggaacctgggacttctcttcatgttgttgtttttcatctttgcagctctgggcgtggagctctttggagacctggagtgtgacgagacacacccctgtgagggcctgggccgtcatgccacctttcggaactttggcatggccttcctaaccctcttccgagtctccacaggtgacaattggaatggcattatgaaggacaccctccgggactgtgaccaggagtccacctgctacaacacggtcatctcgcctatctactttgtgtccttcgtgctgacggcccagttcgtgctagtcaacgtggtgatcgccgtgctgatgaagcacctggaggagagcaacaaggaggccaaggaggaggccgagctagaggctgagctggagctggagatgaagaccctcagcccccagccccactcgccactgggcagccccttcctctggcctggggtcgagggccccgacagccccgacagccccaagcctggggctctgcacccagcggcccacgcgagatcagcctcccacttttccctggagcaccccacggacaggcagctgtttgacaccatatccctgctgatccagggctccctggagtgggagctgaagctgatggacgagctggcaggcccagggggccagccctctgccttcccttctgcccccagcctgggaggctccgacccacagatgcagccccaccccacggagctgccaggaccagacttactgactgtgcggaagtctggggtcagccgaacgcactctctgcccaatgacagctacatgtgtcggcatgggagcactgccgaggggcccctgggacacaggggctgggggctccccaaagctcagtcaggctccgtcttgtccgttcactcccagccagcagataccagctacatcctgcagcttcccaaagatgcacctcatctgctccagccccacagcgccccaacctggggcaccatccccaaactgcccccaccaggacgctcccctttggctcagaggccactcaggcgccaggcagcaataaggactgactccttggacgttcagggtctgggcagccgggaagacctgctggcagaggtgagtgggccctccccgcccctggcccgggcctactctttctggggccagtcaagtacccaggcacagcagcactcccgcagccacagcaagatctccaagcacatgaccccgccagccccttgcccaggcccagaacccaactggggcaagggccctccagagaccagaagcagcttagagttggacacggagctgagctggatttcaggagacctcctgccccctggcggccaggaggagcccccatccccacgggacctgaagaagtgctacagcgtggaggcccagagctgccagcgccggcctacgtcctggctggatgagcagaggagacactctatcgccgtcagctgcctggacagcggctcccaaccccacctgggcacagacccctctaaccttgggggccagcctcttggggggcctgggagccggcccaagaaaaaactcagcccgcctagtatcaccatagacccccccgagagccaaggtcctcggaccccgcccagccctggtatctgcctccggaggagggctccgtccagcgactccaaggatcccttggcctctggcccccctgacagcatggctgcctcgccctccccaaagaaagatgtgctgagtctctccggtttatcctctgacccagcagacctggacccctgagtcctgccccacttt

SEQ ID NO: 113249 - DNA, 6891 bp, Homo sapiens
  Payload ID: 2145
  Gene Symbol: CACNA1G
  Gene Name: calcium channel, voltage-dependent, T type, alpha 1G subunit
  Uniprot ID: O43497
  ENST ID: ENST00000514079
  CDS Start-End: 1-6876
atggacgaggaggaggatggagcgggcgccgaggagtcgggacagccccggagcttcatgcggctcaacgacctgtcgggggccgggggccggccggggccggggtcagcagaaaaggacccgggcagcgcggactccgaggcggaggggctgccgtacccggcgctggccccggtggttttcttctacttgagccaggacagccgcccgcggagctggtgtctccgcacggtctgtaacccctggtttgagcgcatcagcatgttggtcatccttctcaactgcgtgaccctgggcatgttccggccatgcgaggacatcgcctgtgactcccagcgctgccggatcctgcaggcctttgatgacttcatctttgccttctttgccgtggagatggtggtgaagatggtggccttgggcatctttgggaaaaagtgttacctgggagacacttggaaccggcttgactttttcatcgtcatcgcagggatgctggagtactcgctggacctgcagaacgtcagcttctcagctgtcaggacagtccgtgtgctgcgaccgctcagggccattaaccgggtgcccagcatgcgcatccttgtcacgttgctgctggatacgctgcccatgctgggcaacgtcctgctgctctgcttcttcgtcttcttcatcttcggcatcgtcggcgtccagctgtgggcagggctgcttcggaaccgatgcttcctacctgagaatttcagcctccccctgagcgtggacctggagcgctattaccagacagagaacgaggatgagagccccttcatctgctcccagccacgcgagaacggcatgcggtcctgcagaagcgtgcccacgctgcgcggggacgggggcggtggcccaccttgcggtctggactatgaggcctacaacagctccagcaacaccacctgtgtcaactggaaccagtactacaccaactgctcagcgggggagcacaaccccttcaagggcgccatcaactttgacaacattggctatgcctggatcgccatcttccaggtcatcacgctggagggctgggtcgacatcatgtactttgtgatggatgctcattccttctacaatttcatctacttcatcctcctcatcatcgtgggctccttcttcatgatcaacctgtgcctggtggtgattgccacgcagttctcagagaccaagcagcgggaaagccagctgatgcgggagcagcgtgtgcggttcctgtccaacgccagcaccctggctagcttctctgagcccggcagctgctatgaggagctgctcaagtacctggtgtacatccttcgtaaggcagcccgcaggctggctcaggtctctcgggcagcaggtgtgcgggttgggctgctcagcagcccagcacccctcgggggccaggagacccagcccagcagcagctgctctcgctcccaccgccgcctatccgtccaccacctggtgcaccaccaccaccaccatcaccaccactaccacctgggcaatgggacgctcagggccccccgggccagcccggagatccaggacagggatgccaatgggtcccgccggctcatgctgccaccaccctcgacgcctgccctctccggggccccccctggtggcgcagagtctgtgcacagcttctaccatgccgactgccacttagagccagtccgctgccaggcgccccctcccaggtccccatctgaggcatccggcaggactgtgggcagcgggaaggtgtatcccaccgtgcacaccagccctccaccggagacgctgaaggagaaggcactagtagaggtggctgccagctctgggcccccaaccctcaccagcctcaacatcccacccgggccctacagctccatgcacaagctgctggagacacagagtacaggtgcctgccaaagctcttgcaagatctccagcccttgcttgaaagcagacagtggagcctgtggtccagacagctgcccctactgtgcccgggccggggcaggggaggtggagctcgccgaccgtgaaatgcctgactcagacagcgaggcagtttatgagttcacacaggatgcccagcacagcgacctccgggacccccacagccggcggcaacggagcctgggcccagatgcagagcccagctctgtgctggccttctggaggctaatctgtgacaccttccgaaagattgtggacagcaagtactttggccggggaatcatgatcgccatcctggtcaacacactcagcatgggcatcgaataccacgagcagcccgaggagcttaccaacgccctagaaatcagcaacatcgtcttcaccagcctctttgccctggagatgctgctgaagctgcttgtgtatggtccctttggctacatcaagaatccctacaacatcttcgatggtgtcattgtggtcatcagcgtgtgggagatcgtgggccagcaggggggcggcctgtcggtgctgcggaccttccgcctgatgcgtgtgctgaagctggtgcgcttcctgccggcgctgcagcggcagctggtggtgctcatgaagaccatggacaacgtggccaccttctgcatgctgcttatgctcttcatcttcatcttcagcatcctgggcatgcatctcttcggctgcaagtttgcctctgagcgggatggggacaccctgccagaccggaagaattttgactccttgctctgggccatcgtcactgtctttcagatcctgacccaggaggactggaacaaagtcctctacaatggtatggcctccacgtcgtcctgggcggccctttatttcattgccctcatgaccttcggcaactacgtgctcttcaatttgctggtcgccattctggtggagggcttccaggcggaggaaatcagcaaacgggaagatgcgagtggacagttaagctgtattcagctgcctgtcgactcccaggggggagatgccaacaagtccgaatcagagcccgatttcttctcacccagcctggatggtgatggggacaggaagaagtgcttggccttggtgtccctgggagagcacccggagctgcggaagagcctgctgccgcctctcatcatccacacggccgccacacccatgtcgctgcccaagagcaccagcacgggcctgggcgaggcgctgggccctgcgtcgcgccgcaccagcagcagcgggtcggcagagcctggggcggcccacgagatgaagtcaccgcccagcgcccgcagctctccgcacagcccctggagcgctgcaagcagctggaccagcaggcgctccagccggaacagcctcggccgtgcacccagcctgaagcggagaagcccaagtggagagcggcggtccctgttgtcgggagaaggccaggagagccaggatgaagaggagagctcagaagaggagcgggccagccctgcgggcagtgaccatcgccacagggggtccctggagcgggaggccaagagttcctttgacctgccagacacactgcaggtgccagggctgcatcgcactgccagtggccgagggtctgcttctgagcaccaggactgcaatggcaagtcggcttcagggcgcctggcccgggccctgcggcctgatgaccccccactggatggggatgacgccgatgacgagggcaacctgagcaaaggggaacgggtccgcgcgtggatccgagcccgactccctgcctgctgcctcgagcgagactcctggtcagcctacatcttccctcctcagtccaggttccgcctcctgtgtcaccggatcatcacccacaagatgttcgaccacgtggtccttgtcatcatcttccttaactgcatcaccatcgccatggagcgccccaaaattgacccccacagcgctgaacgcatcttcctgaccctctccaattacatcttcaccgcagtctttctggctgaaatgacagtgaaggtggtggcactgggctggtgcttcggggagcaggcgtacctgcggagcagttggaacgtgctggacgggctgttggtgctcatctccgtcatcgacattctggtgtccatggtctctgacagcggcaccaagatcctgggcatgctgagggtgctgcggctgctgcggaccctgcgcccgctcagggtgatcagccgggcgcaggggctgaagctggtggtggagacgctgatgtcctcactgaaacccatcggcaacattgtagtcatctgctgtgccttcttcatcattttcggcatcttgggggtgcagctcttcaaagggaagtttttcgtgtgccagggcgaggataccaggaacatcaccaataaatcggactgtgccgaggccagttaccggtgggtccggcacaagtacaactttgacaaccttggccaggccctgatgtccctgttcgttttggcctccaaggatggttgggtggacatcatgtacgatgggctggatgctgtgggcgtggaccagcagcccatcatgaaccacaacccctggatgctgctgtacttcatctcgttcctgctcattgtggccttctttgtcctgaacatgtttgtgggtgtggtggtggagaacttccacaagtgtcggcagcaccaggaggaagaggaggcccggcggcgggaggagaagcgcctacgaagactggagaaaaagagaaggagtaaggagaagcagatggctgatctaatgctggacgatgtaattgcttccggcagctcagccagcgctgcgtcagaagcccagtgcaaaccttactactccgactactcccgcttccggctcctcgtccaccacttgtgcaccagccactacctggacctcttcatcacaggtgtcatcgggctgaacgtggtcaccatggccatggagcactaccagcagccccagattctggatgaggctctgaagatctgcaactacatcttcactgtcatctttgtcttggagtcagttttcaaacttgtggcctttggtttccgtcggttcttccaggacaggtggaaccagctggacctggccattgtgctgctgtccatcatgggcatcacgctggaggaaatcgaggtcaacgcctcgctgcccatcaaccccaccatcatccgcatcatgagggtgctgcgcattgcccgagtgctgaagctgctgaagatggctgtgggcatgcgggcgctgctggacacggtgatgcaggccctgccccaggtggggaacctgggacttctcttcatgttgttgtttttcatctttgcagctctgggcgtggagctctttggagacctggagtgtgacgagacacacccctgtgagggcctgggccgtcatgccacctttcggaactttggcatggccttcctaaccctcttccgagtctccacaggtgacaattggaatggcattatgaaggacaccctccgggactgtgaccaggagtccacctgctacaacacggtcatctcgcctatctactttgtgtccttcgtgctgacggcccagttcgtgctagtcaacgtggtgatcgccgtgctgatgaagcacctggaggagagcaacaaggaggccaaggaggaggccgagctagaggctgagctggagctggagatgaagaccctcagcccccagccccactcgccactgggcagccccttcctctggcctggggtcgagggccccgacagccccgacagccccaagcctggggctctgcacccagcggcccacgcgagatcagcctcccacttttccctggagcaccccacgatgcagccccaccccacggagctgccaggaccagacttactgactgtgcggaagtctggggtcagccgaacgcactctctgcccaatgacagctacatgtgtcggcatgggagcactgccgaggggcccctgggacacaggggctgggggctccccaaagctcagtcaggctccgtcttgtccgttcactcccagccagcagataccagctacatcctgcagcttcccaaagatgcacctcatctgctccagccccacagcgccccaacctggggcaccatccccaaactgcccccaccaggacgctcccctttggctcagaggccactcaggcgccaggcagcaataaggactgactccttggacgttcagggtctgggcagccgggaagacctgctggcagaggtgagtgggccctccccgcccctggcccgggcctactctttctggggccagtcaagtacccaggcacagcagcactcccgcagccacagcaagatctccaagcacatgaccccgccagccccttgcccaggcccagaacccaactggggcaagggccctccagagaccagaagcagcttagagttggacacggagctgagctggatttcaggagacctcctgccccctggcggccaggaggagcccccatccccacgggacctgaagaagtgctacagcgtggaggcccagagctgccagcgccggcctacgtcctggctggatgagcagaggagacactctatcgccgtcagctgcctggacagcggctcccaaccccacctgggcacagacccctctaaccttgggggccagcctcttggggggcctgggagccggcccaagaaaaaactcagcccgcctagtatcaccatagacccccccgagagccaaggtcctcggaccccgcccagccctggtatctgcctccggaggagggctccgtccagcgactccaaggatcccttggcctctggcccccctgacagcatggctgcctcgccctccccaaagaaagatgtgctgagtctctccggtttatcctctgacccagcagacctggacccctgagtcctgccccacttt

SEQ ID NO: 113250 - DNA, 6731 bp, Homo sapiens
  Payload ID: 2145
  Gene Symbol: CACNA1G
  Gene Name: calcium channel, voltage-dependent, T type, alpha 1G subunit
  Uniprot ID: O43497
  ENST ID: ENST00000511768
  CDS Start-End: 1-5241
atggacgaggaggaggatggagcgggcgccgaggagtcgggacagccccggagcttcatgcggctcaacgacctgtcgggggccgggggccggccggggccggggtcagcagaaaaggacccgggcagcgcggactccgaggcggaggggctgccgtacccggcgctggccccggtggttttcttctacttgagccaggacagccgcccgcggagctggtgtctccgcacggtctgtaacccctggtttgagcgcatcagcatgttggtcatccttctcaactgcgtgaccctgggcatgttccggccatgcgaggacatcgcctgtgactcccagcgctgccggatcctgcaggcctttgatgacttcatctttgccttctttgccgtggagatggtggtgaagatggtggccttgggcatctttgggaaaaagtgttacctgggagacacttggaaccggcttgactttttcatcgtcatcgcagggatgctggagtactcgctggacctgcagaacgtcagcttctcagctgtcaggacagtccgtgtgctgcgaccgctcagggccattaaccgggtgcccagcatgcgcatccttgtcacgttgctgctggatacgctgcccatgctgggcaacgtcctgctgctctgcttcttcgtcttcttcatcttcggcatcgtcggcgtccagctgtgggcagggctgcttcggaaccgatgcttcctacctgagaatttcagcctccccctgagcgtggacctggagcgctattaccagacagagaacgaggatgagagccccttcatctgctcccagccacgcgagaacggcatgcggtcctgcagaagcgtgcccacgctgcgcggggacgggggcggtggcccaccttgcggtctggactatgaggcctacaacagctccagcaacaccacctgtgtcaactggaaccagtactacaccaactgctcagcgggggagcacaaccccttcaagggcgccatcaactttgacaacattggctatgcctggatcgccatcttccaggtcatcacgctggagggctgggtcgacatcatgtactttgtgatggatgctcattccttctacaatttcatctacttcatcctcctcatcatcgtgggctccttcttcatgatcaacctgtgcctggtggtgattgccacgcagttctcagagaccaagcagcgggaaagccagctgatgcgggagcagcgtgtgcggttcctgtccaacgccagcaccctggctagcttctctgagcccggcagctgctatgaggagctgctcaagtacctggtgtacatccttcgtaaggcagcccgcaggctggctcaggtctctcgggcagcaggtgtgcgggttgggctgctcagcagcccagcacccctcgggggccaggagacccagcccagcagcagctgctctcgctcccaccgccgcctatccgtccaccacctggtgcaccaccaccaccaccatcaccaccactaccacctgggcaatgggacgctcagggccccccgggccagcccggagatccaggacagggatgccaatgggtcccgccggctcatgctgccaccaccctcgacgcctgccctctccggggccccccctggtggcgcagagtctgtgcacagcttctaccatgccgactgccacttagagccagtccgctgccaggcgccccctcccaggtccccatctgaggcatccggcaggactgtgggcagcgggaaggtgtatcccaccgtgcacaccagccctccaccggagacgctgaaggagaaggcactagtagaggtggctgccagctctgggcccccaaccctcaccagcctcaacatcccacccgggccctacagctccatgcacaagctgctggagacacagagtacaggtgcctgccaaagctcttgcaagatctccagcccttgcttgaaagcagacagtggagcctgtggtccagacagctgcccctactgtgcccgggccggggcaggggaggtggagctcgccgaccgtgaaatgcctgactcagacagcgaggcagtttatgagttcacacaggatgcccagcacagcgacctccgggacccccacagccggcggcaacggagcctgggcccagatgcagagcccagctctgtgctggccttctggaggctaatctgtgacaccttccgaaagattgtggacagcaagtactttggccggggaatcatgatcgccatcctggtcaacacactcagcatgggcatcgaataccacgagcagcccgaggagcttaccaacgccctagaaatcagcaacatcgtcttcaccagcctctttgccctggagatgctgctgaagctgcttgtgtatggtccctttggctacatcaagaatccctacaacatcttcgatggtgtcattgtggtcatcagcgtgtgggagatcgtgggccagcaggggggcggcctgtcggtgctgcggaccttccgcctgatgcgtgtgctgaagctggtgcgcttcctgccggcgctgcagcggcagctggtggtgctcatgaagaccatggacaacgtggccaccttctgcatgctgcttatgctcttcatcttcatcttcagcatcctgggcatgcatctcttcggctgcaagtttgcctctgagcgggatggggacaccctgccagaccggaagaattttgactccttgctctgggccatcgtcactgtctttcagatcctgacccaggaggactggaacaaagtcctctacaatggtatggcctccacgtcgtcctgggcggccctttatttcattgccctcatgaccttcggcaactacgtgctcttcaatttgctggtcgccattctggtggagggcttccaggcggagggagatgccaacaagtccgaatcagagcccgatttcttctcacccagcctggatggtgatggggacaggaagaagtgcttggccttggtgtccctgggagagcacccggagctgcggaagagcctgctgccgcctctcatcatccacacggccgccacacccatgtcgctgcccaagagcaccagcacgggcctgggcgaggcgctgggccctgcgtcgcgccgcaccagcagcagcgggtcggcagagcctggggcggcccacgagatgaagtcaccgcccagcgcccgcagctctccgcacagcccctggagcgctgcaagcagctggaccagcaggcgctccagccggaacagcctcggccgtgcacccagcctgaagcggagaagcccaagtggagagcggcggtccctgttgtcgggagaaggccaggagagccaggatgaagaggagagctcagaagaggagcgggccagccctgcgggcagtgaccatcgccacagggggtccctggagcgggaggccaagagttcctttgacctgccagacacactgcaggtgccagggctgcatcgcactgccagtggccgagggtctgcttctgagcaccaggactgcaatggcaagtcggcttcagggcgcctggcccgggccctgcggcctgatgaccccccactggatggggatgacgccgatgacgagggcaacctgagcaaaggggaacgggtccgcgcgtggatccgagcccgactccctgcctgctgcctcgagcgagactcctggtcagcctacatcttccctcctcagtccaggttccgcctcctgtgtcaccggatcatcacccacaagatgttcgaccacgtggtccttgtcatcatcttccttaactgcatcaccatcgccatggagcgccccaaaattgacccccacagcgctgaacgcatcttcctgaccctctccaattacatcttcaccgcagtctttctggctgaaatgacagtgaaggtggtggcactgggctggtgcttcggggagcaggcgtacctgcggagcagttggaacgtgctggacgggctgttggtgctcatctccgtcatcgacattctggtgtccatggtctctgacagcggcaccaagatcctgggcatgctgagggtgctgcggctgctgcggaccctgcgcccgctcagggtgatcagccgggcgcaggggctgaagctggtggtggagacgctgatgtcctcactgaaacccatcggcaacattgtagtcatctgctgtgccttcttcatcattttcggcatcttgggggtgcagctcttcaaagggaagtttttcgtgtgccagggcgaggataccaggaacatcaccaataaatcggactgtgccgaggccagttaccggtgggtccggcacaagtacaactttgacaaccttggccaggccctgatgtccctgttcgttttggcctccaaggatggttgggtggacatcatgtacgatgggctggatgctgtgggcgtggaccagcagcccatcatgaaccacaacccctggatgctgctgtacttcatctcgttcctgctcattgtggccttctttgtcctgaacatgtttgtgggtgtggtggtggagaacttccacaagtgtcggcagcaccaggaggaagaggaggcccggcggcgggaggagaagcgcctacgaagactggagaaaaagagaaggaatctaatgctggacgatgtaattgcttccggcagctcagccagcgctgcgtcagaagcccagtgcaaaccttactactccgactactcccgcttccggctcctcgtccaccacttgtgcaccagccactacctggacctcttcatcacaggtgtcatcgggctgaacgtggtcaccatggccatggagcactaccagcagccccagattctggatgaggctctgaagatctgcaactacatcttcactgtcatctttgtcttggagtcagttttcaaacttgtggcctttggtttccgtcggttcttccaggacaggtggaaccagctggacctggccattgtgctgctgtccatcatgggcatcacgctggaggaaatcgaggtcaacgcctcgctgcccatcaaccccaccatcatccgcatcatgagggtgctgcgcattgcccgagtgctgaagctgctgaagatggctgtgggcatgcgggcgctgctggacacgctctgggcgtggagctctttggagacctggagtgtgacgagacacacccctgtgagggcctgggccgtcatgccacctttcggaactttggcatggccttcctaaccctcttccgagtctccacaggtgacaattggaatggcattatgaaggacaccctccgggactgtgaccaggagtccacctgctacaacacggtcatctcgcctatctactttgtgtccttcgtgctgacggcccagttcgtgctagtcaacgtggtgatcgccgtgctgatgaagcacctggaggagagcaacaaggaggccaaggaggaggccgagctagaggctgagctggagctggagatgaagaccctcagcccccagccccactcgccactgggcagccccttcctctggcctggggtcgagggccccgacagccccgacagccccaagcctggggctctgcacccagcggcccacgcgagatcagcctcccacttttccctggagcaccccacgatgcagccccaccccacggagctgccaggaccagacttactgactgtgcggaagtctggggtcagccgaacgcactctctgcccaatgacagctacatgtgtcggcatgggagcactgccgaggggcccctgggacacaggggctgggggctccccaaagctcagtcaggctccgtcttgtccgttcactcccagccagcagataccagctacatcctgcagcttcccaaagatgcacctcatctgctccagccccacagcgccccaacctggggcaccatccccaaactgcccccaccaggacgctcccctttggctcagaggccactcaggcgccaggcagcaataaggactgactccttggacgttcagggtctgggcagccgggaagacctgctggcagaggtgagtgggccctccccgcccctggcccgggcctactctttctggggccagtcaagtacccaggcacagcagcactcccgcagccacagcaagatctccaagcacatgaccccgccagccccttgcccaggcccagaacccaactggggcaagggccctccagagaccagaagcagcttagagttggacacggagctgagctggatttcaggagacctcctgccccctggcggccaggaggagcccccatccccacgggacctgaagaagtgctacagcgtggaggcccagagctgccagcgccggcctacgtcctggctggatgagcagaggagacactctatcgccgtcagctgcctggacagcggctcccaaccccacctgggcacagacccctctaaccttgggggccagcctcttggggggcctgggagccggcccaagaaaaaactcagcccgcctagtatcaccatagacccccccgagagccaaggtcctcggaccccgcccagccctggtatctgcctccggaggagggctccgtccagcgactccaaggatcccttggcctctggcccccctgacagcatggctgcctcgccctccccaaagaaagatgtgctgagtctctccggtttatcctctgacccagcagacctggacccctgagtcctgccccacttt

SEQ ID NO: 113251 - DNA, 6788 bp, Homo sapiens
  Payload ID: 2145
  Gene Symbol: CACNA1G
  Gene Name: calcium channel, voltage-dependent, T type, alpha 1G subunit
  Uniprot ID: O43497
  ENST ID: ENST00000504076
  CDS Start-End: 1-5298
atggacgaggaggaggatggagcgggcgccgaggagtcgggacagccccggagcttcatgcggctcaacgacctgtcgggggccgggggccggccggggccggggtcagcagaaaaggacccgggcagcgcggactccgaggcggaggggctgccgtacccggcgctggccccggtggttttcttctacttgagccaggacagccgcccgcggagctggtgtctccgcacggtctgtaacccctggtttgagcgcatcagcatgttggtcatccttctcaactgcgtgaccctgggcatgttccggccatgcgaggacatcgcctgtgactcccagcgctgccggatcctgcaggcctttgatgacttcatctttgccttctttgccgtggagatggtggtgaagatggtggccttgggcatctttgggaaaaagtgttacctgggagacacttggaaccggcttgactttttcatcgtcatcgcagggatgctggagtactcgctggacctgcagaacgtcagcttctcagctgtcaggacagtccgtgtgctgcgaccgctcagggccattaaccgggtgcccagcatgcgcatccttgtcacgttgctgctggatacgctgcccatgctgggcaacgtcctgctgctctgcttcttcgtcttcttcatcttcggcatcgtcggcgtccagctgtgggcagggctgcttcggaaccgatgcttcctacctgagaatttcagcctccccctgagcgtggacctggagcgctattaccagacagagaacgaggatgagagccccttcatctgctcccagccacgcgagaacggcatgcggtcctgcagaagcgtgcccacgctgcgcggggacgggggcggtggcccaccttgcggtctggactatgaggcctacaacagctccagcaacaccacctgtgtcaactggaaccagtactacaccaactgctcagcgggggagcacaaccccttcaagggcgccatcaactttgacaacattggctatgcctggatcgccatcttccaggtcatcacgctggagggctgggtcgacatcatgtactttgtgatggatgctcattccttctacaatttcatctacttcatcctcctcatcatcgtgggctccttcttcatgatcaacctgtgcctggtggtgattgccacgcagttctcagagaccaagcagcgggaaagccagctgatgcgggagcagcgtgtgcggttcctgtccaacgccagcaccctggctagcttctctgagcccggcagctgctatgaggagctgctcaagtacctggtgtacatccttcgtaaggcagcccgcaggctggctcaggtctctcgggcagcaggtgtgcgggttgggctgctcagcagcccagcacccctcgggggccaggagacccagcccagcagcagctgctctcgctcccaccgccgcctatccgtccaccacctggtgcaccaccaccaccaccatcaccaccactaccacctgggcaatgggacgctcagggccccccgggccagcccggagatccaggacagggatgccaatgggtcccgccggctcatgctgccaccaccctcgacgcctgccctctccggggccccccctggtggcgcagagtctgtgcacagcttctaccatgccgactgccacttagagccagtccgctgccaggcgccccctcccaggtccccatctgaggcatccggcaggactgtgggcagcgggaaggtgtatcccaccgtgcacaccagccctccaccggagacgctgaaggagaaggcactagtagaggtggctgccagctctgggcccccaaccctcaccagcctcaacatcccacccgggccctacagctccatgcacaagctgctggagacacagagtacaggtgcctgccaaagctcttgcaagatctccagcccttgcttgaaagcagacagtggagcctgtggtccagacagctgcccctactgtgcccgggccggggcaggggaggtggagctcgccgaccgtgaaatgcctgactcagacagcgaggcagtttatgagttcacacaggatgcccagcacagcgacctccgggacccccacagccggcggcaacggagcctgggcccagatgcagagcccagctctgtgctggccttctggaggctaatctgtgacaccttccgaaagattgtggacagcaagtactttggccggggaatcatgatcgccatcctggtcaacacactcagcatgggcatcgaataccacgagcagcccgaggagcttaccaacgccctagaaatcagcaacatcgtcttcaccagcctctttgccctggagatgctgctgaagctgcttgtgtatggtccctttggctacatcaagaatccctacaacatcttcgatggtgtcattgtggtcatcagcgtgtgggagatcgtgggccagcaggggggcggcctgtcggtgctgcggaccttccgcctgatgcgtgtgctgaagctggtgcgcttcctgccggcgctgcagcggcagctggtggtgctcatgaagaccatggacaacgtggccaccttctgcatgctgcttatgctcttcatcttcatcttcagcatcctgggcatgcatctcttcggctgcaagtttgcctctgagcgggatggggacaccctgccagaccggaagaattttgactccttgctctgggccatcgtcactgtctttcagatcctgacccaggaggactggaacaaagtcctctacaatggtatggcctccacgtcgtcctgggcggccctttatttcattgccctcatgaccttcggcaactacgtgctcttcaatttgctggtcgccattctggtggagggcttccaggcggaggaaatcagcaaacgggaagatgcgagtggacagttaagctgtattcagctgcctgtcgactcccaggggggagatgccaacaagtccgaatcagagcccgatttcttctcacccagcctggatggtgatggggacaggaagaagtgcttggccttggtgtccctgggagagcacccggagctgcggaagagcctgctgccgcctctcatcatccacacggccgccacacccatgtcgctgcccaagagcaccagcacgggcctgggcgaggcgctgggccctgcgtcgcgccgcaccagcagcagcgggtcggcagagcctggggcggcccacgagatgaagtcaccgcccagcgcccgcagctctccgcacagcccctggagcgctgcaagcagctggaccagcaggcgctccagccggaacagcctcggccgtgcacccagcctgaagcggagaagcccaagtggagagcggcggtccctgttgtcgggagaaggccaggagagccaggatgaagaggagagctcagaagaggagcgggccagccctgcgggcagtgaccatcgccacagggggtccctggagcgggaggccaagagttcctttgacctgccagacacactgcaggtgccagggctgcatcgcactgccagtggccgagggtctgcttctgagcaccaggactgcaatggcaagtcggcttcagggcgcctggcccgggccctgcggcctgatgaccccccactggatggggatgacgccgatgacgagggcaacctgagcaaaggggaacgggtccgcgcgtggatccgagcccgactccctgcctgctgcctcgagcgagactcctggtcagcctacatcttccctcctcagtccaggttccgcctcctgtgtcaccggatcatcacccacaagatgttcgaccacgtggtccttgtcatcatcttccttaactgcatcaccatcgccatggagcgccccaaaattgacccccacagcgctgaacgcatcttcctgaccctctccaattacatcttcaccgcagtctttctggctgaaatgacagtgaaggtggtggcactgggctggtgcttcggggagcaggcgtacctgcggagcagttggaacgtgctggacgggctgttggtgctcatctccgtcatcgacattctggtgtccatggtctctgacagcggcaccaagatcctgggcatgctgagggtgctgcggctgctgcggaccctgcgcccgctcagggtgatcagccgggcgcaggggctgaagctggtggtggagacgctgatgtcctcactgaaacccatcggcaacattgtagtcatctgctgtgccttcttcatcattttcggcatcttgggggtgcagctcttcaaagggaagtttttcgtgtgccagggcgaggataccaggaacatcaccaataaatcggactgtgccgaggccagttaccggtgggtccggcacaagtacaactttgacaaccttggccaggccctgatgtccctgttcgttttggcctccaaggatggttgggtggacatcatgtacgatgggctggatgctgtgggcgtggaccagcagcccatcatgaaccacaacccctggatgctgctgtacttcatctcgttcctgctcattgtggccttctttgtcctgaacatgtttgtgggtgtggtggtggagaacttccacaagtgtcggcagcaccaggaggaagaggaggcccggcggcgggaggagaagcgcctacgaagactggagaaaaagagaaggagtaaggagaagcagatggctgaagcccagtgcaaaccttactactccgactactcccgcttccggctcctcgtccaccacttgtgcaccagccactacctggacctcttcatcacaggtgtcatcgggctgaacgtggtcaccatggccatggagcactaccagcagccccagattctggatgaggctctgaagatctgcaactacatcttcactgtcatctttgtcttggagtcagttttcaaacttgtggcctttggtttccgtcggttcttccaggacaggtggaaccagctggacctggccattgtgctgctgtccatcatgggcatcacgctggaggaaatcgaggtcaacgcctcgctgcccatcaaccccaccatcatccgcatcatgagggtgctgcgcattgcccgagtgctgaagctgctgaagatggctgtgggcatgcgggcgctgctggacacggtgatgcaggccctgccccagctctgggcgtggagctctttggagacctggagtgtgacgagacacacccctgtgagggcctgggccgtcatgccacctttcggaactttggcatggccttcctaaccctcttccgagtctccacaggtgacaattggaatggcattatgaaggacaccctccgggactgtgaccaggagtccacctgctacaacacggtcatctcgcctatctactttgtgtccttcgtgctgacggcccagttcgtgctagtcaacgtggtgatcgccgtgctgatgaagcacctggaggagagcaacaaggaggccaaggaggaggccgagctagaggctgagctggagctggagatgaagaccctcagcccccagccccactcgccactgggcagccccttcctctggcctggggtcgagggccccgacagccccgacagccccaagcctggggctctgcacccagcggcccacgcgagatcagcctcccacttttccctggagcaccccacgatgcagccccaccccacggagctgccaggaccagacttactgactgtgcggaagtctggggtcagccgaacgcactctctgcccaatgacagctacatgtgtcggcatgggagcactgccgaggggcccctgggacacaggggctgggggctccccaaagctcagtcaggctccgtcttgtccgttcactcccagccagcagataccagctacatcctgcagcttcccaaagatgcacctcatctgctccagccccacagcgccccaacctggggcaccatccccaaactgcccccaccaggacgctcccctttggctcagaggccactcaggcgccaggcagcaataaggactgactccttggacgttcagggtctgggcagccgggaagacctgctggcagaggtgagtgggccctccccgcccctggcccgggcctactctttctggggccagtcaagtacccaggcacagcagcactcccgcagccacagcaagatctccaagcacatgaccccgccagccccttgcccaggcccagaacccaactggggcaagggccctccagagaccagaagcagcttagagttggacacggagctgagctggatttcaggagacctcctgccccctggcggccaggaggagcccccatccccacgggacctgaagaagtgctacagcgtggaggcccagagctgccagcgccggcctacgtcctggctggatgagcagaggagacactctatcgccgtcagctgcctggacagcggctcccaaccccacctgggcacagacccctctaaccttgggggccagcctcttggggggcctgggagccggcccaagaaaaaactcagcccgcctagtatcaccatagacccccccgagagccaaggtcctcggaccccgcccagccctggtatctgcctccggaggagggctccgtccagcgactccaaggatcccttggcctctggcccccctgacagcatggctgcctcgccctccccaaagaaagatgtgctgagtctctccggtttatcctctgacccagcagacctggacccctgagtcctgccccacttt

SEQ ID NO: 113252 - DNA, 6735 bp, Homo sapiens
  Payload ID: 2145
  Gene Symbol: CACNA1G
  Gene Name: calcium channel, voltage-dependent, T type, alpha 1G subunit
  Uniprot ID: O43497
  ENST ID: ENST00000513964
  CDS Start-End: 1-6720
atggacgaggaggaggatggagcgggcgccgaggagtcgggacagccccggagcttcatgcggctcaacgacctgtcgggggccgggggccggccggggccggggtcagcagaaaaggacccgggcagcgcggactccgaggcggaggggctgccgtacccggcgctggccccggtggttttcttctacttgagccaggacagccgcccgcggagctggtgtctccgcacggtctgtaacccctggtttgagcgcatcagcatgttggtcatccttctcaactgcgtgaccctgggcatgttccggccatgcgaggacatcgcctgtgactcccagcgctgccggatcctgcaggcctttgatgacttcatctttgccttctttgccgtggagatggtggtgaagatggtggccttgggcatctttgggaaaaagtgttacctgggagacacttggaaccggcttgactttttcatcgtcatcgcagggatgctggagtactcgctggacctgcagaacgtcagcttctcagctgtcaggacagtccgtgtgctgcgaccgctcagggccattaaccgggtgcccagcatgcgcatccttgtcacgttgctgctggatacgctgcccatgctgggcaacgtcctgctgctctgcttcttcgtcttcttcatcttcggcatcgtcggcgtccagctgtgggcagggctgcttcggaaccgatgcttcctacctgagaatttcagcctccccctgagcgtggacctggagcgctattaccagacagagaacgaggatgagagccccttcatctgctcccagccacgcgagaacggcatgcggtcctgcagaagcgtgcccacgctgcgcggggacgggggcggtggcccaccttgcggtctggactatgaggcctacaacagctccagcaacaccacctgtgtcaactggaaccagtactacaccaactgctcagcgggggagcacaaccccttcaagggcgccatcaactttgacaacattggctatgcctggatcgccatcttccaggtcatcacgctggagggctgggtcgacatcatgtactttgtgatggatgctcattccttctacaatttcatctacttcatcctcctcatcatcgtgggctccttcttcatgatcaacctgtgcctggtggtgattgccacgcagttctcagagaccaagcagcgggaaagccagctgatgcgggagcagcgtgtgcggttcctgtccaacgccagcaccctggctagcttctctgagcccggcagctgctatgaggagctgctcaagtacctggtgtacatccttcgtaaggcagcccgcaggctggctcaggtctctcgggcagcaggtgtgcgggttgggctgctcagcagcccagcacccctcgggggccaggagacccagcccagcagcagctgctctcgctcccaccgccgcctatccgtccaccacctggtgcaccaccaccaccaccatcaccaccactaccacctgggcaatgggacgctcagggccccccgggccagcccggagatccaggacagggatgccaatgggtcccgccggctcatgctgccaccaccctcgacgcctgccctctccggggccccccctggtggcgcagagtctgtgcacagcttctaccatgccgactgccacttagagccagtccgctgccaggcgccccctcccaggtccccatctgaggcatccggcaggactgtgggcagcgggaaggtgtatcccaccgtgcacaccagccctccaccggagacgctgaaggagaaggcactagtagaggtggctgccagctctgggcccccaaccctcaccagcctcaacatcccacccgggccctacagctccatgcacaagctgctggagacacagagtacaggtgcctgccaaagctcttgcaagatctccagcccttgcttgaaagcagacagtggagcctgtggtccagacagctgcccctactgtgcccgggccggggcaggggaggtggagctcgccgaccgtgaaatgcctgactcagacagcgaggcagtttatgagttcacacaggatgcccagcacagcgacctccgggacccccacagccggcggcaacggagcctgggcccagatgcagagcccagctctgtgctggccttctggaggctaatctgtgacaccttccgaaagattgtggacagcaagtactttggccggggaatcatgatcgccatcctggtcaacacactcagcatgggcatcgaataccacgagcagcccgaggagcttaccaacgccctagaaatcagcaacatcgtcttcaccagcctctttgccctggagatgctgctgaagctgcttgtgtatggtccctttggctacatcaagaatccctacaacatcttcgatggtgtcattgtggtcatcagcgtgtgggagatcgtgggccagcaggggggcggcctgtcggtgctgcggaccttccgcctgatgcgtgtgctgaagctggtgcgcttcctgccggcgctgcagcggcagctggtggtgctcatgaagaccatggacaacgtggccaccttctgcatgctgcttatgctcttcatcttcatcttcagcatcctgggcatgcatctcttcggctgcaagtttgcctctgagcgggatggggacaccctgccagaccggaagaattttgactccttgctctgggccatcgtcactgtctttcagatcctgacccaggaggactggaacaaagtcctctacaatggtatggcctccacgtcgtcctgggcggccctttatttcattgccctcatgaccttcggcaactacgtgctcttcaatttgctggtcgccattctggtggagggcttccaggcggaggaaatcagcaaacgggaagatgcgagtggacagttaagctgtattcagctgcctgtcgactcccaggggggagatgccaacaagtccgaatcagagcccgatttcttctcacccagcctggatggtgatggggacaggaagaagtgcttggccttggtgtccctgggagagcacccggagctgcggaagagcctgctgccgcctctcatcatccacacggccgccacacccatgtcgctgcccaagagcaccagcacgggcctgggcgaggcgctgggccctgcgtcgcgccgcaccagcagcagcgggtcggcagagcctggggcggcccacgagatgaagtcaccgcccagcgcccgcagctctccgcacagcccctggagcgctgcaagcagctggaccagcaggcgctccagccggaacagcctcggccgtgcacccagcctgaagcggagaagcccaagtggagagcggcggtccctgttgtcgggagaaggccaggagagccaggatgaagaggagagctcagaagaggagcgggccagccctgcgggcagtgaccatcgccacagggggtccctggagcgggaggccaagagttcctttgacctgccagacacactgcaggtgccagggctgcatcgcactgccagtggccgagggtctgcttctgagcaccaggactgcaatggcaagtcggcttcagggcgcctggcccgggccctgcggcctgatgaccccccactggatggggatgacgccgatgacgagggcaacctgagcaaaggggaacgggtccgcgcgtggatccgagcccgactccctgcctgctgcctcgagcgagactcctggtcagcctacatcttccctcctcagtccaggttccgcctcctgtgtcaccggatcatcacccacaagatgttcgaccacgtggtccttgtcatcatcttccttaactgcatcaccatcgccatggagcgccccaaaattgacccccacagcgctgaacgcatcttcctgaccctctccaattacatcttcaccgcagtctttctggctgaaatgacagtgaaggtggtggcactgggctggtgcttcggggagcaggcgtacctgcggagcagttggaacgtgctggacgggctgttggtgctcatctccgtcatcgacattctggtgtccatggtctctgacagcggcaccaagatcctgggcatgctgagggtgctgcggctgctgcggaccctgcgcccgctcagggtgatcagccgggcgcaggggctgaagctggtggtggagacgctgatgtcctcactgaaacccatcggcaacattgtagtcatctgctgtgccttcttcatcattttcggcatcttgggggtgcagctcttcaaagggaagtttttcgtgtgccagggcgaggataccaggaacatcaccaataaatcggactgtgccgaggccagttaccggtgggtccggcacaagtacaactttgacaaccttggccaggccctgatgtccctgttcgttttggcctccaaggatggttgggtggacatcatgtacgatgggctggatgctgtgggcgtggaccagcagaacttccacaagtgtcggcagcaccaggaggaagaggaggcccggcggcgggaggagaagcgcctacgaagactggagaaaaagagaaggagtaaggagaagcagatggctgaagcccagtgcaaaccttactactccgactactcccgcttccggctcctcgtccaccacttgtgcaccagccactacctggacctcttcatcacaggtgtcatcgggctgaacgtggtcaccatggccatggagcactaccagcagccccagattctggatgaggctctgaagatctgcaactacatcttcactgtcatctttgtcttggagtcagttttcaaacttgtggcctttggtttccgtcggttcttccaggacaggtggaaccagctggacctggccattgtgctgctgtccatcatgggcatcacgctggaggaaatcgaggtcaacgcctcgctgcccatcaaccccaccatcatccgcatcatgagggtgctgcgcattgcccgagtgctgaagctgctgaagatggctgtgggcatgcgggcgctgctggacacggtgatgcaggccctgccccaggtggggaacctgggacttctcttcatgttgttgtttttcatctttgcagctctgggcgtggagctctttggagacctggagtgtgacgagacacacccctgtgagggcctgggccgtcatgccacctttcggaactttggcatggccttcctaaccctcttccgagtctccacaggtgacaattggaatggcattatgaaggacaccctccgggactgtgaccaggagtccacctgctacaacacggtcatctcgcctatctactttgtgtccttcgtgctgacggcccagttcgtgctagtcaacgtggtgatcgccgtgctgatgaagcacctggaggagagcaacaaggaggccaaggaggaggccgagctagaggctgagctggagctggagatgaagaccctcagcccccagccccactcgccactgggcagccccttcctctggcctggggtcgagggccccgacagccccgacagccccaagcctggggctctgcacccagcggcccacgcgagatcagcctcccacttttccctggagcaccccacgatgcagccccaccccacggagctgccaggaccagacttactgactgtgcggaagtctggggtcagccgaacgcactctctgcccaatgacagctacatgtgtcggcatgggagcactgccgaggggcccctgggacacaggggctgggggctccccaaagctcagtcaggctccgtcttgtccgttcactcccagccagcagataccagctacatcctgcagcttcccaaagatgcacctcatctgctccagccccacagcgccccaacctggggcaccatccccaaactgcccccaccaggacgctcccctttggctcagaggccactcaggcgccaggcagcaataaggactgactccttggacgttcagggtctgggcagccgggaagacctgctggcagaggtgagtgggccctccccgcccctggcccgggcctactctttctggggccagtcaagtacccaggcacagcagcactcccgcagccacagcaagatctccaagcacatgaccccgccagccccttgcccaggcccagaacccaactggggcaagggccctccagagaccagaagcagcttagagttggacacggagctgagctggatttcaggagacctcctgccccctggcggccaggaggagcccccatccccacgggacctgaagaagtgctacagcgtggaggcccagagctgccagcgccggcctacgtcctggctggatgagcagaggagacactctatcgccgtcagctgcctggacagcggctcccaaccccacctgggcacagacccctctaaccttgggggccagcctcttggggggcctgggagccggcccaagaaaaaactcagcccgcctagtatcaccatagacccccccgagagccaaggtcctcggaccccgcccagccctggtatctgcctccggaggagggctccgtccagcgactccaaggatcccttggcctctggcccccctgacagcatggctgcctcgccctccccaaagaaagatgtgctgagtctctccggtttatcctctgacccagcagacctggacccctgagtcctgccccacttt

SEQ ID NO: 113253 - DNA, 6921 bp, Homo sapiens
  Payload ID: 2145
  Gene Symbol: CACNA1G
  Gene Name: calcium channel, voltage-dependent, T type, alpha 1G subunit
  Uniprot ID: O43497
  ENST ID: ENST00000502264
  CDS Start-End: 1-6921
atggacgaggaggaggatggagcgggcgccgaggagtcgggacagccccggagcttcatgcggctcaacgacctgtcgggggccgggggccggccggggccggggtcagcagaaaaggacccgggcagcgcggactccgaggcggaggggctgccgtacccggcgctggccccggtggttttcttctacttgagccaggacagccgcccgcggagctggtgtctccgcacggtctgtaacccctggtttgagcgcatcagcatgttggtcatccttctcaactgcgtgaccctgggcatgttccggccatgcgaggacatcgcctgtgactcccagcgctgccggatcctgcaggcctttgatgacttcatctttgccttctttgccgtggagatggtggtgaagatggtggccttgggcatctttgggaaaaagtgttacctgggagacacttggaaccggcttgactttttcatcgtcatcgcagggatgctggagtactcgctggacctgcagaacgtcagcttctcagctgtcaggacagtccgtgtgctgcgaccgctcagggccattaaccgggtgcccagcatgcgcatccttgtcacgttgctgctggatacgctgcccatgctgggcaacgtcctgctgctctgcttcttcgtcttcttcatcttcggcatcgtcggcgtccagctgtgggcagggctgcttcggaaccgatgcttcctacctgagaatttcagcctccccctgagcgtggacctggagcgctattaccagacagagaacgaggatgagagccccttcatctgctcccagccacgcgagaacggcatgcggtcctgcagaagcgtgcccacgctgcgcggggacgggggcggtggcccaccttgcggtctggactatgaggcctacaacagctccagcaacaccacctgtgtcaactggaaccagtactacaccaactgctcagcgggggagcacaaccccttcaagggcgccatcaactttgacaacattggctatgcctggatcgccatcttccaggtcatcacgctggagggctgggtcgacatcatgtactttgtgatggatgctcattccttctacaatttcatctacttcatcctcctcatcatcgtgggctccttcttcatgatcaacctgtgcctggtggtgattgccacgcagttctcagagaccaagcagcgggaaagccagctgatgcgggagcagcgtgtgcggttcctgtccaacgccagcaccctggctagcttctctgagcccggcagctgctatgaggagctgctcaagtacctggtgtacatccttcgtaaggcagcccgcaggctggctcaggtctctcgggcagcaggtgtgcgggttgggctgctcagcagcccagcacccctcgggggccaggagacccagcccagcagcagctgctctcgctcccaccgccgcctatccgtccaccacctggtgcaccaccaccaccaccatcaccaccactaccacctgggcaatgggacgctcagggccccccgggccagcccggagatccaggacagggatgccaatgggtcccgccggctcatgctgccaccaccctcgacgcctgccctctccggggccccccctggtggcgcagagtctgtgcacagcttctaccatgccgactgccacttagagccagtccgctgccaggcgccccctcccaggtccccatctgaggcatccggcaggactgtgggcagcgggaaggtgtatcccaccgtgcacaccagccctccaccggagacgctgaaggagaaggcactagtagaggtggctgccagctctgggcccccaaccctcaccagcctcaacatcccacccgggccctacagctccatgcacaagctgctggagacacagagtacaggtgcctgccaaagctcttgcaagatctccagcccttgcttgaaagcagacagtggagcctgtggtccagacagctgcccctactgtgcccgggccggggcaggggaggtggagctcgccgaccgtgaaatgcctgactcagacagcgaggcagtttatgagttcacacaggatgcccagcacagcgacctccgggacccccacagccggcggcaacggagcctgggcccagatgcagagcccagctctgtgctggccttctggaggctaatctgtgacaccttccgaaagattgtggacagcaagtactttggccggggaatcatgatcgccatcctggtcaacacactcagcatgggcatcgaataccacgagcagcccgaggagcttaccaacgccctagaaatcagcaacatcgtcttcaccagcctctttgccctggagatgctgctgaagctgcttgtgtatggtccctttggctacatcaagaatccctacaacatcttcgatggtgtcattgtggtcatcagcgtgtgggagatcgtgggccagcaggggggcggcctgtcggtgctgcggaccttccgcctgatgcgtgtgctgaagctggtgcgcttcctgccggcgctgcagcggcagctggtggtgctcatgaagaccatggacaacgtggccaccttctgcatgctgcttatgctcttcatcttcatcttcagcatcctgggcatgcatctcttcggctgcaagtttgcctctgagcgggatggggacaccctgccagaccggaagaattttgactccttgctctgggccatcgtcactgtctttcagatcctgacccaggaggactggaacaaagtcctctacaatggtatggcctccacgtcgtcctgggcggccctttatttcattgccctcatgaccttcggcaactacgtgctcttcaatttgctggtcgccattctggtggagggcttccaggcggagggagatgccaacaagtccgaatcagagcccgatttcttctcacccagcctggatggtgatggggacaggaagaagtgcttggccttggtgtccctgggagagcacccggagctgcggaagagcctgctgccgcctctcatcatccacacggccgccacacccatgtcgctgcccaagagcaccagcacgggcctgggcgaggcgctgggccctgcgtcgcgccgcaccagcagcagcgggtcggcagagcctggggcggcccacgagatgaagtcaccgcccagcgcccgcagctctccgcacagcccctggagcgctgcaagcagctggaccagcaggcgctccagccggaacagcctcggccgtgcacccagcctgaagcggagaagcccaagtggagagcggcggtccctgttgtcgggagaaggccaggagagccaggatgaagaggagagctcagaagaggagcgggccagccctgcgggcagtgaccatcgccacagggggtccctggagcgggaggccaagagttcctttgacctgccagacacactgcaggtgccagggctgcatcgcactgccagtggccgagggtctgcttctgagcaccaggactgcaatggcaagtcggcttcagggcgcctggcccgggccctgcggcctgatgaccccccactggatggggatgacgccgatgacgagggcaacctgagcaaaggggaacgggtccgcgcgtggatccgagcccgactccctgcctgctgcctcgagcgagactcctggtcagcctacatcttccctcctcagtccaggttccgcctcctgtgtcaccggatcatcacccacaagatgttcgaccacgtggtccttgtcatcatcttccttaactgcatcaccatcgccatggagcgccccaaaattgacccccacagcgctgaacgcatcttcctgaccctctccaattacatcttcaccgcagtctttctggctgaaatgacagtgaaggtggtggcactgggctggtgcttcggggagcaggcgtacctgcggagcagttggaacgtgctggacgggctgttggtgctcatctccgtcatcgacattctggtgtccatggtctctgacagcggcaccaagatcctgggcatgctgagggtgctgcggctgctgcggaccctgcgcccgctcagggtgatcagccgggcgcaggggctgaagctggtggtggagacgctgatgtcctcactgaaacccatcggcaacattgtagtcatctgctgtgccttcttcatcattttcggcatcttgggggtgcagctcttcaaagggaagtttttcgtgtgccagggcgaggataccaggaacatcaccaataaatcggactgtgccgaggccagttaccggtgggtccggcacaagtacaactttgacaaccttggccaggccctgatgtccctgttcgttttggcctccaaggatggttgggtggacatcatgtacgatgggctggatgctgtgggcgtggaccagcagcccatcatgaaccacaacccctggatgctgctgtacttcatctcgttcctgctcattgtggccttctttgtcctgaacatgtttgtgggtgtggtggtggagaacttccacaagtgtcggcagcaccaggaggaagaggaggcccggcggcgggaggagaagcgcctacgaagactggagaaaaagagaaggaatctaatgctggacgatgtaattgcttccggcagctcagccagcgctgcgtcagaagcccagtgcaaaccttactactccgactactcccgcttccggctcctcgtccaccacttgtgcaccagccactacctggacctcttcatcacaggtgtcatcgggctgaacgtggtcaccatggccatggagcactaccagcagccccagattctggatgaggctctgaagatctgcaactacatcttcactgtcatctttgtcttggagtcagttttcaaacttgtggcctttggtttccgtcggttcttccaggacaggtggaaccagctggacctggccattgtgctgctgtccatcatgggcatcacgctggaggaaatcgaggtcaacgcctcgctgcccatcaaccccaccatcatccgcatcatgagggtgctgcgcattgcccgagtgctgaagctgctgaagatggctgtgggcatgcgggcgctgctggacacggtgatgcaggccctgccccaggtggggaacctgggacttctcttcatgttgttgtttttcatctttgcagctctgggcgtggagctctttggagacctggagtgtgacgagacacacccctgtgagggcctgggccgtcatgccacctttcggaactttggcatggccttcctaaccctcttccgagtctccacaggtgacaattggaatggcattatgaaggacaccctccgggactgtgaccaggagtccacctgctacaacacggtcatctcgcctatctactttgtgtccttcgtgctgacggcccagttcgtgctagtcaacgtggtgatcgccgtgctgatgaagcacctggaggagagcaacaaggaggccaaggaggaggccgagctagaggctgagctggagctggagatgaagaccctcagcccccagccccactcgccactgggcagccccttcctctggcctggggtcgagggccccgacagccccgacagccccaagcctggggctctgcacccagcggcccacgcgagatcagcctcccacttttccctggagcaccccacgatccctctagctgagatggaggctctgtctctgacgtcagagattgtgtctgaaccgtcctgctctctagctctgacggatgactctttgcctgatgacatgcacacactcttacttagtgccctggagagcaatatgcagccccaccccacggagctgccaggaccagacttactgactgtgcggaagtctggggtcagccgaacgcactctctgcccaatgacagctacatgtgtcggcatgggagcactgccgaggggcccctgggacacaggggctgggggctccccaaagctcagtcaggctccgtcttgtccgttcactcccagccagcagataccagctacatcctgcagcttcccaaagatgcacctcatctgctccagccccacagcgccccaacctggggcaccatccccaaactgcccccaccaggacgctcccctttggctcagaggccactcaggcgccaggcagcaataaggactgactccttggacgttcagggtctgggcagccgggaagacctgctggcagaggtgagtgggccctccccgcccctggcccgggcctactctttctggggccagtcaagtacccaggcacagcagcactcccgcagccacagcaagatctccaagcacatgaccccgccagccccttgcccaggcccagaacccaactggggcaagggccctccagagaccagaagcagcttagagttggacacggagctgagctggatttcaggagacctcctgccccctggcggccaggaggagcccccatccccacgggacctgaagaagtgctacagcgtggaggcccagagctgccagcgccggcctacgtcctggctggatgagcagaggagacactctatcgccgtcagctgcctggacagcggctcccaaccccacctgggcacagacccctctaaccttgggggccagcctcttggggggcctgggagccggcccaagaaaaaactcagcccgcctagtatcaccatagacccccccgagagccaaggtcctcggaccccgcccagccctggtatctgcctccggaggagggctccgtccagcgactccaaggatcccttggcctctggcccccctgacagcatggctgcctcgccctccccaaagaaagatgtgctgagtctctccggtttatcctctgacccagcagacctggacccctga

SEQ ID NO: 113254 - DNA, 6795 bp, Homo sapiens
  Payload ID: 2145
  Gene Symbol: CACNA1G
  Gene Name: calcium channel, voltage-dependent, T type, alpha 1G subunit
  Uniprot ID: O43497
  ENST ID: ENST00000514181
  CDS Start-End: 1-6780
atggacgaggaggaggatggagcgggcgccgaggagtcgggacagccccggagcttcatgcggctcaacgacctgtcgggggccgggggccggccggggccggggtcagcagaaaaggacccgggcagcgcggactccgaggcggaggggctgccgtacccggcgctggccccggtggttttcttctacttgagccaggacagccgcccgcggagctggtgtctccgcacggtctgtaacccctggtttgagcgcatcagcatgttggtcatccttctcaactgcgtgaccctgggcatgttccggccatgcgaggacatcgcctgtgactcccagcgctgccggatcctgcaggcctttgatgacttcatctttgccttctttgccgtggagatggtggtgaagatggtggccttgggcatctttgggaaaaagtgttacctgggagacacttggaaccggcttgactttttcatcgtcatcgcagggatgctggagtactcgctggacctgcagaacgtcagcttctcagctgtcaggacagtccgtgtgctgcgaccgctcagggccattaaccgggtgcccagcatgcgcatccttgtcacgttgctgctggatacgctgcccatgctgggcaacgtcctgctgctctgcttcttcgtcttcttcatcttcggcatcgtcggcgtccagctgtgggcagggctgcttcggaaccgatgcttcctacctgagaatttcagcctccccctgagcgtggacctggagcgctattaccagacagagaacgaggatgagagccccttcatctgctcccagccacgcgagaacggcatgcggtcctgcagaagcgtgcccacgctgcgcggggacgggggcggtggcccaccttgcggtctggactatgaggcctacaacagctccagcaacaccacctgtgtcaactggaaccagtactacaccaactgctcagcgggggagcacaaccccttcaagggcgccatcaactttgacaacattggctatgcctggatcgccatcttccaggtcatcacgctggagggctgggtcgacatcatgtactttgtgatggatgctcattccttctacaatttcatctacttcatcctcctcatcatcgtgggctccttcttcatgatcaacctgtgcctggtggtgattgccacgcagttctcagagaccaagcagcgggaaagccagctgatgcgggagcagcgtgtgcggttcctgtccaacgccagcaccctggctagcttctctgagcccggcagctgctatgaggagctgctcaagtacctggtgtacatccttcgtaaggcagcccgcaggctggctcaggtctctcgggcagcaggtgtgcgggttgggctgctcagcagcccagcacccctcgggggccaggagacccagcccagcagcagctgctctcgctcccaccgccgcctatccgtccaccacctggtgcaccaccaccaccaccatcaccaccactaccacctgggcaatgggacgctcagggccccccgggccagcccggagatccaggacagggatgccaatgggtcccgccggctcatgctgccaccaccctcgacgcctgccctctccggggccccccctggtggcgcagagtctgtgcacagcttctaccatgccgactgccacttagagccagtccgctgccaggcgccccctcccaggtccccatctgaggcatccggcaggactgtgggcagcgggaaggtgtatcccaccgtgcacaccagccctccaccggagacgctgaaggagaaggcactagtagaggtggctgccagctctgggcccccaaccctcaccagcctcaacatcccacccgggccctacagctccatgcacaagctgctggagacacagagtacaggtgcctgccaaagctcttgcaagatctccagcccttgcttgaaagcagacagtggagcctgtggtccagacagctgcccctactgtgcccgggccggggcaggggaggtggagctcgccgaccgtgaaatgcctgactcagacagcgaggcagtttatgagttcacacaggatgcccagcacagcgacctccgggacccccacagccggcggcaacggagcctgggcccagatgcagagcccagctctgtgctggccttctggaggctaatctgtgacaccttccgaaagattgtggacagcaagtactttggccggggaatcatgatcgccatcctggtcaacacactcagcatgggcatcgaataccacgagcagcccgaggagcttaccaacgccctagaaatcagcaacatcgtcttcaccagcctctttgccctggagatgctgctgaagctgcttgtgtatggtccctttggctacatcaagaatccctacaacatcttcgatggtgtcattgtggtcatcagcgtgtgggagatcgtgggccagcaggggggcggcctgtcggtgctgcggaccttccgcctgatgcgtgtgctgaagctggtgcgcttcctgccggcgctgcagcggcagctggtggtgctcatgaagaccatggacaacgtggccaccttctgcatgctgcttatgctcttcatcttcatcttcagcatcctgggcatgcatctcttcggctgcaagtttgcctctgagcgggatggggacaccctgccagaccggaagaattttgactccttgctctgggccatcgtcactgtctttcagatcctgacccaggaggactggaacaaagtcctctacaatggtatggcctccacgtcgtcctgggcggccctttatttcattgccctcatgaccttcggcaactacgtgctcttcaatttgctggtcgccattctggtggagggcttccaggcggaggaaatcagcaaacgggaagatgcgagtggacagttaagctgtattcagctgcctgtcgactcccaggggggagatgccaacaagtccgaatcagagcccgatttcttctcacccagcctggatggtgatggggacaggaagaagtgcttggccttggtgtccctgggagagcacccggagctgcggaagagcctgctgccgcctctcatcatccacacggccgccacacccatgtcgctgcccaagagcaccagcacgggcctgggcgaggcgctgggccctgcgtcgcgccgcaccagcagcagcgggtcggcagagcctggggcggcccacgagatgaagtcaccgcccagcgcccgcagctctccgcacagcccctggagcgctgcaagcagctggaccagcaggcgctccagccggaacagcctcggccgtgcacccagcctgaagcggagaagcccaagtggagagcggcggtccctgttgtcgggagaaggccaggagagccaggatgaagaggagagctcagaagaggagcgggccagccctgcgggcagtgaccatcgccacagggggtccctggagcgggaggccaagagttcctttgacctgccagacacactgcaggtgccagggctgcatcgcactgccagtggccgagggtctgcttctgagcaccaggactgcaatggcaagtcggcttcagggcgcctggcccgggccctgcggcctgatgaccccccactggatggggatgacgccgatgacgagggcaacctgagcaaaggggaacgggtccgcgcgtggatccgagcccgactccctgcctgctgcctcgagcgagactcctggtcagcctacatcttccctcctcagtccaggttccgcctcctgtgtcaccggatcatcacccacaagatgttcgaccacgtggtccttgtcatcatcttccttaactgcatcaccatcgccatggagcgccccaaaattgacccccacagcgctgaacgcatcttcctgaccctctccaattacatcttcaccgcagtctttctggctgaaatgacagtgaaggtggtggcactgggctggtgcttcggggagcaggcgtacctgcggagcagttggaacgtgctggacgggctgttggtgctcatctccgtcatcgacattctggtgtccatggtctctgacagcggcaccaagatcctgggcatgctgagggtgctgcggctgctgcggaccctgcgcccgctcagggtgatcagccgggcgcaggggctgaagctggtggtggagacgctgatgtcctcactgaaacccatcggcaacattgtagtcatctgctgtgccttcttcatcattttcggcatcttgggggtgcagctcttcaaagggaagtttttcgtgtgccagggcgaggataccaggaacatcaccaataaatcggactgtgccgaggccagttaccggtgggtccggcacaagtacaactttgacaaccttggccaggccctgatgtccctgttcgttttggcctccaaggatggttgggtggacatcatgtacgatgggctggatgctgtgggcgtggaccagcagcccatcatgaaccacaacccctggatgctgctgtacttcatctcgttcctgctcattgtggccttctttgtcctgaacatgtttgtgggtgtggtggtggagaacttccacaagtgtcggcagcaccaggaggaagaggaggcccggcggcgggaggagaagcgcctacgaagactggagaaaaagagaaggaaagcccagtgcaaaccttactactccgactactcccgcttccggctcctcgtccaccacttgtgcaccagccactacctggacctcttcatcacaggtgtcatcgggctgaacgtggtcaccatggccatggagcactaccagcagccccagattctggatgaggctctgaagatctgcaactacatcttcactgtcatctttgtcttggagtcagttttcaaacttgtggcctttggtttccgtcggttcttccaggacaggtggaaccagctggacctggccattgtgctgctgtccatcatgggcatcacgctggaggaaatcgaggtcaacgcctcgctgcccatcaaccccaccatcatccgcatcatgagggtgctgcgcattgcccgagtgctgaagctgctgaagatggctgtgggcatgcgggcgctgctggacacggtggggaacctgggacttctcttcatgttgttgtttttcatctttgcagctctgggcgtggagctctttggagacctggagtgtgacgagacacacccctgtgagggcctgggccgtcatgccacctttcggaactttggcatggccttcctaaccctcttccgagtctccacaggtgacaattggaatggcattatgaaggacaccctccgggactgtgaccaggagtccacctgctacaacacggtcatctcgcctatctactttgtgtccttcgtgctgacggcccagttcgtgctagtcaacgtggtgatcgccgtgctgatgaagcacctggaggagagcaacaaggaggccaaggaggaggccgagctagaggctgagctggagctggagatgaagaccctcagcccccagccccactcgccactgggcagccccttcctctggcctggggtcgagggccccgacagccccgacagccccaagcctggggctctgcacccagcggcccacgcgagatcagcctcccacttttccctggagcaccccacgatgcagccccaccccacggagctgccaggaccagacttactgactgtgcggaagtctggggtcagccgaacgcactctctgcccaatgacagctacatgtgtcggcatgggagcactgccgaggggcccctgggacacaggggctgggggctccccaaagctcagtcaggctccgtcttgtccgttcactcccagccagcagataccagctacatcctgcagcttcccaaagatgcacctcatctgctccagccccacagcgccccaacctggggcaccatccccaaactgcccccaccaggacgctcccctttggctcagaggccactcaggcgccaggcagcaataaggactgactccttggacgttcagggtctgggcagccgggaagacctgctggcagaggtgagtgggccctccccgcccctggcccgggcctactctttctggggccagtcaagtacccaggcacagcagcactcccgcagccacagcaagatctccaagcacatgaccccgccagccccttgcccaggcccagaacccaactggggcaagggccctccagagaccagaagcagcttagagttggacacggagctgagctggatttcaggagacctcctgccccctggcggccaggaggagcccccatccccacgggacctgaagaagtgctacagcgtggaggcccagagctgccagcgccggcctacgtcctggctggatgagcagaggagacactctatcgccgtcagctgcctggacagcggctcccaaccccacctgggcacagacccctctaaccttgggggccagcctcttggggggcctgggagccggcccaagaaaaaactcagcccgcctagtatcaccatagacccccccgagagccaaggtcctcggaccccgcccagccctggtatctgcctccggaggagggctccgtccagcgactccaaggatcccttggcctctggcccccctgacagcatggctgcctcgccctccccaaagaaagatgtgctgagtctctccggtttatcctctgacccagcagacctggacccctgagtcctgccccacttt

SEQ ID NO: 113255 - DNA, 6870 bp, Homo sapiens
  Payload ID: 2145
  Gene Symbol: CACNA1G
  Gene Name: calcium channel, voltage-dependent, T type, alpha 1G subunit
  Uniprot ID: O43497
  ENST ID: ENST00000515165
  CDS Start-End: 1-6855
atggacgaggaggaggatggagcgggcgccgaggagtcgggacagccccggagcttcatgcggctcaacgacctgtcgggggccgggggccggccggggccggggtcagcagaaaaggacccgggcagcgcggactccgaggcggaggggctgccgtacccggcgctggccccggtggttttcttctacttgagccaggacagccgcccgcggagctggtgtctccgcacggtctgtaacccctggtttgagcgcatcagcatgttggtcatccttctcaactgcgtgaccctgggcatgttccggccatgcgaggacatcgcctgtgactcccagcgctgccggatcctgcaggcctttgatgacttcatctttgccttctttgccgtggagatggtggtgaagatggtggccttgggcatctttgggaaaaagtgttacctgggagacacttggaaccggcttgactttttcatcgtcatcgcagggatgctggagtactcgctggacctgcagaacgtcagcttctcagctgtcaggacagtccgtgtgctgcgaccgctcagggccattaaccgggtgcccagcatgcgcatccttgtcacgttgctgctggatacgctgcccatgctgggcaacgtcctgctgctctgcttcttcgtcttcttcatcttcggcatcgtcggcgtccagctgtgggcagggctgcttcggaaccgatgcttcctacctgagaatttcagcctccccctgagcgtggacctggagcgctattaccagacagagaacgaggatgagagccccttcatctgctcccagccacgcgagaacggcatgcggtcctgcagaagcgtgcccacgctgcgcggggacgggggcggtggcccaccttgcggtctggactatgaggcctacaacagctccagcaacaccacctgtgtcaactggaaccagtactacaccaactgctcagcgggggagcacaaccccttcaagggcgccatcaactttgacaacattggctatgcctggatcgccatcttccaggtcatcacgctggagggctgggtcgacatcatgtactttgtgatggatgctcattccttctacaatttcatctacttcatcctcctcatcatcgtgggctccttcttcatgatcaacctgtgcctggtggtgattgccacgcagttctcagagaccaagcagcgggaaagccagctgatgcgggagcagcgtgtgcggttcctgtccaacgccagcaccctggctagcttctctgagcccggcagctgctatgaggagctgctcaagtacctggtgtacatccttcgtaaggcagcccgcaggctggctcaggtctctcgggcagcaggtgtgcgggttgggctgctcagcagcccagcacccctcgggggccaggagacccagcccagcagcagctgctctcgctcccaccgccgcctatccgtccaccacctggtgcaccaccaccaccaccatcaccaccactaccacctgggcaatgggacgctcagggccccccgggccagcccggagatccaggacagggatgccaatgggtcccgccggctcatgctgccaccaccctcgacgcctgccctctccggggccccccctggtggcgcagagtctgtgcacagcttctaccatgccgactgccacttagagccagtccgctgccaggcgccccctcccaggtccccatctgaggcatccggcaggactgtgggcagcgggaaggtgtatcccaccgtgcacaccagccctccaccggagacgctgaaggagaaggcactagtagaggtggctgccagctctgggcccccaaccctcaccagcctcaacatcccacccgggccctacagctccatgcacaagctgctggagacacagagtacaggtgcctgccaaagctcttgcaagatctccagcccttgcttgaaagcagacagtggagcctgtggtccagacagctgcccctactgtgcccgggccggggcaggggaggtggagctcgccgaccgtgaaatgcctgactcagacagcgaggcagtttatgagttcacacaggatgcccagcacagcgacctccgggacccccacagccggcggcaacggagcctgggcccagatgcagagcccagctctgtgctggccttctggaggctaatctgtgacaccttccgaaagattgtggacagcaagtactttggccggggaatcatgatcgccatcctggtcaacacactcagcatgggcatcgaataccacgagcagcccgaggagcttaccaacgccctagaaatcagcaacatcgtcttcaccagcctctttgccctggagatgctgctgaagctgcttgtgtatggtccctttggctacatcaagaatccctacaacatcttcgatggtgtcattgtggtcatcagcgtgtgggagatcgtgggccagcaggggggcggcctgtcggtgctgcggaccttccgcctgatgcgtgtgctgaagctggtgcgcttcctgccggcgctgcagcggcagctggtggtgctcatgaagaccatggacaacgtggccaccttctgcatgctgcttatgctcttcatcttcatcttcagcatcctgggcatgcatctcttcggctgcaagtttgcctctgagcgggatggggacaccctgccagaccggaagaattttgactccttgctctgggccatcgtcactgtctttcagatcctgacccaggaggactggaacaaagtcctctacaatggtatggcctccacgtcgtcctgggcggccctttatttcattgccctcatgaccttcggcaactacgtgctcttcaatttgctggtcgccattctggtggagggcttccaggcggaggaaatcagcaaacgggaagatgcgagtggacagttaagctgtattcagctgcctgtcgactcccaggggggagatgccaacaagtccgaatcagagcccgatttcttctcacccagcctggatggtgatggggacaggaagaagtgcttggccttggtgtccctgggagagcacccggagctgcggaagagcctgctgccgcctctcatcatccacacggccgccacacccatgtcgctgcccaagagcaccagcacgggcctgggcgaggcgctgggccctgcgtcgcgccgcaccagcagcagcgggtcggcagagcctggggcggcccacgagatgaagtcaccgcccagcgcccgcagctctccgcacagcccctggagcgctgcaagcagctggaccagcaggcgctccagccggaacagcctcggccgtgcacccagcctgaagcggagaagcccaagtggagagcggcggtccctgttgtcgggagaaggccaggagagccaggatgaagaggagagctcagaagaggagcgggccagccctgcgggcagtgaccatcgccacagggggtccctggagcgggaggccaagagttcctttgacctgccagacacactgcaggtgccagggctgcatcgcactgccagtggccgagggtctgcttctgagcaccaggactgcaatggcaagtcggcttcagggcgcctggcccgggccctgcggcctgatgaccccccactggatggggatgacgccgatgacgagggcaacctgagcaaaggggaacgggtccgcgcgtggatccgagcccgactccctgcctgctgcctcgagcgagactcctggtcagcctacatcttccctcctcagtccaggttccgcctcctgtgtcaccggatcatcacccacaagatgttcgaccacgtggtccttgtcatcatcttccttaactgcatcaccatcgccatggagcgccccaaaattgacccccacagcgctgaacgcatcttcctgaccctctccaattacatcttcaccgcagtctttctggctgaaatgacagtgaaggtggtggcactgggctggtgcttcggggagcaggcgtacctgcggagcagttggaacgtgctggacgggctgttggtgctcatctccgtcatcgacattctggtgtccatggtctctgacagcggcaccaagatcctgggcatgctgagggtgctgcggctgctgcggaccctgcgcccgctcagggtgatcagccgggcgcaggggctgaagctggtggtggagacgctgatgtcctcactgaaacccatcggcaacattgtagtcatctgctgtgccttcttcatcattttcggcatcttgggggtgcagctcttcaaagggaagtttttcgtgtgccagggcgaggataccaggaacatcaccaataaatcggactgtgccgaggccagttaccggtgggtccggcacaagtacaactttgacaaccttggccaggccctgatgtccctgttcgttttggcctccaaggatggttgggtggacatcatgtacgatgggctggatgctgtgggcgtggaccagcagcccatcatgaaccacaacccctggatgctgctgtacttcatctcgttcctgctcattgtggccttctttgtcctgaacatgtttgtgggtgtggtggtggagaacttccacaagtgtcggcagcaccaggaggaagaggaggcccggcggcgggaggagaagcgcctacgaagactggagaaaaagagaaggaatctaatgctggacgatgtaattgcttccggcagctcagccagcgctgcgtcagaagcccagtgcaaaccttactactccgactactcccgcttccggctcctcgtccaccacttgtgcaccagccactacctggacctcttcatcacaggtgtcatcgggctgaacgtggtcaccatggccatggagcactaccagcagccccagattctggatgaggctctgaagatctgcaactacatcttcactgtcatctttgtcttggagtcagttttcaaacttgtggcctttggtttccgtcggttcttccaggacaggtggaaccagctggacctggccattgtgctgctgtccatcatgggcatcacgctggaggaaatcgaggtcaacgcctcgctgcccatcaaccccaccatcatccgcatcatgagggtgctgcgcattgcccgagtgctgaagctgctgaagatggctgtgggcatgcgggcgctgctggacacggtgatgcaggccctgccccaggtggggaacctgggacttctcttcatgttgttgtttttcatctttgcagctctgggcgtggagctctttggagacctggagtgtgacgagacacacccctgtgagggcctgggccgtcatgccacctttcggaactttggcatggccttcctaaccctcttccgagtctccacaggtgacaattggaatggcattatgaaggacaccctccgggactgtgaccaggagtccacctgctacaacacggtcatctcgcctatctactttgtgtccttcgtgctgacggcccagttcgtgctagtcaacgtggtgatcgccgtgctgatgaagcacctggaggagagcaacaaggaggccaaggaggaggccgagctagaggctgagctggagctggagatgaagaccctcagcccccagccccactcgccactgggcagccccttcctctggcctggggtcgagggccccgacagccccgacagccccaagcctggggctctgcacccagcggcccacgcgagatcagcctcccacttttccctggagcaccccacgatgcagccccaccccacggagctgccaggaccagacttactgactgtgcggaagtctggggtcagccgaacgcactctctgcccaatgacagctacatgtgtcggcatgggagcactgccgaggggcccctgggacacaggggctgggggctccccaaagctcagtcaggctccgtcttgtccgttcactcccagccagcagataccagctacatcctgcagcttcccaaagatgcacctcatctgctccagccccacagcgccccaacctggggcaccatccccaaactgcccccaccaggacgctcccctttggctcagaggccactcaggcgccaggcagcaataaggactgactccttggacgttcagggtctgggcagccgggaagacctgctggcagaggtgagtgggccctccccgcccctggcccgggcctactctttctggggccagtcaagtacccaggcacagcagcactcccgcagccacagcaagatctccaagcacatgaccccgccagccccttgcccaggcccagaacccaactggggcaagggccctccagagaccagaagcagcttagagttggacacggagctgagctggatttcaggagacctcctgccccctggcggccaggaggagcccccatccccacgggacctgaagaagtgctacagcgtggaggcccagagctgccagcgccggcctacgtcctggctggatgagcagaggagacactctatcgccgtcagctgcctggacagcggctcccaaccccacctgggcacagacccctctaaccttgggggccagcctcttggggggcctgggagccggcccaagaaaaaactcagcccgcctagtatcaccatagacccccccgagagccaaggtcctcggaccccgcccagccctggtatctgcctccggaggagggctccgtccagcgactccaaggatcccttggcctctggcccccctgacagcatggctgcctcgccctccccaaagaaagatgtgctgagtctctccggtttatcctctgacccagcagacctggacccctgagtcctgccccacttt

SEQ ID NO: 113256 - DNA, 6879 bp, Homo sapiens
  Payload ID: 2145
  Gene Symbol: CACNA1G
  Gene Name: calcium channel, voltage-dependent, T type, alpha 1G subunit
  Uniprot ID: O43497
  ENST ID: ENST00000513689
  CDS Start-End: 1-6864
atggacgaggaggaggatggagcgggcgccgaggagtcgggacagccccggagcttcatgcggctcaacgacctgtcgggggccgggggccggccggggccggggtcagcagaaaaggacccgggcagcgcggactccgaggcggaggggctgccgtacccggcgctggccccggtggttttcttctacttgagccaggacagccgcccgcggagctggtgtctccgcacggtctgtaacccctggtttgagcgcatcagcatgttggtcatccttctcaactgcgtgaccctgggcatgttccggccatgcgaggacatcgcctgtgactcccagcgctgccggatcctgcaggcctttgatgacttcatctttgccttctttgccgtggagatggtggtgaagatggtggccttgggcatctttgggaaaaagtgttacctgggagacacttggaaccggcttgactttttcatcgtcatcgcagggatgctggagtactcgctggacctgcagaacgtcagcttctcagctgtcaggacagtccgtgtgctgcgaccgctcagggccattaaccgggtgcccagcatgcgcatccttgtcacgttgctgctggatacgctgcccatgctgggcaacgtcctgctgctctgcttcttcgtcttcttcatcttcggcatcgtcggcgtccagctgtgggcagggctgcttcggaaccgatgcttcctacctgagaatttcagcctccccctgagcgtggacctggagcgctattaccagacagagaacgaggatgagagccccttcatctgctcccagccacgcgagaacggcatgcggtcctgcagaagcgtgcccacgctgcgcggggacgggggcggtggcccaccttgcggtctggactatgaggcctacaacagctccagcaacaccacctgtgtcaactggaaccagtactacaccaactgctcagcgggggagcacaaccccttcaagggcgccatcaactttgacaacattggctatgcctggatcgccatcttccaggtcatcacgctggagggctgggtcgacatcatgtactttgtgatggatgctcattccttctacaatttcatctacttcatcctcctcatcatcgtgggctccttcttcatgatcaacctgtgcctggtggtgattgccacgcagttctcagagaccaagcagcgggaaagccagctgatgcgggagcagcgtgtgcggttcctgtccaacgccagcaccctggctagcttctctgagcccggcagctgctatgaggagctgctcaagtacctggtgtacatccttcgtaaggcagcccgcaggctggctcaggtctctcgggcagcaggtgtgcgggttgggctgctcagcagcccagcacccctcgggggccaggagacccagcccagcagcagctgctctcgctcccaccgccgcctatccgtccaccacctggtgcaccaccaccaccaccatcaccaccactaccacctgggcaatgggacgctcagggccccccgggccagcccggagatccaggacagggatgccaatgggtcccgccggctcatgctgccaccaccctcgacgcctgccctctccggggccccccctggtggcgcagagtctgtgcacagcttctaccatgccgactgccacttagagccagtccgctgccaggcgccccctcccaggtccccatctgaggcatccggcaggactgtgggcagcgggaaggtgtatcccaccgtgcacaccagccctccaccggagacgctgaaggagaaggcactagtagaggtggctgccagctctgggcccccaaccctcaccagcctcaacatcccacccgggccctacagctccatgcacaagctgctggagacacagagtacaggtgcctgccaaagctcttgcaagatctccagcccttgcttgaaagcagacagtggagcctgtggtccagacagctgcccctactgtgcccgggccggggcaggggaggtggagctcgccgaccgtgaaatgcctgactcagacagcgaggcagtttatgagttcacacaggatgcccagcacagcgacctccgggacccccacagccggcggcaacggagcctgggcccagatgcagagcccagctctgtgctggccttctggaggctaatctgtgacaccttccgaaagattgtggacagcaagtactttggccggggaatcatgatcgccatcctggtcaacacactcagcatgggcatcgaataccacgagcagcccgaggagcttaccaacgccctagaaatcagcaacatcgtcttcaccagcctctttgccctggagatgctgctgaagctgcttgtgtatggtccctttggctacatcaagaatccctacaacatcttcgatggtgtcattgtggtcatcagcgtgtgggagatcgtgggccagcaggggggcggcctgtcggtgctgcggaccttccgcctgatgcgtgtgctgaagctggtgcgcttcctgccggcgctgcagcggcagctggtggtgctcatgaagaccatggacaacgtggccaccttctgcatgctgcttatgctcttcatcttcatcttcagcatcctgggcatgcatctcttcggctgcaagtttgcctctgagcgggatggggacaccctgccagaccggaagaattttgactccttgctctgggccatcgtcactgtctttcagatcctgacccaggaggactggaacaaagtcctctacaatggtatggcctccacgtcgtcctgggcggccctttatttcattgccctcatgaccttcggcaactacgtgctcttcaatttgctggtcgccattctggtggagggcttccaggcggaggaaatcagcaaacgggaagatgcgagtggacagttaagctgtattcagctgcctgtcgactcccaggggggagatgccaacaagtccgaatcagagcccgatttcttctcacccagcctggatggtgatggggacaggaagaagtgcttggccttggtgtccctgggagagcacccggagctgcggaagagcctgctgccgcctctcatcatccacacggccgccacacccatgtcgctgcccaagagcaccagcacgggcctgggcgaggcgctgggccctgcgtcgcgccgcaccagcagcagcgggtcggcagagcctggggcggcccacgagatgaagtcaccgcccagcgcccgcagctctccgcacagcccctggagcgctgcaagcagctggaccagcaggcgctccagccggaacagcctcggccgtgcacccagcctgaagcggagaagcccaagtggagagcggcggtccctgttgtcgggagaaggccaggagagccaggatgaagaggagagctcagaagaggagcgggccagccctgcgggcagtgaccatcgccacagggggtccctggagcgggaggccaagagttcctttgacctgccagacacactgcaggtgccagggctgcatcgcactgccagtggccgagggtctgcttctgagcaccaggactgcaatggcaagtcggcttcagggcgcctggcccgggccctgcggcctgatgaccccccactggatggggatgacgccgatgacgagggcaacctgagcaaaggggaacgggtccgcgcgtggatccgagcccgactccctgcctgctgcctcgagcgagactcctggtcagcctacatcttccctcctcagtccaggttccgcctcctgtgtcaccggatcatcacccacaagatgttcgaccacgtggtccttgtcatcatcttccttaactgcatcaccatcgccatggagcgccccaaaattgacccccacagcgctgaacgcatcttcctgaccctctccaattacatcttcaccgcagtctttctggctgaaatgacagtgaaggtggtggcactgggctggtgcttcggggagcaggcgtacctgcggagcagttggaacgtgctggacgggctgttggtgctcatctccgtcatcgacattctggtgtccatggtctctgacagcggcaccaagatcctgggcatgctgagggtgctgcggctgctgcggaccctgcgcccgctcagggtgatcagccgggcgcaggggctgaagctggtggtggagacgctgatgtcctcactgaaacccatcggcaacattgtagtcatctgctgtgccttcttcatcattttcggcatcttgggggtgcagctcttcaaagggaagtttttcgtgtgccagggcgaggataccaggaacatcaccaataaatcggactgtgccgaggccagttaccggtgggtccggcacaagtacaactttgacaaccttggccaggccctgatgtccctgttcgttttggcctccaaggatggttgggtggacatcatgtacgatgggctggatgctgtgggcgtggaccagcagaacttccacaagtgtcggcagcaccaggaggaagaggaggcccggcggcgggaggagaagcgcctacgaagactggagaaaaagagaaggagtaaggagaagcagatggctgaagcccagtgcaaaccttactactccgactactcccgcttccggctcctcgtccaccacttgtgcaccagccactacctggacctcttcatcacaggtgtcatcgggctgaacgtggtcaccatggccatggagcactaccagcagccccagattctggatgaggctctgaagatctgcaactacatcttcactgtcatctttgtcttggagtcagttttcaaacttgtggcctttggtttccgtcggttcttccaggacaggtggaaccagctggacctggccattgtgctgctgtccatcatgggcatcacgctggaggaaatcgaggtcaacgcctcgctgcccatcaaccccaccatcatccgcatcatgagggtgctgcgcattgcccgagtgctgaagctgctgaagatggctgtgggcatgcgggcgctgctggacacggtgatgcaggccctgccccaggtggggaacctgggacttctcttcatgttgttgtttttcatctttgcagctctgggcgtggagctctttggagacctggagtgtgacgagacacacccctgtgagggcctgggccgtcatgccacctttcggaactttggcatggccttcctaaccctcttccgagtctccacaggtgacaattggaatggcattatgaaggacaccctccgggactgtgaccaggagtccacctgctacaacacggtcatctcgcctatctactttgtgtccttcgtgctgacggcccagttcgtgctagtcaacgtggtgatcgccgtgctgatgaagcacctggaggagagcaacaaggaggccaaggaggaggccgagctagaggctgagctggagctggagatgaagaccctcagcccccagccccactcgccactgggcagccccttcctctggcctggggtcgagggccccgacagccccgacagccccaagcctggggctctgcacccagcggcccacgcgagatcagcctcccacttttccctggagcaccccacggacaggcagctgtttgacaccatatccctgctgatccagggctccctggagtgggagctgaagctgatggacgagctggcaggcccagggggccagccctctgccttcccttctgcccccagcctgggaggctccgacccacagatgcagccccaccccacggagctgccaggaccagacttactgactgtgcggaagtctggggtcagccgaacgcactctctgcccaatgacagctacatgtgtcggcatgggagcactgccgaggggcccctgggacacaggggctgggggctccccaaagctcagtcaggctccgtcttgtccgttcactcccagccagcagataccagctacatcctgcagcttcccaaagatgcacctcatctgctccagccccacagcgccccaacctggggcaccatccccaaactgcccccaccaggacgctcccctttggctcagaggccactcaggcgccaggcagcaataaggactgactccttggacgttcagggtctgggcagccgggaagacctgctggcagaggtgagtgggccctccccgcccctggcccgggcctactctttctggggccagtcaagtacccaggcacagcagcactcccgcagccacagcaagatctccaagcacatgaccccgccagccccttgcccaggcccagaacccaactggggcaagggccctccagagaccagaagcagcttagagttggacacggagctgagctggatttcaggagacctcctgccccctggcggccaggaggagcccccatccccacgggacctgaagaagtgctacagcgtggaggcccagagctgccagcgccggcctacgtcctggctggatgagcagaggagacactctatcgccgtcagctgcctggacagcggctcccaaccccacctgggcacagacccctctaaccttgggggccagcctcttggggggcctgggagccggcccaagaaaaaactcagcccgcctagtatcaccatagacccccccgagagccaaggtcctcggaccccgcccagccctggtatctgcctccggaggagggctccgtccagcgactccaaggatcccttggcctctggcccccctgacagcatggctgcctcgccctccccaaagaaagatgtgctgagtctctccggtttatcctctgacccagcagacctggacccctgagtcctgccccacttt

SEQ ID NO: 113257 - DNA, 6981 bp, Homo sapiens
  Payload ID: 2145
  Gene Symbol: CACNA1G
  Gene Name: calcium channel, voltage-dependent, T type, alpha 1G subunit
  Uniprot ID: O43497
  ENST ID: ENST00000515765
  CDS Start-End: 1-6966
atggacgaggaggaggatggagcgggcgccgaggagtcgggacagccccggagcttcatgcggctcaacgacctgtcgggggccgggggccggccggggccggggtcagcagaaaaggacccgggcagcgcggactccgaggcggaggggctgccgtacccggcgctggccccggtggttttcttctacttgagccaggacagccgcccgcggagctggtgtctccgcacggtctgtaacccctggtttgagcgcatcagcatgttggtcatccttctcaactgcgtgaccctgggcatgttccggccatgcgaggacatcgcctgtgactcccagcgctgccggatcctgcaggcctttgatgacttcatctttgccttctttgccgtggagatggtggtgaagatggtggccttgggcatctttgggaaaaagtgttacctgggagacacttggaaccggcttgactttttcatcgtcatcgcagggatgctggagtactcgctggacctgcagaacgtcagcttctcagctgtcaggacagtccgtgtgctgcgaccgctcagggccattaaccgggtgcccagcatgcgcatccttgtcacgttgctgctggatacgctgcccatgctgggcaacgtcctgctgctctgcttcttcgtcttcttcatcttcggcatcgtcggcgtccagctgtgggcagggctgcttcggaaccgatgcttcctacctgagaatttcagcctccccctgagcgtggacctggagcgctattaccagacagagaacgaggatgagagccccttcatctgctcccagccacgcgagaacggcatgcggtcctgcagaagcgtgcccacgctgcgcggggacgggggcggtggcccaccttgcggtctggactatgaggcctacaacagctccagcaacaccacctgtgtcaactggaaccagtactacaccaactgctcagcgggggagcacaaccccttcaagggcgccatcaactttgacaacattggctatgcctggatcgccatcttccaggtcatcacgctggagggctgggtcgacatcatgtactttgtgatggatgctcattccttctacaatttcatctacttcatcctcctcatcatcgtgggctccttcttcatgatcaacctgtgcctggtggtgattgccacgcagttctcagagaccaagcagcgggaaagccagctgatgcgggagcagcgtgtgcggttcctgtccaacgccagcaccctggctagcttctctgagcccggcagctgctatgaggagctgctcaagtacctggtgtacatccttcgtaaggcagcccgcaggctggctcaggtctctcgggcagcaggtgtgcgggttgggctgctcagcagcccagcacccctcgggggccaggagacccagcccagcagcagctgctctcgctcccaccgccgcctatccgtccaccacctggtgcaccaccaccaccaccatcaccaccactaccacctgggcaatgggacgctcagggccccccgggccagcccggagatccaggacagggatgccaatgggtcccgccggctcatgctgccaccaccctcgacgcctgccctctccggggccccccctggtggcgcagagtctgtgcacagcttctaccatgccgactgccacttagagccagtccgctgccaggcgccccctcccaggtccccatctgaggcatccggcaggactgtgggcagcgggaaggtgtatcccaccgtgcacaccagccctccaccggagacgctgaaggagaaggcactagtagaggtggctgccagctctgggcccccaaccctcaccagcctcaacatcccacccgggccctacagctccatgcacaagctgctggagacacagagtacaggtgcctgccaaagctcttgcaagatctccagcccttgcttgaaagcagacagtggagcctgtggtccagacagctgcccctactgtgcccgggccggggcaggggaggtggagctcgccgaccgtgaaatgcctgactcagacagcgaggcagtttatgagttcacacaggatgcccagcacagcgacctccgggacccccacagccggcggcaacggagcctgggcccagatgcagagcccagctctgtgctggccttctggaggctaatctgtgacaccttccgaaagattgtggacagcaagtactttggccggggaatcatgatcgccatcctggtcaacacactcagcatgggcatcgaataccacgagcagcccgaggagcttaccaacgccctagaaatcagcaacatcgtcttcaccagcctctttgccctggagatgctgctgaagctgcttgtgtatggtccctttggctacatcaagaatccctacaacatcttcgatggtgtcattgtggtcatcagcgtgtgggagatcgtgggccagcaggggggcggcctgtcggtgctgcggaccttccgcctgatgcgtgtgctgaagctggtgcgcttcctgccggcgctgcagcggcagctggtggtgctcatgaagaccatggacaacgtggccaccttctgcatgctgcttatgctcttcatcttcatcttcagcatcctgggcatgcatctcttcggctgcaagtttgcctctgagcgggatggggacaccctgccagaccggaagaattttgactccttgctctgggccatcgtcactgtctttcagatcctgacccaggaggactggaacaaagtcctctacaatggtatggcctccacgtcgtcctgggcggccctttatttcattgccctcatgaccttcggcaactacgtgctcttcaatttgctggtcgccattctggtggagggcttccaggcggaggaaatcagcaaacgggaagatgcgagtggacagttaagctgtattcagctgcctgtcgactcccaggggggagatgccaacaagtccgaatcagagcccgatttcttctcacccagcctggatggtgatggggacaggaagaagtgcttggccttggtgtccctgggagagcacccggagctgcggaagagcctgctgccgcctctcatcatccacacggccgccacacccatgtcgctgcccaagagcaccagcacgggcctgggcgaggcgctgggccctgcgtcgcgccgcaccagcagcagcgggtcggcagagcctggggcggcccacgagatgaagtcaccgcccagcgcccgcagctctccgcacagcccctggagcgctgcaagcagctggaccagcaggcgctccagccggaacagcctcggccgtgcacccagcctgaagcggagaagcccaagtggagagcggcggtccctgttgtcgggagaaggccaggagagccaggatgaagaggagagctcagaagaggagcgggccagccctgcgggcagtgaccatcgccacagggggtccctggagcgggaggccaagagttcctttgacctgccagacacactgcaggtgccagggctgcatcgcactgccagtggccgagggtctgcttctgagcaccaggactgcaatggcaagtcggcttcagggcgcctggcccgggccctgcggcctgatgaccccccactggatggggatgacgccgatgacgagggcaacctgagcaaaggggaacgggtccgcgcgtggatccgagcccgactccctgcctgctgcctcgagcgagactcctggtcagcctacatcttccctcctcagtccaggttccgcctcctgtgtcaccggatcatcacccacaagatgttcgaccacgtggtccttgtcatcatcttccttaactgcatcaccatcgccatggagcgccccaaaattgacccccacagcgctgaacgcatcttcctgaccctctccaattacatcttcaccgcagtctttctggctgaaatgacagtgaaggtggtggcactgggctggtgcttcggggagcaggcgtacctgcggagcagttggaacgtgctggacgggctgttggtgctcatctccgtcatcgacattctggtgtccatggtctctgacagcggcaccaagatcctgggcatgctgagggtgctgcggctgctgcggaccctgcgcccgctcagggtgatcagccgggcgcaggggctgaagctggtggtggagacgctgatgtcctcactgaaacccatcggcaacattgtagtcatctgctgtgccttcttcatcattttcggcatcttgggggtgcagctcttcaaagggaagtttttcgtgtgccagggcgaggataccaggaacatcaccaataaatcggactgtgccgaggccagttaccggtgggtccggcacaagtacaactttgacaaccttggccaggccctgatgtccctgttcgttttggcctccaaggatggttgggtggacatcatgtacgatgggctggatgctgtgggcgtggaccagcagcccatcatgaaccacaacccctggatgctgctgtacttcatctcgttcctgctcattgtggccttctttgtcctgaacatgtttgtgggtgtggtggtggagaacttccacaagtgtcggcagcaccaggaggaagaggaggcccggcggcgggaggagaagcgcctacgaagactggagaaaaagagaaggagtaaggagaagcagatggctgaagcccagtgcaaaccttactactccgactactcccgcttccggctcctcgtccaccacttgtgcaccagccactacctggacctcttcatcacaggtgtcatcgggctgaacgtggtcaccatggccatggagcactaccagcagccccagattctggatgaggctctgaagatctgcaactacatcttcactgtcatctttgtcttggagtcagttttcaaacttgtggcctttggtttccgtcggttcttccaggacaggtggaaccagctggacctggccattgtgctgctgtccatcatgggcatcacgctggaggaaatcgaggtcaacgcctcgctgcccatcaaccccaccatcatccgcatcatgagggtgctgcgcattgcccgagtgctgaagctgctgaagatggctgtgggcatgcgggcgctgctggacacggtgatgcaggccctgccccaggtggggaacctgggacttctcttcatgttgttgtttttcatctttgcagctctgggcgtggagctctttggagacctggagtgtgacgagacacacccctgtgagggcctgggccgtcatgccacctttcggaactttggcatggccttcctaaccctcttccgagtctccacaggtgacaattggaatggcattatgaaggacaccctccgggactgtgaccaggagtccacctgctacaacacggtcatctcgcctatctactttgtgtccttcgtgctgacggcccagttcgtgctagtcaacgtggtgatcgccgtgctgatgaagcacctggaggagagcaacaaggaggccaaggaggaggccgagctagaggctgagctggagctggagatgaagaccctcagcccccagccccactcgccactgggcagccccttcctctggcctggggtcgagggccccgacagccccgacagccccaagcctggggctctgcacccagcggcccacgcgagatcagcctcccacttttccctggagcaccccacggacaggcagctgtttgacaccatatccctgctgatccagggctccctggagtgggagctgaagctgatggacgagctggcaggcccagggggccagccctctgccttcccttctgcccccagcctgggaggctccgacccacagatgcagccccaccccacggagctgccaggaccagacttactgactgtgcggaagtctggggtcagccgaacgcactctctgcccaatgacagctacatgtgtcggcatgggagcactgccgaggggcccctgggacacaggggctgggggctccccaaagctcagtcaggctccgtcttgtccgttcactcccagccagcagataccagctacatcctgcagcttcccaaagatgcacctcatctgctccagccccacagcgccccaacctggggcaccatccccaaactgcccccaccaggacgctcccctttggctcagaggccactcaggcgccaggcagcaataaggactgactccttggacgttcagggtctgggcagccgggaagacctgctggcagaggtgagtgggccctccccgcccctggcccgggcctactctttctggggccagtcaagtacccaggcacagcagcactcccgcagccacagcaagatctccaagcacatgaccccgccagccccttgcccaggcccagaacccaactggggcaagggccctccagagaccagaagcagcttagagttggacacggagctgagctggatttcaggagacctcctgccccctggcggccaggaggagcccccatccccacgggacctgaagaagtgctacagcgtggaggcccagagctgccagcgccggcctacgtcctggctggatgagcagaggagacactctatcgccgtcagctgcctggacagcggctcccaaccccacctgggcacagacccctctaaccttgggggccagcctcttggggggcctgggagccggcccaagaaaaaactcagcccgcctagtatcaccatagacccccccgagagccaaggtcctcggaccccgcccagccctggtatctgcctccggaggagggctccgtccagcgactccaaggatcccttggcctctggcccccctgacagcatggctgcctcgccctccccaaagaaagatgtgctgagtctctccggtttatcctctgacccagcagacctggacccctgagtcctgccccacttt

SEQ ID NO: 113258 - DNA, 6837 bp, Homo sapiens
  Payload ID: 2145
  Gene Symbol: CACNA1G
  Gene Name: calcium channel, voltage-dependent, T type, alpha 1G subunit
  Uniprot ID: O43497
  ENST ID: ENST00000512389
  CDS Start-End: 1-6822
atggacgaggaggaggatggagcgggcgccgaggagtcgggacagccccggagcttcatgcggctcaacgacctgtcgggggccgggggccggccggggccggggtcagcagaaaaggacccgggcagcgcggactccgaggcggaggggctgccgtacccggcgctggccccggtggttttcttctacttgagccaggacagccgcccgcggagctggtgtctccgcacggtctgtaacccctggtttgagcgcatcagcatgttggtcatccttctcaactgcgtgaccctgggcatgttccggccatgcgaggacatcgcctgtgactcccagcgctgccggatcctgcaggcctttgatgacttcatctttgccttctttgccgtggagatggtggtgaagatggtggccttgggcatctttgggaaaaagtgttacctgggagacacttggaaccggcttgactttttcatcgtcatcgcagggatgctggagtactcgctggacctgcagaacgtcagcttctcagctgtcaggacagtccgtgtgctgcgaccgctcagggccattaaccgggtgcccagcatgcgcatccttgtcacgttgctgctggatacgctgcccatgctgggcaacgtcctgctgctctgcttcttcgtcttcttcatcttcggcatcgtcggcgtccagctgtgggcagggctgcttcggaaccgatgcttcctacctgagaatttcagcctccccctgagcgtggacctggagcgctattaccagacagagaacgaggatgagagccccttcatctgctcccagccacgcgagaacggcatgcggtcctgcagaagcgtgcccacgctgcgcggggacgggggcggtggcccaccttgcggtctggactatgaggcctacaacagctccagcaacaccacctgtgtcaactggaaccagtactacaccaactgctcagcgggggagcacaaccccttcaagggcgccatcaactttgacaacattggctatgcctggatcgccatcttccaggtcatcacgctggagggctgggtcgacatcatgtactttgtgatggatgctcattccttctacaatttcatctacttcatcctcctcatcatcgtgggctccttcttcatgatcaacctgtgcctggtggtgattgccacgcagttctcagagaccaagcagcgggaaagccagctgatgcgggagcagcgtgtgcggttcctgtccaacgccagcaccctggctagcttctctgagcccggcagctgctatgaggagctgctcaagtacctggtgtacatccttcgtaaggcagcccgcaggctggctcaggtctctcgggcagcaggtgtgcgggttgggctgctcagcagcccagcacccctcgggggccaggagacccagcccagcagcagctgctctcgctcccaccgccgcctatccgtccaccacctggtgcaccaccaccaccaccatcaccaccactaccacctgggcaatgggacgctcagggccccccgggccagcccggagatccaggacagggatgccaatgggtcccgccggctcatgctgccaccaccctcgacgcctgccctctccggggccccccctggtggcgcagagtctgtgcacagcttctaccatgccgactgccacttagagccagtccgctgccaggcgccccctcccaggtccccatctgaggcatccggcaggactgtgggcagcgggaaggtgtatcccaccgtgcacaccagccctccaccggagacgctgaaggagaaggcactagtagaggtggctgccagctctgggcccccaaccctcaccagcctcaacatcccacccgggccctacagctccatgcacaagctgctggagacacagagtacaggtgcctgccaaagctcttgcaagatctccagcccttgcttgaaagcagacagtggagcctgtggtccagacagctgcccctactgtgcccgggccggggcaggggaggtggagctcgccgaccgtgaaatgcctgactcagacagcgaggcagtttatgagttcacacaggatgcccagcacagcgacctccgggacccccacagccggcggcaacggagcctgggcccagatgcagagcccagctctgtgctggccttctggaggctaatctgtgacaccttccgaaagattgtggacagcaagtactttggccggggaatcatgatcgccatcctggtcaacacactcagcatgggcatcgaataccacgagcagcccgaggagcttaccaacgccctagaaatcagcaacatcgtcttcaccagcctctttgccctggagatgctgctgaagctgcttgtgtatggtccctttggctacatcaagaatccctacaacatcttcgatggtgtcattgtggtcatcagcgtgtgggagatcgtgggccagcaggggggcggcctgtcggtgctgcggaccttccgcctgatgcgtgtgctgaagctggtgcgcttcctgccggcgctgcagcggcagctggtggtgctcatgaagaccatggacaacgtggccaccttctgcatgctgcttatgctcttcatcttcatcttcagcatcctgggcatgcatctcttcggctgcaagtttgcctctgagcgggatggggacaccctgccagaccggaagaattttgactccttgctctgggccatcgtcactgtctttcagatcctgacccaggaggactggaacaaagtcctctacaatggtatggcctccacgtcgtcctgggcggccctttatttcattgccctcatgaccttcggcaactacgtgctcttcaatttgctggtcgccattctggtggagggcttccaggcggaggaaatcagcaaacgggaagatgcgagtggacagttaagctgtattcagctgcctgtcgactcccaggggggagatgccaacaagtccgaatcagagcccgatttcttctcacccagcctggatggtgatggggacaggaagaagtgcttggccttggtgtccctgggagagcacccggagctgcggaagagcctgctgccgcctctcatcatccacacggccgccacacccatgtcgctgcccaagagcaccagcacgggcctgggcgaggcgctgggccctgcgtcgcgccgcaccagcagcagcgggtcggcagagcctggggcggcccacgagatgaagtcaccgcccagcgcccgcagctctccgcacagcccctggagcgctgcaagcagctggaccagcaggcgctccagccggaacagcctcggccgtgcacccagcctgaagcggagaagcccaagtggagagcggcggtccctgttgtcgggagaaggccaggagagccaggatgaagaggagagctcagaagaggagcgggccagccctgcgggcagtgaccatcgccacagggggtccctggagcgggaggccaagagttcctttgacctgccagacacactgcaggtgccagggctgcatcgcactgccagtggccgagggtctgcttctgagcaccaggactgcaatggcaagtcggcttcagggcgcctggcccgggccctgcggcctgatgaccccccactggatggggatgacgccgatgacgagggcaacctgagcaaaggggaacgggtccgcgcgtggatccgagcccgactccctgcctgctgcctcgagcgagactcctggtcagcctacatcttccctcctcagtccaggttccgcctcctgtgtcaccggatcatcacccacaagatgttcgaccacgtggtccttgtcatcatcttccttaactgcatcaccatcgccatggagcgccccaaaattgacccccacagcgctgaacgcatcttcctgaccctctccaattacatcttcaccgcagtctttctggctgaaatgacagtgaaggtggtggcactgggctggtgcttcggggagcaggcgtacctgcggagcagttggaacgtgctggacgggctgttggtgctcatctccgtcatcgacattctggtgtccatggtctctgacagcggcaccaagatcctgggcatgctgagggtgctgcggctgctgcggaccctgcgcccgctcagggtgatcagccgggcgcaggggctgaagctggtggtggagacgctgatgtcctcactgaaacccatcggcaacattgtagtcatctgctgtgccttcttcatcattttcggcatcttgggggtgcagctcttcaaagggaagtttttcgtgtgccagggcgaggataccaggaacatcaccaataaatcggactgtgccgaggccagttaccggtgggtccggcacaagtacaactttgacaaccttggccaggccctgatgtccctgttcgttttggcctccaaggatggttgggtggacatcatgtacgatgggctggatgctgtgggcgtggaccagcagcccatcatgaaccacaacccctggatgctgctgtacttcatctcgttcctgctcattgtggccttctttgtcctgaacatgtttgtgggtgtggtggtggagaacttccacaagtgtcggcagcaccaggaggaagaggaggcccggcggcgggaggagaagcgcctacgaagactggagaaaaagagaaggagtaaggagaagcagatggctgaagcccagtgcaaaccttactactccgactactcccgcttccggctcctcgtccaccacttgtgcaccagccactacctggacctcttcatcacaggtgtcatcgggctgaacgtggtcaccatggccatggagcactaccagcagccccagattctggatgaggctctgaagatctgcaactacatcttcactgtcatctttgtcttggagtcagttttcaaacttgtggcctttggtttccgtcggttcttccaggacaggtggaaccagctggacctggccattgtgctgctgtccatcatgggcatcacgctggaggaaatcgaggtcaacgcctcgctgcccatcaaccccaccatcatccgcatcatgagggtgctgcgcattgcccgagtgctgaagctgctgaagatggctgtgggcatgcgggcgctgctggacacggtgatgcaggccctgccccaggtggggaacctgggacttctcttcatgttgttgtttttcatctttgcagctctgggcgtggagctctttggagacctggagtgtgacgagacacacccctgtgagggcctgggccgtcatgccacctttcggaactttggcatggccttcctaaccctcttccgagtctccacaggtgacaattggaatggcattatgaaggacaccctccgggactgtgaccaggagtccacctgctacaacacggtcatctcgcctatctactttgtgtccttcgtgctgacggcccagttcgtgctagtcaacgtggtgatcgccgtgctgatgaagcacctggaggagagcaacaaggaggccaaggaggaggccgagctagaggctgagctggagctggagatgaagaccctcagcccccagccccactcgccactgggcagccccttcctctggcctggggtcgagggccccgacagccccgacagccccaagcctggggctctgcacccagcggcccacgcgagatcagcctcccacttttccctggagcaccccacgatgcagccccaccccacggagctgccaggaccagacttactgactgtgcggaagtctggggtcagccgaacgcactctctgcccaatgacagctacatgtgtcggcatgggagcactgccgaggggcccctgggacacaggggctgggggctccccaaagctcagtcaggctccgtcttgtccgttcactcccagccagcagataccagctacatcctgcagcttcccaaagatgcacctcatctgctccagccccacagcgccccaacctggggcaccatccccaaactgcccccaccaggacgctcccctttggctcagaggccactcaggcgccaggcagcaataaggactgactccttggacgttcagggtctgggcagccgggaagacctgctggcagaggtgagtgggccctccccgcccctggcccgggcctactctttctggggccagtcaagtacccaggcacagcagcactcccgcagccacagcaagatctccaagcacatgaccccgccagccccttgcccaggcccagaacccaactggggcaagggccctccagagaccagaagcagcttagagttggacacggagctgagctggatttcaggagacctcctgccccctggcggccaggaggagcccccatccccacgggacctgaagaagtgctacagcgtggaggcccagagctgccagcgccggcctacgtcctggctggatgagcagaggagacactctatcgccgtcagctgcctggacagcggctcccaaccccacctgggcacagacccctctaaccttgggggccagcctcttggggggcctgggagccggcccaagaaaaaactcagcccgcctagtatcaccatagacccccccgagagccaaggtcctcggaccccgcccagccctggtatctgcctccggaggagggctccgtccagcgactccaaggatcccttggcctctggcccccctgacagcatggctgcctcgccctccccaaagaaagatgtgctgagtctctccggtttatcctctgacccagcagacctggacccctgagtcctgccccacttt

SEQ ID NO: 113259 - DNA, 6821 bp, Homo sapiens
  Payload ID: 2145
  Gene Symbol: CACNA1G
  Gene Name: calcium channel, voltage-dependent, T type, alpha 1G subunit
  Uniprot ID: O43497
  ENST ID: ENST00000506406
  CDS Start-End: 1-5331
atggacgaggaggaggatggagcgggcgccgaggagtcgggacagccccggagcttcatgcggctcaacgacctgtcgggggccgggggccggccggggccggggtcagcagaaaaggacccgggcagcgcggactccgaggcggaggggctgccgtacccggcgctggccccggtggttttcttctacttgagccaggacagccgcccgcggagctggtgtctccgcacggtctgtaacccctggtttgagcgcatcagcatgttggtcatccttctcaactgcgtgaccctgggcatgttccggccatgcgaggacatcgcctgtgactcccagcgctgccggatcctgcaggcctttgatgacttcatctttgccttctttgccgtggagatggtggtgaagatggtggccttgggcatctttgggaaaaagtgttacctgggagacacttggaaccggcttgactttttcatcgtcatcgcagggatgctggagtactcgctggacctgcagaacgtcagcttctcagctgtcaggacagtccgtgtgctgcgaccgctcagggccattaaccgggtgcccagcatgcgcatccttgtcacgttgctgctggatacgctgcccatgctgggcaacgtcctgctgctctgcttcttcgtcttcttcatcttcggcatcgtcggcgtccagctgtgggcagggctgcttcggaaccgatgcttcctacctgagaatttcagcctccccctgagcgtggacctggagcgctattaccagacagagaacgaggatgagagccccttcatctgctcccagccacgcgagaacggcatgcggtcctgcagaagcgtgcccacgctgcgcggggacgggggcggtggcccaccttgcggtctggactatgaggcctacaacagctccagcaacaccacctgtgtcaactggaaccagtactacaccaactgctcagcgggggagcacaaccccttcaagggcgccatcaactttgacaacattggctatgcctggatcgccatcttccaggtcatcacgctggagggctgggtcgacatcatgtactttgtgatggatgctcattccttctacaatttcatctacttcatcctcctcatcatcgtgggctccttcttcatgatcaacctgtgcctggtggtgattgccacgcagttctcagagaccaagcagcgggaaagccagctgatgcgggagcagcgtgtgcggttcctgtccaacgccagcaccctggctagcttctctgagcccggcagctgctatgaggagctgctcaagtacctggtgtacatccttcgtaaggcagcccgcaggctggctcaggtctctcgggcagcaggtgtgcgggttgggctgctcagcagcccagcacccctcgggggccaggagacccagcccagcagcagctgctctcgctcccaccgccgcctatccgtccaccacctggtgcaccaccaccaccaccatcaccaccactaccacctgggcaatgggacgctcagggccccccgggccagcccggagatccaggacagggatgccaatgggtcccgccggctcatgctgccaccaccctcgacgcctgccctctccggggccccccctggtggcgcagagtctgtgcacagcttctaccatgccgactgccacttagagccagtccgctgccaggcgccccctcccaggtccccatctgaggcatccggcaggactgtgggcagcgggaaggtgtatcccaccgtgcacaccagccctccaccggagacgctgaaggagaaggcactagtagaggtggctgccagctctgggcccccaaccctcaccagcctcaacatcccacccgggccctacagctccatgcacaagctgctggagacacagagtacaggtgcctgccaaagctcttgcaagatctccagcccttgcttgaaagcagacagtggagcctgtggtccagacagctgcccctactgtgcccgggccggggcaggggaggtggagctcgccgaccgtgaaatgcctgactcagacagcgaggcagtttatgagttcacacaggatgcccagcacagcgacctccgggacccccacagccggcggcaacggagcctgggcccagatgcagagcccagctctgtgctggccttctggaggctaatctgtgacaccttccgaaagattgtggacagcaagtactttggccggggaatcatgatcgccatcctggtcaacacactcagcatgggcatcgaataccacgagcagcccgaggagcttaccaacgccctagaaatcagcaacatcgtcttcaccagcctctttgccctggagatgctgctgaagctgcttgtgtatggtccctttggctacatcaagaatccctacaacatcttcgatggtgtcattgtggtcatcagcgtgtgggagatcgtgggccagcaggggggcggcctgtcggtgctgcggaccttccgcctgatgcgtgtgctgaagctggtgcgcttcctgccggcgctgcagcggcagctggtggtgctcatgaagaccatggacaacgtggccaccttctgcatgctgcttatgctcttcatcttcatcttcagcatcctgggcatgcatctcttcggctgcaagtttgcctctgagcgggatggggacaccctgccagaccggaagaattttgactccttgctctgggccatcgtcactgtctttcagatcctgacccaggaggactggaacaaagtcctctacaatggtatggcctccacgtcgtcctgggcggccctttatttcattgccctcatgaccttcggcaactacgtgctcttcaatttgctggtcgccattctggtggagggcttccaggcggaggaaatcagcaaacgggaagatgcgagtggacagttaagctgtattcagctgcctgtcgactcccaggggggagatgccaacaagtccgaatcagagcccgatttcttctcacccagcctggatggtgatggggacaggaagaagtgcttggccttggtgtccctgggagagcacccggagctgcggaagagcctgctgccgcctctcatcatccacacggccgccacacccatgtcgctgcccaagagcaccagcacgggcctgggcgaggcgctgggccctgcgtcgcgccgcaccagcagcagcgggtcggcagagcctggggcggcccacgagatgaagtcaccgcccagcgcccgcagctctccgcacagcccctggagcgctgcaagcagctggaccagcaggcgctccagccggaacagcctcggccgtgcacccagcctgaagcggagaagcccaagtggagagcggcggtccctgttgtcgggagaaggccaggagagccaggatgaagaggagagctcagaagaggagcgggccagccctgcgggcagtgaccatcgccacagggggtccctggagcgggaggccaagagttcctttgacctgccagacacactgcaggtgccagggctgcatcgcactgccagtggccgagggtctgcttctgagcaccaggactgcaatggcaagtcggcttcagggcgcctggcccgggccctgcggcctgatgaccccccactggatggggatgacgccgatgacgagggcaacctgagcaaaggggaacgggtccgcgcgtggatccgagcccgactccctgcctgctgcctcgagcgagactcctggtcagcctacatcttccctcctcagtccaggttccgcctcctgtgtcaccggatcatcacccacaagatgttcgaccacgtggtccttgtcatcatcttccttaactgcatcaccatcgccatggagcgccccaaaattgacccccacagcgctgaacgcatcttcctgaccctctccaattacatcttcaccgcagtctttctggctgaaatgacagtgaaggtggtggcactgggctggtgcttcggggagcaggcgtacctgcggagcagttggaacgtgctggacgggctgttggtgctcatctccgtcatcgacattctggtgtccatggtctctgacagcggcaccaagatcctgggcatgctgagggtgctgcggctgctgcggaccctgcgcccgctcagggtgatcagccgggcgcaggggctgaagctggtggtggagacgctgatgtcctcactgaaacccatcggcaacattgtagtcatctgctgtgccttcttcatcattttcggcatcttgggggtgcagctcttcaaagggaagtttttcgtgtgccagggcgaggataccaggaacatcaccaataaatcggactgtgccgaggccagttaccggtgggtccggcacaagtacaactttgacaaccttggccaggccctgatgtccctgttcgttttggcctccaaggatggttgggtggacatcatgtacgatgggctggatgctgtgggcgtggaccagcagcccatcatgaaccacaacccctggatgctgctgtacttcatctcgttcctgctcattgtggccttctttgtcctgaacatgtttgtgggtgtggtggtggagaacttccacaagtgtcggcagcaccaggaggaagaggaggcccggcggcgggaggagaagcgcctacgaagactggagaaaaagagaaggaatctaatgctggacgatgtaattgcttccggcagctcagccagcgctgcgtcagaagcccagtgcaaaccttactactccgactactcccgcttccggctcctcgtccaccacttgtgcaccagccactacctggacctcttcatcacaggtgtcatcgggctgaacgtggtcaccatggccatggagcactaccagcagccccagattctggatgaggctctgaagatctgcaactacatcttcactgtcatctttgtcttggagtcagttttcaaacttgtggcctttggtttccgtcggttcttccaggacaggtggaaccagctggacctggccattgtgctgctgtccatcatgggcatcacgctggaggaaatcgaggtcaacgcctcgctgcccatcaaccccaccatcatccgcatcatgagggtgctgcgcattgcccgagtgctgaagctgctgaagatggctgtgggcatgcgggcgctgctggacacggtgatgcaggccctgccccagctctgggcgtggagctctttggagacctggagtgtgacgagacacacccctgtgagggcctgggccgtcatgccacctttcggaactttggcatggccttcctaaccctcttccgagtctccacaggtgacaattggaatggcattatgaaggacaccctccgggactgtgaccaggagtccacctgctacaacacggtcatctcgcctatctactttgtgtccttcgtgctgacggcccagttcgtgctagtcaacgtggtgatcgccgtgctgatgaagcacctggaggagagcaacaaggaggccaaggaggaggccgagctagaggctgagctggagctggagatgaagaccctcagcccccagccccactcgccactgggcagccccttcctctggcctggggtcgagggccccgacagccccgacagccccaagcctggggctctgcacccagcggcccacgcgagatcagcctcccacttttccctggagcaccccacgatgcagccccaccccacggagctgccaggaccagacttactgactgtgcggaagtctggggtcagccgaacgcactctctgcccaatgacagctacatgtgtcggcatgggagcactgccgaggggcccctgggacacaggggctgggggctccccaaagctcagtcaggctccgtcttgtccgttcactcccagccagcagataccagctacatcctgcagcttcccaaagatgcacctcatctgctccagccccacagcgccccaacctggggcaccatccccaaactgcccccaccaggacgctcccctttggctcagaggccactcaggcgccaggcagcaataaggactgactccttggacgttcagggtctgggcagccgggaagacctgctggcagaggtgagtgggccctccccgcccctggcccgggcctactctttctggggccagtcaagtacccaggcacagcagcactcccgcagccacagcaagatctccaagcacatgaccccgccagccccttgcccaggcccagaacccaactggggcaagggccctccagagaccagaagcagcttagagttggacacggagctgagctggatttcaggagacctcctgccccctggcggccaggaggagcccccatccccacgggacctgaagaagtgctacagcgtggaggcccagagctgccagcgccggcctacgtcctggctggatgagcagaggagacactctatcgccgtcagctgcctggacagcggctcccaaccccacctgggcacagacccctctaaccttgggggccagcctcttggggggcctgggagccggcccaagaaaaaactcagcccgcctagtatcaccatagacccccccgagagccaaggtcctcggaccccgcccagccctggtatctgcctccggaggagggctccgtccagcgactccaaggatcccttggcctctggcccccctgacagcatggctgcctcgccctccccaaagaaagatgtgctgagtctctccggtttatcctctgacccagcagacctggacccctgagtcctgccccacttt

SEQ ID NO: 113260 - DNA, 6698 bp, Homo sapiens
  Payload ID: 2145
  Gene Symbol: CACNA1G
  Gene Name: calcium channel, voltage-dependent, T type, alpha 1G subunit
  Uniprot ID: O43497
  ENST ID: ENST00000503607
  CDS Start-End: 1-5208
atggacgaggaggaggatggagcgggcgccgaggagtcgggacagccccggagcttcatgcggctcaacgacctgtcgggggccgggggccggccggggccggggtcagcagaaaaggacccgggcagcgcggactccgaggcggaggggctgccgtacccggcgctggccccggtggttttcttctacttgagccaggacagccgcccgcggagctggtgtctccgcacggtctgtaacccctggtttgagcgcatcagcatgttggtcatccttctcaactgcgtgaccctgggcatgttccggccatgcgaggacatcgcctgtgactcccagcgctgccggatcctgcaggcctttgatgacttcatctttgccttctttgccgtggagatggtggtgaagatggtggccttgggcatctttgggaaaaagtgttacctgggagacacttggaaccggcttgactttttcatcgtcatcgcagggatgctggagtactcgctggacctgcagaacgtcagcttctcagctgtcaggacagtccgtgtgctgcgaccgctcagggccattaaccgggtgcccagcatgcgcatccttgtcacgttgctgctggatacgctgcccatgctgggcaacgtcctgctgctctgcttcttcgtcttcttcatcttcggcatcgtcggcgtccagctgtgggcagggctgcttcggaaccgatgcttcctacctgagaatttcagcctccccctgagcgtggacctggagcgctattaccagacagagaacgaggatgagagccccttcatctgctcccagccacgcgagaacggcatgcggtcctgcagaagcgtgcccacgctgcgcggggacgggggcggtggcccaccttgcggtctggactatgaggcctacaacagctccagcaacaccacctgtgtcaactggaaccagtactacaccaactgctcagcgggggagcacaaccccttcaagggcgccatcaactttgacaacattggctatgcctggatcgccatcttccaggtcatcacgctggagggctgggtcgacatcatgtactttgtgatggatgctcattccttctacaatttcatctacttcatcctcctcatcatcgtgggctccttcttcatgatcaacctgtgcctggtggtgattgccacgcagttctcagagaccaagcagcgggaaagccagctgatgcgggagcagcgtgtgcggttcctgtccaacgccagcaccctggctagcttctctgagcccggcagctgctatgaggagctgctcaagtacctggtgtacatccttcgtaaggcagcccgcaggctggctcaggtctctcgggcagcaggtgtgcgggttgggctgctcagcagcccagcacccctcgggggccaggagacccagcccagcagcagctgctctcgctcccaccgccgcctatccgtccaccacctggtgcaccaccaccaccaccatcaccaccactaccacctgggcaatgggacgctcagggccccccgggccagcccggagatccaggacagggatgccaatgggtcccgccggctcatgctgccaccaccctcgacgcctgccctctccggggccccccctggtggcgcagagtctgtgcacagcttctaccatgccgactgccacttagagccagtccgctgccaggcgccccctcccaggtccccatctgaggcatccggcaggactgtgggcagcgggaaggtgtatcccaccgtgcacaccagccctccaccggagacgctgaaggagaaggcactagtagaggtggctgccagctctgggcccccaaccctcaccagcctcaacatcccacccgggccctacagctccatgcacaagctgctggagacacagagtacaggtgcctgccaaagctcttgcaagatctccagcccttgcttgaaagcagacagtggagcctgtggtccagacagctgcccctactgtgcccgggccggggcaggggaggtggagctcgccgaccgtgaaatgcctgactcagacagcgaggcagtttatgagttcacacaggatgcccagcacagcgacctccgggacccccacagccggcggcaacggagcctgggcccagatgcagagcccagctctgtgctggccttctggaggctaatctgtgacaccttccgaaagattgtggacagcaagtactttggccggggaatcatgatcgccatcctggtcaacacactcagcatgggcatcgaataccacgagcagcccgaggagcttaccaacgccctagaaatcagcaacatcgtcttcaccagcctctttgccctggagatgctgctgaagctgcttgtgtatggtccctttggctacatcaagaatccctacaacatcttcgatggtgtcattgtggtcatcagcgtgtgggagatcgtgggccagcaggggggcggcctgtcggtgctgcggaccttccgcctgatgcgtgtgctgaagctggtgcgcttcctgccggcgctgcagcggcagctggtggtgctcatgaagaccatggacaacgtggccaccttctgcatgctgcttatgctcttcatcttcatcttcagcatcctgggcatgcatctcttcggctgcaagtttgcctctgagcgggatggggacaccctgccagaccggaagaattttgactccttgctctgggccatcgtcactgtctttcagatcctgacccaggaggactggaacaaagtcctctacaatggtatggcctccacgtcgtcctgggcggccctttatttcattgccctcatgaccttcggcaactacgtgctcttcaatttgctggtcgccattctggtggagggcttccaggcggagggagatgccaacaagtccgaatcagagcccgatttcttctcacccagcctggatggtgatggggacaggaagaagtgcttggccttggtgtccctgggagagcacccggagctgcggaagagcctgctgccgcctctcatcatccacacggccgccacacccatgtcgctgcccaagagcaccagcacgggcctgggcgaggcgctgggccctgcgtcgcgccgcaccagcagcagcgggtcggcagagcctggggcggcccacgagatgaagtcaccgcccagcgcccgcagctctccgcacagcccctggagcgctgcaagcagctggaccagcaggcgctccagccggaacagcctcggccgtgcacccagcctgaagcggagaagcccaagtggagagcggcggtccctgttgtcgggagaaggccaggagagccaggatgaagaggagagctcagaagaggagcgggccagccctgcgggcagtgaccatcgccacagggggtccctggagcgggaggccaagagttcctttgacctgccagacacactgcaggtgccagggctgcatcgcactgccagtggccgagggtctgcttctgagcaccaggactgcaatggcaagtcggcttcagggcgcctggcccgggccctgcggcctgatgaccccccactggatggggatgacgccgatgacgagggcaacctgagcaaaggggaacgggtccgcgcgtggatccgagcccgactccctgcctgctgcctcgagcgagactcctggtcagcctacatcttccctcctcagtccaggttccgcctcctgtgtcaccggatcatcacccacaagatgttcgaccacgtggtccttgtcatcatcttccttaactgcatcaccatcgccatggagcgccccaaaattgacccccacagcgctgaacgcatcttcctgaccctctccaattacatcttcaccgcagtctttctggctgaaatgacagtgaaggtggtggcactgggctggtgcttcggggagcaggcgtacctgcggagcagttggaacgtgctggacgggctgttggtgctcatctccgtcatcgacattctggtgtccatggtctctgacagcggcaccaagatcctgggcatgctgagggtgctgcggctgctgcggaccctgcgcccgctcagggtgatcagccgggcgcaggggctgaagctggtggtggagacgctgatgtcctcactgaaacccatcggcaacattgtagtcatctgctgtgccttcttcatcattttcggcatcttgggggtgcagctcttcaaagggaagtttttcgtgtgccagggcgaggataccaggaacatcaccaataaatcggactgtgccgaggccagttaccggtgggtccggcacaagtacaactttgacaaccttggccaggccctgatgtccctgttcgttttggcctccaaggatggttgggtggacatcatgtacgatgggctggatgctgtgggcgtggaccagcagcccatcatgaaccacaacccctggatgctgctgtacttcatctcgttcctgctcattgtggccttctttgtcctgaacatgtttgtgggtgtggtggtggagaacttccacaagtgtcggcagcaccaggaggaagaggaggcccggcggcgggaggagaagcgcctacgaagactggagaaaaagagaaggaaagcccagtgcaaaccttactactccgactactcccgcttccggctcctcgtccaccacttgtgcaccagccactacctggacctcttcatcacaggtgtcatcgggctgaacgtggtcaccatggccatggagcactaccagcagccccagattctggatgaggctctgaagatctgcaactacatcttcactgtcatctttgtcttggagtcagttttcaaacttgtggcctttggtttccgtcggttcttccaggacaggtggaaccagctggacctggccattgtgctgctgtccatcatgggcatcacgctggaggaaatcgaggtcaacgcctcgctgcccatcaaccccaccatcatccgcatcatgagggtgctgcgcattgcccgagtgctgaagctgctgaagatggctgtgggcatgcgggcgctgctggacacggtgatgcaggccctgccccagctctgggcgtggagctctttggagacctggagtgtgacgagacacacccctgtgagggcctgggccgtcatgccacctttcggaactttggcatggccttcctaaccctcttccgagtctccacaggtgacaattggaatggcattatgaaggacaccctccgggactgtgaccaggagtccacctgctacaacacggtcatctcgcctatctactttgtgtccttcgtgctgacggcccagttcgtgctagtcaacgtggtgatcgccgtgctgatgaagcacctggaggagagcaacaaggaggccaaggaggaggccgagctagaggctgagctggagctggagatgaagaccctcagcccccagccccactcgccactgggcagccccttcctctggcctggggtcgagggccccgacagccccgacagccccaagcctggggctctgcacccagcggcccacgcgagatcagcctcccacttttccctggagcaccccacgatgcagccccaccccacggagctgccaggaccagacttactgactgtgcggaagtctggggtcagccgaacgcactctctgcccaatgacagctacatgtgtcggcatgggagcactgccgaggggcccctgggacacaggggctgggggctccccaaagctcagtcaggctccgtcttgtccgttcactcccagccagcagataccagctacatcctgcagcttcccaaagatgcacctcatctgctccagccccacagcgccccaacctggggcaccatccccaaactgcccccaccaggacgctcccctttggctcagaggccactcaggcgccaggcagcaataaggactgactccttggacgttcagggtctgggcagccgggaagacctgctggcagaggtgagtgggccctccccgcccctggcccgggcctactctttctggggccagtcaagtacccaggcacagcagcactcccgcagccacagcaagatctccaagcacatgaccccgccagccccttgcccaggcccagaacccaactggggcaagggccctccagagaccagaagcagcttagagttggacacggagctgagctggatttcaggagacctcctgccccctggcggccaggaggagcccccatccccacgggacctgaagaagtgctacagcgtggaggcccagagctgccagcgccggcctacgtcctggctggatgagcagaggagacactctatcgccgtcagctgcctggacagcggctcccaaccccacctgggcacagacccctctaaccttgggggccagcctcttggggggcctgggagccggcccaagaaaaaactcagcccgcctagtatcaccatagacccccccgagagccaaggtcctcggaccccgcccagccctggtatctgcctccggaggagggctccgtccagcgactccaaggatcccttggcctctggcccccctgacagcatggctgcctcgccctccccaaagaaagatgtgctgagtctctccggtttatcctctgacccagcagacctggacccctgagtcctgccccacttt

SEQ ID NO: 113261 - DNA, 6714 bp, Homo sapiens
  Payload ID: 2145
  Gene Symbol: CACNA1G
  Gene Name: calcium channel, voltage-dependent, T type, alpha 1G subunit
  Uniprot ID: O43497
  ENST ID: ENST00000510366
  CDS Start-End: 1-6699
atggacgaggaggaggatggagcgggcgccgaggagtcgggacagccccggagcttcatgcggctcaacgacctgtcgggggccgggggccggccggggccggggtcagcagaaaaggacccgggcagcgcggactccgaggcggaggggctgccgtacccggcgctggccccggtggttttcttctacttgagccaggacagccgcccgcggagctggtgtctccgcacggtctgtaacccctggtttgagcgcatcagcatgttggtcatccttctcaactgcgtgaccctgggcatgttccggccatgcgaggacatcgcctgtgactcccagcgctgccggatcctgcaggcctttgatgacttcatctttgccttctttgccgtggagatggtggtgaagatggtggccttgggcatctttgggaaaaagtgttacctgggagacacttggaaccggcttgactttttcatcgtcatcgcagggatgctggagtactcgctggacctgcagaacgtcagcttctcagctgtcaggacagtccgtgtgctgcgaccgctcagggccattaaccgggtgcccagcatgcgcatccttgtcacgttgctgctggatacgctgcccatgctgggcaacgtcctgctgctctgcttcttcgtcttcttcatcttcggcatcgtcggcgtccagctgtgggcagggctgcttcggaaccgatgcttcctacctgagaatttcagcctccccctgagcgtggacctggagcgctattaccagacagagaacgaggatgagagccccttcatctgctcccagccacgcgagaacggcatgcggtcctgcagaagcgtgcccacgctgcgcggggacgggggcggtggcccaccttgcggtctggactatgaggcctacaacagctccagcaacaccacctgtgtcaactggaaccagtactacaccaactgctcagcgggggagcacaaccccttcaagggcgccatcaactttgacaacattggctatgcctggatcgccatcttccaggtcatcacgctggagggctgggtcgacatcatgtactttgtgatggatgctcattccttctacaatttcatctacttcatcctcctcatcatcgtgggctccttcttcatgatcaacctgtgcctggtggtgattgccacgcagttctcagagaccaagcagcgggaaagccagctgatgcgggagcagcgtgtgcggttcctgtccaacgccagcaccctggctagcttctctgagcccggcagctgctatgaggagctgctcaagtacctggtgtacatccttcgtaaggcagcccgcaggctggctcaggtctctcgggcagcaggtgtgcgggttgggctgctcagcagcccagcacccctcgggggccaggagacccagcccagcagcagctgctctcgctcccaccgccgcctatccgtccaccacctggtgcaccaccaccaccaccatcaccaccactaccacctgggcaatgggacgctcagggccccccgggccagcccggagatccaggacagggatgccaatgggtcccgccggctcatgctgccaccaccctcgacgcctgccctctccggggccccccctggtggcgcagagtctgtgcacagcttctaccatgccgactgccacttagagccagtccgctgccaggcgccccctcccaggtccccatctgaggcatccggcaggactgtgggcagcgggaaggtgtatcccaccgtgcacaccagccctccaccggagacgctgaaggagaaggcactagtagaggtggctgccagctctgggcccccaaccctcaccagcctcaacatcccacccgggccctacagctccatgcacaagctgctggagacacagagtacaggtgcctgccaaagctcttgcaagatctccagcccttgcttgaaagcagacagtggagcctgtggtccagacagctgcccctactgtgcccgggccggggcaggggaggtggagctcgccgaccgtgaaatgcctgactcagacagcgaggcagtttatgagttcacacaggatgcccagcacagcgacctccgggacccccacagccggcggcaacggagcctgggcccagatgcagagcccagctctgtgctggccttctggaggctaatctgtgacaccttccgaaagattgtggacagcaagtactttggccggggaatcatgatcgccatcctggtcaacacactcagcatgggcatcgaataccacgagcagcccgaggagcttaccaacgccctagaaatcagcaacatcgtcttcaccagcctctttgccctggagatgctgctgaagctgcttgtgtatggtccctttggctacatcaagaatccctacaacatcttcgatggtgtcattgtggtcatcagcgtgtgggagatcgtgggccagcaggggggcggcctgtcggtgctgcggaccttccgcctgatgcgtgtgctgaagctggtgcgcttcctgccggcgctgcagcggcagctggtggtgctcatgaagaccatggacaacgtggccaccttctgcatgctgcttatgctcttcatcttcatcttcagcatcctgggcatgcatctcttcggctgcaagtttgcctctgagcgggatggggacaccctgccagaccggaagaattttgactccttgctctgggccatcgtcactgtctttcagatcctgacccaggaggactggaacaaagtcctctacaatggtatggcctccacgtcgtcctgggcggccctttatttcattgccctcatgaccttcggcaactacgtgctcttcaatttgctggtcgccattctggtggagggcttccaggcggaggaaatcagcaaacgggaagatgcgagtggacagttaagctgtattcagctgcctgtcgactcccaggggggagatgccaacaagtccgaatcagagcccgatttcttctcacccagcctggatggtgatggggacaggaagaagtgcttggccttggtgtccctgggagagcacccggagctgcggaagagcctgctgccgcctctcatcatccacacggccgccacacccatgtcgctgcccaagagcaccagcacgggcctgggcgaggcgctgggccctgcgtcgcgccgcaccagcagcagcgggtcggcagagcctggggcggcccacgagatgaagtcaccgcccagcgcccgcagctctccgcacagcccctggagcgctgcaagcagctggaccagcaggcgctccagccggaacagcctcggccgtgcacccagcctgaagcggagaagcccaagtggagagcggcggtccctgttgtcgggagaaggccaggagagccaggatgaagaggagagctcagaagaggagcgggccagccctgcgggcagtgaccatcgccacagggggtccctggagcgggaggccaagagttcctttgacctgccagacacactgcaggtgccagggctgcatcgcactgccagtggccgagggtctgcttctgagcaccaggactgcaatggcaagtcggcttcagggcgcctggcccgggccctgcggcctgatgaccccccactggatggggatgacgccgatgacgagggcaacctgagcaaaggggaacgggtccgcgcgtggatccgagcccgactccctgcctgctgcctcgagcgagactcctggtcagcctacatcttccctcctcagtccaggttccgcctcctgtgtcaccggatcatcacccacaagatgttcgaccacgtggtccttgtcatcatcttccttaactgcatcaccatcgccatggagcgccccaaaattgacccccacagcgctgaacgcatcttcctgaccctctccaattacatcttcaccgcagtctttctggctgaaatgacagtgaaggtggtggcactgggctggtgcttcggggagcaggcgtacctgcggagcagttggaacgtgctggacgggctgttggtgctcatctccgtcatcgacattctggtgtccatggtctctgacagcggcaccaagatcctgggcatgctgagggtgctgcggctgctgcggaccctgcgcccgctcagggtgatcagccgggcgcaggggctgaagctggtggtggagacgctgatgtcctcactgaaacccatcggcaacattgtagtcatctgctgtgccttcttcatcattttcggcatcttgggggtgcagctcttcaaagggaagtttttcgtgtgccagggcgaggataccaggaacatcaccaataaatcggactgtgccgaggccagttaccggtgggtccggcacaagtacaactttgacaaccttggccaggccctgatgtccctgttcgttttggcctccaaggatggttgggtggacatcatgtacgatgggctggatgctgtgggcgtggaccagcagaacttccacaagtgtcggcagcaccaggaggaagaggaggcccggcggcgggaggagaagcgcctacgaagactggagaaaaagagaaggaaagcccagtgcaaaccttactactccgactactcccgcttccggctcctcgtccaccacttgtgcaccagccactacctggacctcttcatcacaggtgtcatcgggctgaacgtggtcaccatggccatggagcactaccagcagccccagattctggatgaggctctgaagatctgcaactacatcttcactgtcatctttgtcttggagtcagttttcaaacttgtggcctttggtttccgtcggttcttccaggacaggtggaaccagctggacctggccattgtgctgctgtccatcatgggcatcacgctggaggaaatcgaggtcaacgcctcgctgcccatcaaccccaccatcatccgcatcatgagggtgctgcgcattgcccgagtgctgaagctgctgaagatggctgtgggcatgcgggcgctgctggacacggtgatgcaggccctgccccaggtggggaacctgggacttctcttcatgttgttgtttttcatctttgcagctctgggcgtggagctctttggagacctggagtgtgacgagacacacccctgtgagggcctgggccgtcatgccacctttcggaactttggcatggccttcctaaccctcttccgagtctccacaggtgacaattggaatggcattatgaaggacaccctccgggactgtgaccaggagtccacctgctacaacacggtcatctcgcctatctactttgtgtccttcgtgctgacggcccagttcgtgctagtcaacgtggtgatcgccgtgctgatgaagcacctggaggagagcaacaaggaggccaaggaggaggccgagctagaggctgagctggagctggagatgaagaccctcagcccccagccccactcgccactgggcagccccttcctctggcctggggtcgagggccccgacagccccgacagccccaagcctggggctctgcacccagcggcccacgcgagatcagcctcccacttttccctggagcaccccacgatgcagccccaccccacggagctgccaggaccagacttactgactgtgcggaagtctggggtcagccgaacgcactctctgcccaatgacagctacatgtgtcggcatgggagcactgccgaggggcccctgggacacaggggctgggggctccccaaagctcagtcaggctccgtcttgtccgttcactcccagccagcagataccagctacatcctgcagcttcccaaagatgcacctcatctgctccagccccacagcgccccaacctggggcaccatccccaaactgcccccaccaggacgctcccctttggctcagaggccactcaggcgccaggcagcaataaggactgactccttggacgttcagggtctgggcagccgggaagacctgctggcagaggtgagtgggccctccccgcccctggcccgggcctactctttctggggccagtcaagtacccaggcacagcagcactcccgcagccacagcaagatctccaagcacatgaccccgccagccccttgcccaggcccagaacccaactggggcaagggccctccagagaccagaagcagcttagagttggacacggagctgagctggatttcaggagacctcctgccccctggcggccaggaggagcccccatccccacgggacctgaagaagtgctacagcgtggaggcccagagctgccagcgccggcctacgtcctggctggatgagcagaggagacactctatcgccgtcagctgcctggacagcggctcccaaccccacctgggcacagacccctctaaccttgggggccagcctcttggggggcctgggagccggcccaagaaaaaactcagcccgcctagtatcaccatagacccccccgagagccaaggtcctcggaccccgcccagccctggtatctgcctccggaggagggctccgtccagcgactccaaggatcccttggcctctggcccccctgacagcatggctgcctcgccctccccaaagaaagatgtgctgagtctctccggtttatcctctgacccagcagacctggacccctgagtcctgccccacttt

SEQ ID NO: 113262 - DNA, 6912 bp, Homo sapiens
  Payload ID: 2145
  Gene Symbol: CACNA1G
  Gene Name: calcium channel, voltage-dependent, T type, alpha 1G subunit
  Uniprot ID: O43497
  ENST ID: ENST00000510115
  CDS Start-End: 1-6897
atggacgaggaggaggatggagcgggcgccgaggagtcgggacagccccggagcttcatgcggctcaacgacctgtcgggggccgggggccggccggggccggggtcagcagaaaaggacccgggcagcgcggactccgaggcggaggggctgccgtacccggcgctggccccggtggttttcttctacttgagccaggacagccgcccgcggagctggtgtctccgcacggtctgtaacccctggtttgagcgcatcagcatgttggtcatccttctcaactgcgtgaccctgggcatgttccggccatgcgaggacatcgcctgtgactcccagcgctgccggatcctgcaggcctttgatgacttcatctttgccttctttgccgtggagatggtggtgaagatggtggccttgggcatctttgggaaaaagtgttacctgggagacacttggaaccggcttgactttttcatcgtcatcgcagggatgctggagtactcgctggacctgcagaacgtcagcttctcagctgtcaggacagtccgtgtgctgcgaccgctcagggccattaaccgggtgcccagcatgcgcatccttgtcacgttgctgctggatacgctgcccatgctgggcaacgtcctgctgctctgcttcttcgtcttcttcatcttcggcatcgtcggcgtccagctgtgggcagggctgcttcggaaccgatgcttcctacctgagaatttcagcctccccctgagcgtggacctggagcgctattaccagacagagaacgaggatgagagccccttcatctgctcccagccacgcgagaacggcatgcggtcctgcagaagcgtgcccacgctgcgcggggacgggggcggtggcccaccttgcggtctggactatgaggcctacaacagctccagcaacaccacctgtgtcaactggaaccagtactacaccaactgctcagcgggggagcacaaccccttcaagggcgccatcaactttgacaacattggctatgcctggatcgccatcttccaggtcatcacgctggagggctgggtcgacatcatgtactttgtgatggatgctcattccttctacaatttcatctacttcatcctcctcatcatcgtgggctccttcttcatgatcaacctgtgcctggtggtgattgccacgcagttctcagagaccaagcagcgggaaagccagctgatgcgggagcagcgtgtgcggttcctgtccaacgccagcaccctggctagcttctctgagcccggcagctgctatgaggagctgctcaagtacctggtgtacatccttcgtaaggcagcccgcaggctggctcaggtctctcgggcagcaggtgtgcgggttgggctgctcagcagcccagcacccctcgggggccaggagacccagcccagcagcagctgctctcgctcccaccgccgcctatccgtccaccacctggtgcaccaccaccaccaccatcaccaccactaccacctgggcaatgggacgctcagggccccccgggccagcccggagatccaggacagggatgccaatgggtcccgccggctcatgctgccaccaccctcgacgcctgccctctccggggccccccctggtggcgcagagtctgtgcacagcttctaccatgccgactgccacttagagccagtccgctgccaggcgccccctcccaggtccccatctgaggcatccggcaggactgtgggcagcgggaaggtgtatcccaccgtgcacaccagccctccaccggagacgctgaaggagaaggcactagtagaggtggctgccagctctgggcccccaaccctcaccagcctcaacatcccacccgggccctacagctccatgcacaagctgctggagacacagagtacaggtgcctgccaaagctcttgcaagatctccagcccttgcttgaaagcagacagtggagcctgtggtccagacagctgcccctactgtgcccgggccggggcaggggaggtggagctcgccgaccgtgaaatgcctgactcagacagcgaggcagtttatgagttcacacaggatgcccagcacagcgacctccgggacccccacagccggcggcaacggagcctgggcccagatgcagagcccagctctgtgctggccttctggaggctaatctgtgacaccttccgaaagattgtggacagcaagtactttggccggggaatcatgatcgccatcctggtcaacacactcagcatgggcatcgaataccacgagcagcccgaggagcttaccaacgccctagaaatcagcaacatcgtcttcaccagcctctttgccctggagatgctgctgaagctgcttgtgtatggtccctttggctacatcaagaatccctacaacatcttcgatggtgtcattgtggtcatcagcgtgtgggagatcgtgggccagcaggggggcggcctgtcggtgctgcggaccttccgcctgatgcgtgtgctgaagctggtgcgcttcctgccggcgctgcagcggcagctggtggtgctcatgaagaccatggacaacgtggccaccttctgcatgctgcttatgctcttcatcttcatcttcagcatcctgggcatgcatctcttcggctgcaagtttgcctctgagcgggatggggacaccctgccagaccggaagaattttgactccttgctctgggccatcgtcactgtctttcagatcctgacccaggaggactggaacaaagtcctctacaatggtatggcctccacgtcgtcctgggcggccctttatttcattgccctcatgaccttcggcaactacgtgctcttcaatttgctggtcgccattctggtggagggcttccaggcggagggagatgccaacaagtccgaatcagagcccgatttcttctcacccagcctggatggtgatggggacaggaagaagtgcttggccttggtgtccctgggagagcacccggagctgcggaagagcctgctgccgcctctcatcatccacacggccgccacacccatgtcgctgcccaagagcaccagcacgggcctgggcgaggcgctgggccctgcgtcgcgccgcaccagcagcagcgggtcggcagagcctggggcggcccacgagatgaagtcaccgcccagcgcccgcagctctccgcacagcccctggagcgctgcaagcagctggaccagcaggcgctccagccggaacagcctcggccgtgcacccagcctgaagcggagaagcccaagtggagagcggcggtccctgttgtcgggagaaggccaggagagccaggatgaagaggagagctcagaagaggagcgggccagccctgcgggcagtgaccatcgccacagggggtccctggagcgggaggccaagagttcctttgacctgccagacacactgcaggtgccagggctgcatcgcactgccagtggccgagggtctgcttctgagcaccaggactgcaatggcaagtcggcttcagggcgcctggcccgggccctgcggcctgatgaccccccactggatggggatgacgccgatgacgagggcaacctgagcaaaggggaacgggtccgcgcgtggatccgagcccgactccctgcctgctgcctcgagcgagactcctggtcagcctacatcttccctcctcagtccaggttccgcctcctgtgtcaccggatcatcacccacaagatgttcgaccacgtggtccttgtcatcatcttccttaactgcatcaccatcgccatggagcgccccaaaattgacccccacagcgctgaacgcatcttcctgaccctctccaattacatcttcaccgcagtctttctggctgaaatgacagtgaaggtggtggcactgggctggtgcttcggggagcaggcgtacctgcggagcagttggaacgtgctggacgggctgttggtgctcatctccgtcatcgacattctggtgtccatggtctctgacagcggcaccaagatcctgggcatgctgagggtgctgcggctgctgcggaccctgcgcccgctcagggtgatcagccgggcgcaggggctgaagctggtggtggagacgctgatgtcctcactgaaacccatcggcaacattgtagtcatctgctgtgccttcttcatcattttcggcatcttgggggtgcagctcttcaaagggaagtttttcgtgtgccagggcgaggataccaggaacatcaccaataaatcggactgtgccgaggccagttaccggtgggtccggcacaagtacaactttgacaaccttggccaggccctgatgtccctgttcgttttggcctccaaggatggttgggtggacatcatgtacgatgggctggatgctgtgggcgtggaccagcagcccatcatgaaccacaacccctggatgctgctgtacttcatctcgttcctgctcattgtggccttctttgtcctgaacatgtttgtgggtgtggtggtggagaacttccacaagtgtcggcagcaccaggaggaagaggaggcccggcggcgggaggagaagcgcctacgaagactggagaaaaagagaaggagtaaggagaagcagatggctgaagcccagtgcaaaccttactactccgactactcccgcttccggctcctcgtccaccacttgtgcaccagccactacctggacctcttcatcacaggtgtcatcgggctgaacgtggtcaccatggccatggagcactaccagcagccccagattctggatgaggctctgaagatctgcaactacatcttcactgtcatctttgtcttggagtcagttttcaaacttgtggcctttggtttccgtcggttcttccaggacaggtggaaccagctggacctggccattgtgctgctgtccatcatgggcatcacgctggaggaaatcgaggtcaacgcctcgctgcccatcaaccccaccatcatccgcatcatgagggtgctgcgcattgcccgagtgctgaagctgctgaagatggctgtgggcatgcgggcgctgctggacacggtgatgcaggccctgccccaggtggggaacctgggacttctcttcatgttgttgtttttcatctttgcagctctgggcgtggagctctttggagacctggagtgtgacgagacacacccctgtgagggcctgggccgtcatgccacctttcggaactttggcatggccttcctaaccctcttccgagtctccacaggtgacaattggaatggcattatgaaggacaccctccgggactgtgaccaggagtccacctgctacaacacggtcatctcgcctatctactttgtgtccttcgtgctgacggcccagttcgtgctagtcaacgtggtgatcgccgtgctgatgaagcacctggaggagagcaacaaggaggccaaggaggaggccgagctagaggctgagctggagctggagatgaagaccctcagcccccagccccactcgccactgggcagccccttcctctggcctggggtcgagggccccgacagccccgacagccccaagcctggggctctgcacccagcggcccacgcgagatcagcctcccacttttccctggagcaccccacggacaggcagctgtttgacaccatatccctgctgatccagggctccctggagtgggagctgaagctgatggacgagctggcaggcccagggggccagccctctgccttcccttctgcccccagcctgggaggctccgacccacagatgcagccccaccccacggagctgccaggaccagacttactgactgtgcggaagtctggggtcagccgaacgcactctctgcccaatgacagctacatgtgtcggcatgggagcactgccgaggggcccctgggacacaggggctgggggctccccaaagctcagtcaggctccgtcttgtccgttcactcccagccagcagataccagctacatcctgcagcttcccaaagatgcacctcatctgctccagccccacagcgccccaacctggggcaccatccccaaactgcccccaccaggacgctcccctttggctcagaggccactcaggcgccaggcagcaataaggactgactccttggacgttcagggtctgggcagccgggaagacctgctggcagaggtgagtgggccctccccgcccctggcccgggcctactctttctggggccagtcaagtacccaggcacagcagcactcccgcagccacagcaagatctccaagcacatgaccccgccagccccttgcccaggcccagaacccaactggggcaagggccctccagagaccagaagcagcttagagttggacacggagctgagctggatttcaggagacctcctgccccctggcggccaggaggagcccccatccccacgggacctgaagaagtgctacagcgtggaggcccagagctgccagcgccggcctacgtcctggctggatgagcagaggagacactctatcgccgtcagctgcctggacagcggctcccaaccccacctgggcacagacccctctaaccttgggggccagcctcttggggggcctgggagccggcccaagaaaaaactcagcccgcctagtatcaccatagacccccccgagagccaaggtcctcggaccccgcccagccctggtatctgcctccggaggagggctccgtccagcgactccaaggatcccttggcctctggcccccctgacagcatggctgcctcgccctccccaaagaaagatgtgctgagtctctccggtttatcctctgacccagcagacctggacccctgagtcctgccccacttt

SEQ ID NO: 113263 - DNA, 6752 bp, Homo sapiens
  Payload ID: 2145
  Gene Symbol: CACNA1G
  Gene Name: calcium channel, voltage-dependent, T type, alpha 1G subunit
  Uniprot ID: O43497
  ENST ID: ENST00000503436
  CDS Start-End: 1-5262
atggacgaggaggaggatggagcgggcgccgaggagtcgggacagccccggagcttcatgcggctcaacgacctgtcgggggccgggggccggccggggccggggtcagcagaaaaggacccgggcagcgcggactccgaggcggaggggctgccgtacccggcgctggccccggtggttttcttctacttgagccaggacagccgcccgcggagctggtgtctccgcacggtctgtaacccctggtttgagcgcatcagcatgttggtcatccttctcaactgcgtgaccctgggcatgttccggccatgcgaggacatcgcctgtgactcccagcgctgccggatcctgcaggcctttgatgacttcatctttgccttctttgccgtggagatggtggtgaagatggtggccttgggcatctttgggaaaaagtgttacctgggagacacttggaaccggcttgactttttcatcgtcatcgcagggatgctggagtactcgctggacctgcagaacgtcagcttctcagctgtcaggacagtccgtgtgctgcgaccgctcagggccattaaccgggtgcccagcatgcgcatccttgtcacgttgctgctggatacgctgcccatgctgggcaacgtcctgctgctctgcttcttcgtcttcttcatcttcggcatcgtcggcgtccagctgtgggcagggctgcttcggaaccgatgcttcctacctgagaatttcagcctccccctgagcgtggacctggagcgctattaccagacagagaacgaggatgagagccccttcatctgctcccagccacgcgagaacggcatgcggtcctgcagaagcgtgcccacgctgcgcggggacgggggcggtggcccaccttgcggtctggactatgaggcctacaacagctccagcaacaccacctgtgtcaactggaaccagtactacaccaactgctcagcgggggagcacaaccccttcaagggcgccatcaactttgacaacattggctatgcctggatcgccatcttccaggtcatcacgctggagggctgggtcgacatcatgtactttgtgatggatgctcattccttctacaatttcatctacttcatcctcctcatcatcgtgggctccttcttcatgatcaacctgtgcctggtggtgattgccacgcagttctcagagaccaagcagcgggaaagccagctgatgcgggagcagcgtgtgcggttcctgtccaacgccagcaccctggctagcttctctgagcccggcagctgctatgaggagctgctcaagtacctggtgtacatccttcgtaaggcagcccgcaggctggctcaggtctctcgggcagcaggtgtgcgggttgggctgctcagcagcccagcacccctcgggggccaggagacccagcccagcagcagctgctctcgctcccaccgccgcctatccgtccaccacctggtgcaccaccaccaccaccatcaccaccactaccacctgggcaatgggacgctcagggccccccgggccagcccggagatccaggacagggatgccaatgggtcccgccggctcatgctgccaccaccctcgacgcctgccctctccggggccccccctggtggcgcagagtctgtgcacagcttctaccatgccgactgccacttagagccagtccgctgccaggcgccccctcccaggtccccatctgaggcatccggcaggactgtgggcagcgggaaggtgtatcccaccgtgcacaccagccctccaccggagacgctgaaggagaaggcactagtagaggtggctgccagctctgggcccccaaccctcaccagcctcaacatcccacccgggccctacagctccatgcacaagctgctggagacacagagtacaggtgcctgccaaagctcttgcaagatctccagcccttgcttgaaagcagacagtggagcctgtggtccagacagctgcccctactgtgcccgggccggggcaggggaggtggagctcgccgaccgtgaaatgcctgactcagacagcgaggcagtttatgagttcacacaggatgcccagcacagcgacctccgggacccccacagccggcggcaacggagcctgggcccagatgcagagcccagctctgtgctggccttctggaggctaatctgtgacaccttccgaaagattgtggacagcaagtactttggccggggaatcatgatcgccatcctggtcaacacactcagcatgggcatcgaataccacgagcagcccgaggagcttaccaacgccctagaaatcagcaacatcgtcttcaccagcctctttgccctggagatgctgctgaagctgcttgtgtatggtccctttggctacatcaagaatccctacaacatcttcgatggtgtcattgtggtcatcagcgtgtgggagatcgtgggccagcaggggggcggcctgtcggtgctgcggaccttccgcctgatgcgtgtgctgaagctggtgcgcttcctgccggcgctgcagcggcagctggtggtgctcatgaagaccatggacaacgtggccaccttctgcatgctgcttatgctcttcatcttcatcttcagcatcctgggcatgcatctcttcggctgcaagtttgcctctgagcgggatggggacaccctgccagaccggaagaattttgactccttgctctgggccatcgtcactgtctttcagatcctgacccaggaggactggaacaaagtcctctacaatggtatggcctccacgtcgtcctgggcggccctttatttcattgccctcatgaccttcggcaactacgtgctcttcaatttgctggtcgccattctggtggagggcttccaggcggagggagatgccaacaagtccgaatcagagcccgatttcttctcacccagcctggatggtgatggggacaggaagaagtgcttggccttggtgtccctgggagagcacccggagctgcggaagagcctgctgccgcctctcatcatccacacggccgccacacccatgtcgctgcccaagagcaccagcacgggcctgggcgaggcgctgggccctgcgtcgcgccgcaccagcagcagcgggtcggcagagcctggggcggcccacgagatgaagtcaccgcccagcgcccgcagctctccgcacagcccctggagcgctgcaagcagctggaccagcaggcgctccagccggaacagcctcggccgtgcacccagcctgaagcggagaagcccaagtggagagcggcggtccctgttgtcgggagaaggccaggagagccaggatgaagaggagagctcagaagaggagcgggccagccctgcgggcagtgaccatcgccacagggggtccctggagcgggaggccaagagttcctttgacctgccagacacactgcaggtgccagggctgcatcgcactgccagtggccgagggtctgcttctgagcaccaggactgcaatggcaagtcggcttcagggcgcctggcccgggccctgcggcctgatgaccccccactggatggggatgacgccgatgacgagggcaacctgagcaaaggggaacgggtccgcgcgtggatccgagcccgactccctgcctgctgcctcgagcgagactcctggtcagcctacatcttccctcctcagtccaggttccgcctcctgtgtcaccggatcatcacccacaagatgttcgaccacgtggtccttgtcatcatcttccttaactgcatcaccatcgccatggagcgccccaaaattgacccccacagcgctgaacgcatcttcctgaccctctccaattacatcttcaccgcagtctttctggctgaaatgacagtgaaggtggtggcactgggctggtgcttcggggagcaggcgtacctgcggagcagttggaacgtgctggacgggctgttggtgctcatctccgtcatcgacattctggtgtccatggtctctgacagcggcaccaagatcctgggcatgctgagggtgctgcggctgctgcggaccctgcgcccgctcagggtgatcagccgggcgcaggggctgaagctggtggtggagacgctgatgtcctcactgaaacccatcggcaacattgtagtcatctgctgtgccttcttcatcattttcggcatcttgggggtgcagctcttcaaagggaagtttttcgtgtgccagggcgaggataccaggaacatcaccaataaatcggactgtgccgaggccagttaccggtgggtccggcacaagtacaactttgacaaccttggccaggccctgatgtccctgttcgttttggcctccaaggatggttgggtggacatcatgtacgatgggctggatgctgtgggcgtggaccagcagcccatcatgaaccacaacccctggatgctgctgtacttcatctcgttcctgctcattgtggccttctttgtcctgaacatgtttgtgggtgtggtggtggagaacttccacaagtgtcggcagcaccaggaggaagaggaggcccggcggcgggaggagaagcgcctacgaagactggagaaaaagagaaggaatctaatgctggacgatgtaattgcttccggcagctcagccagcgctgcgtcagaagcccagtgcaaaccttactactccgactactcccgcttccggctcctcgtccaccacttgtgcaccagccactacctggacctcttcatcacaggtgtcatcgggctgaacgtggtcaccatggccatggagcactaccagcagccccagattctggatgaggctctgaagatctgcaactacatcttcactgtcatctttgtcttggagtcagttttcaaacttgtggcctttggtttccgtcggttcttccaggacaggtggaaccagctggacctggccattgtgctgctgtccatcatgggcatcacgctggaggaaatcgaggtcaacgcctcgctgcccatcaaccccaccatcatccgcatcatgagggtgctgcgcattgcccgagtgctgaagctgctgaagatggctgtgggcatgcgggcgctgctggacacggtgatgcaggccctgccccagctctgggcgtggagctctttggagacctggagtgtgacgagacacacccctgtgagggcctgggccgtcatgccacctttcggaactttggcatggccttcctaaccctcttccgagtctccacaggtgacaattggaatggcattatgaaggacaccctccgggactgtgaccaggagtccacctgctacaacacggtcatctcgcctatctactttgtgtccttcgtgctgacggcccagttcgtgctagtcaacgtggtgatcgccgtgctgatgaagcacctggaggagagcaacaaggaggccaaggaggaggccgagctagaggctgagctggagctggagatgaagaccctcagcccccagccccactcgccactgggcagccccttcctctggcctggggtcgagggccccgacagccccgacagccccaagcctggggctctgcacccagcggcccacgcgagatcagcctcccacttttccctggagcaccccacgatgcagccccaccccacggagctgccaggaccagacttactgactgtgcggaagtctggggtcagccgaacgcactctctgcccaatgacagctacatgtgtcggcatgggagcactgccgaggggcccctgggacacaggggctgggggctccccaaagctcagtcaggctccgtcttgtccgttcactcccagccagcagataccagctacatcctgcagcttcccaaagatgcacctcatctgctccagccccacagcgccccaacctggggcaccatccccaaactgcccccaccaggacgctcccctttggctcagaggccactcaggcgccaggcagcaataaggactgactccttggacgttcagggtctgggcagccgggaagacctgctggcagaggtgagtgggccctccccgcccctggcccgggcctactctttctggggccagtcaagtacccaggcacagcagcactcccgcagccacagcaagatctccaagcacatgaccccgccagccccttgcccaggcccagaacccaactggggcaagggccctccagagaccagaagcagcttagagttggacacggagctgagctggatttcaggagacctcctgccccctggcggccaggaggagcccccatccccacgggacctgaagaagtgctacagcgtggaggcccagagctgccagcgccggcctacgtcctggctggatgagcagaggagacactctatcgccgtcagctgcctggacagcggctcccaaccccacctgggcacagacccctctaaccttgggggccagcctcttggggggcctgggagccggcccaagaaaaaactcagcccgcctagtatcaccatagacccccccgagagccaaggtcctcggaccccgcccagccctggtatctgcctccggaggagggctccgtccagcgactccaaggatcccttggcctctggcccccctgacagcatggctgcctcgccctccccaaagaaagatgtgctgagtctctccggtttatcctctgacccagcagacctggacccctgagtcctgccccacttt

SEQ ID NO: 113264 - DNA, 6768 bp, Homo sapiens
  Payload ID: 2145
  Gene Symbol: CACNA1G
  Gene Name: calcium channel, voltage-dependent, T type, alpha 1G subunit
  Uniprot ID: O43497
  ENST ID: ENST00000503485
  CDS Start-End: 1-6753
atggacgaggaggaggatggagcgggcgccgaggagtcgggacagccccggagcttcatgcggctcaacgacctgtcgggggccgggggccggccggggccggggtcagcagaaaaggacccgggcagcgcggactccgaggcggaggggctgccgtacccggcgctggccccggtggttttcttctacttgagccaggacagccgcccgcggagctggtgtctccgcacggtctgtaacccctggtttgagcgcatcagcatgttggtcatccttctcaactgcgtgaccctgggcatgttccggccatgcgaggacatcgcctgtgactcccagcgctgccggatcctgcaggcctttgatgacttcatctttgccttctttgccgtggagatggtggtgaagatggtggccttgggcatctttgggaaaaagtgttacctgggagacacttggaaccggcttgactttttcatcgtcatcgcagggatgctggagtactcgctggacctgcagaacgtcagcttctcagctgtcaggacagtccgtgtgctgcgaccgctcagggccattaaccgggtgcccagcatgcgcatccttgtcacgttgctgctggatacgctgcccatgctgggcaacgtcctgctgctctgcttcttcgtcttcttcatcttcggcatcgtcggcgtccagctgtgggcagggctgcttcggaaccgatgcttcctacctgagaatttcagcctccccctgagcgtggacctggagcgctattaccagacagagaacgaggatgagagccccttcatctgctcccagccacgcgagaacggcatgcggtcctgcagaagcgtgcccacgctgcgcggggacgggggcggtggcccaccttgcggtctggactatgaggcctacaacagctccagcaacaccacctgtgtcaactggaaccagtactacaccaactgctcagcgggggagcacaaccccttcaagggcgccatcaactttgacaacattggctatgcctggatcgccatcttccaggtcatcacgctggagggctgggtcgacatcatgtactttgtgatggatgctcattccttctacaatttcatctacttcatcctcctcatcatcgtgggctccttcttcatgatcaacctgtgcctggtggtgattgccacgcagttctcagagaccaagcagcgggaaagccagctgatgcgggagcagcgtgtgcggttcctgtccaacgccagcaccctggctagcttctctgagcccggcagctgctatgaggagctgctcaagtacctggtgtacatccttcgtaaggcagcccgcaggctggctcaggtctctcgggcagcaggtgtgcgggttgggctgctcagcagcccagcacccctcgggggccaggagacccagcccagcagcagctgctctcgctcccaccgccgcctatccgtccaccacctggtgcaccaccaccaccaccatcaccaccactaccacctgggcaatgggacgctcagggccccccgggccagcccggagatccaggacagggatgccaatgggtcccgccggctcatgctgccaccaccctcgacgcctgccctctccggggccccccctggtggcgcagagtctgtgcacagcttctaccatgccgactgccacttagagccagtccgctgccaggcgccccctcccaggtccccatctgaggcatccggcaggactgtgggcagcgggaaggtgtatcccaccgtgcacaccagccctccaccggagacgctgaaggagaaggcactagtagaggtggctgccagctctgggcccccaaccctcaccagcctcaacatcccacccgggccctacagctccatgcacaagctgctggagacacagagtacaggtgcctgccaaagctcttgcaagatctccagcccttgcttgaaagcagacagtggagcctgtggtccagacagctgcccctactgtgcccgggccggggcaggggaggtggagctcgccgaccgtgaaatgcctgactcagacagcgaggcagtttatgagttcacacaggatgcccagcacagcgacctccgggacccccacagccggcggcaacggagcctgggcccagatgcagagcccagctctgtgctggccttctggaggctaatctgtgacaccttccgaaagattgtggacagcaagtactttggccggggaatcatgatcgccatcctggtcaacacactcagcatgggcatcgaataccacgagcagcccgaggagcttaccaacgccctagaaatcagcaacatcgtcttcaccagcctctttgccctggagatgctgctgaagctgcttgtgtatggtccctttggctacatcaagaatccctacaacatcttcgatggtgtcattgtggtcatcagcgtgtgggagatcgtgggccagcaggggggcggcctgtcggtgctgcggaccttccgcctgatgcgtgtgctgaagctggtgcgcttcctgccggcgctgcagcggcagctggtggtgctcatgaagaccatggacaacgtggccaccttctgcatgctgcttatgctcttcatcttcatcttcagcatcctgggcatgcatctcttcggctgcaagtttgcctctgagcgggatggggacaccctgccagaccggaagaattttgactccttgctctgggccatcgtcactgtctttcagatcctgacccaggaggactggaacaaagtcctctacaatggtatggcctccacgtcgtcctgggcggccctttatttcattgccctcatgaccttcggcaactacgtgctcttcaatttgctggtcgccattctggtggagggcttccaggcggaggaaatcagcaaacgggaagatgcgagtggacagttaagctgtattcagctgcctgtcgactcccaggggggagatgccaacaagtccgaatcagagcccgatttcttctcacccagcctggatggtgatggggacaggaagaagtgcttggccttggtgtccctgggagagcacccggagctgcggaagagcctgctgccgcctctcatcatccacacggccgccacacccatgtcgctgcccaagagcaccagcacgggcctgggcgaggcgctgggccctgcgtcgcgccgcaccagcagcagcgggtcggcagagcctggggcggcccacgagatgaagtcaccgcccagcgcccgcagctctccgcacagcccctggagcgctgcaagcagctggaccagcaggcgctccagccggaacagcctcggccgtgcacccagcctgaagcggagaagcccaagtggagagcggcggtccctgttgtcgggagaaggccaggagagccaggatgaagaggagagctcagaagaggagcgggccagccctgcgggcagtgaccatcgccacagggggtccctggagcgggaggccaagagttcctttgacctgccagacacactgcaggtgccagggctgcatcgcactgccagtggccgagggtctgcttctgagcaccaggactgcaatggcaagtcggcttcagggcgcctggcccgggccctgcggcctgatgaccccccactggatggggatgacgccgatgacgagggcaacctgagcaaaggggaacgggtccgcgcgtggatccgagcccgactccctgcctgctgcctcgagcgagactcctggtcagcctacatcttccctcctcagtccaggttccgcctcctgtgtcaccggatcatcacccacaagatgttcgaccacgtggtccttgtcatcatcttccttaactgcatcaccatcgccatggagcgccccaaaattgacccccacagcgctgaacgcatcttcctgaccctctccaattacatcttcaccgcagtctttctggctgaaatgacagtgaaggtggtggcactgggctggtgcttcggggagcaggcgtacctgcggagcagttggaacgtgctggacgggctgttggtgctcatctccgtcatcgacattctggtgtccatggtctctgacagcggcaccaagatcctgggcatgctgagggtgctgcggctgctgcggaccctgcgcccgctcagggtgatcagccgggcgcaggggctgaagctggtggtggagacgctgatgtcctcactgaaacccatcggcaacattgtagtcatctgctgtgccttcttcatcattttcggcatcttgggggtgcagctcttcaaagggaagtttttcgtgtgccagggcgaggataccaggaacatcaccaataaatcggactgtgccgaggccagttaccggtgggtccggcacaagtacaactttgacaaccttggccaggccctgatgtccctgttcgttttggcctccaaggatggttgggtggacatcatgtacgatgggctggatgctgtgggcgtggaccagcagaacttccacaagtgtcggcagcaccaggaggaagaggaggcccggcggcgggaggagaagcgcctacgaagactggagaaaaagagaaggaatctaatgctggacgatgtaattgcttccggcagctcagccagcgctgcgtcagaagcccagtgcaaaccttactactccgactactcccgcttccggctcctcgtccaccacttgtgcaccagccactacctggacctcttcatcacaggtgtcatcgggctgaacgtggtcaccatggccatggagcactaccagcagccccagattctggatgaggctctgaagatctgcaactacatcttcactgtcatctttgtcttggagtcagttttcaaacttgtggcctttggtttccgtcggttcttccaggacaggtggaaccagctggacctggccattgtgctgctgtccatcatgggcatcacgctggaggaaatcgaggtcaacgcctcgctgcccatcaaccccaccatcatccgcatcatgagggtgctgcgcattgcccgagtgctgaagctgctgaagatggctgtgggcatgcgggcgctgctggacacggtgatgcaggccctgccccaggtggggaacctgggacttctcttcatgttgttgtttttcatctttgcagctctgggcgtggagctctttggagacctggagtgtgacgagacacacccctgtgagggcctgggccgtcatgccacctttcggaactttggcatggccttcctaaccctcttccgagtctccacaggtgacaattggaatggcattatgaaggacaccctccgggactgtgaccaggagtccacctgctacaacacggtcatctcgcctatctactttgtgtccttcgtgctgacggcccagttcgtgctagtcaacgtggtgatcgccgtgctgatgaagcacctggaggagagcaacaaggaggccaaggaggaggccgagctagaggctgagctggagctggagatgaagaccctcagcccccagccccactcgccactgggcagccccttcctctggcctggggtcgagggccccgacagccccgacagccccaagcctggggctctgcacccagcggcccacgcgagatcagcctcccacttttccctggagcaccccacgatgcagccccaccccacggagctgccaggaccagacttactgactgtgcggaagtctggggtcagccgaacgcactctctgcccaatgacagctacatgtgtcggcatgggagcactgccgaggggcccctgggacacaggggctgggggctccccaaagctcagtcaggctccgtcttgtccgttcactcccagccagcagataccagctacatcctgcagcttcccaaagatgcacctcatctgctccagccccacagcgccccaacctggggcaccatccccaaactgcccccaccaggacgctcccctttggctcagaggccactcaggcgccaggcagcaataaggactgactccttggacgttcagggtctgggcagccgggaagacctgctggcagaggtgagtgggccctccccgcccctggcccgggcctactctttctggggccagtcaagtacccaggcacagcagcactcccgcagccacagcaagatctccaagcacatgaccccgccagccccttgcccaggcccagaacccaactggggcaagggccctccagagaccagaagcagcttagagttggacacggagctgagctggatttcaggagacctcctgccccctggcggccaggaggagcccccatccccacgggacctgaagaagtgctacagcgtggaggcccagagctgccagcgccggcctacgtcctggctggatgagcagaggagacactctatcgccgtcagctgcctggacagcggctcccaaccccacctgggcacagacccctctaaccttgggggccagcctcttggggggcctgggagccggcccaagaaaaaactcagcccgcctagtatcaccatagacccccccgagagccaaggtcctcggaccccgcccagccctggtatctgcctccggaggagggctccgtccagcgactccaaggatcccttggcctctggcccccctgacagcatggctgcctcgccctccccaaagaaagatgtgctgagtctctccggtttatcctctgacccagcagacctggacccctgagtcctgccccacttt

SEQ ID NO: 113265 - DNA, 6767 bp, Homo sapiens
  Payload ID: 2145
  Gene Symbol: CACNA1G
  Gene Name: calcium channel, voltage-dependent, T type, alpha 1G subunit
  Uniprot ID: O43497
  ENST ID: ENST00000511765
  CDS Start-End: 1-5277
atggacgaggaggaggatggagcgggcgccgaggagtcgggacagccccggagcttcatgcggctcaacgacctgtcgggggccgggggccggccggggccggggtcagcagaaaaggacccgggcagcgcggactccgaggcggaggggctgccgtacccggcgctggccccggtggttttcttctacttgagccaggacagccgcccgcggagctggtgtctccgcacggtctgtaacccctggtttgagcgcatcagcatgttggtcatccttctcaactgcgtgaccctgggcatgttccggccatgcgaggacatcgcctgtgactcccagcgctgccggatcctgcaggcctttgatgacttcatctttgccttctttgccgtggagatggtggtgaagatggtggccttgggcatctttgggaaaaagtgttacctgggagacacttggaaccggcttgactttttcatcgtcatcgcagggatgctggagtactcgctggacctgcagaacgtcagcttctcagctgtcaggacagtccgtgtgctgcgaccgctcagggccattaaccgggtgcccagcatgcgcatccttgtcacgttgctgctggatacgctgcccatgctgggcaacgtcctgctgctctgcttcttcgtcttcttcatcttcggcatcgtcggcgtccagctgtgggcagggctgcttcggaaccgatgcttcctacctgagaatttcagcctccccctgagcgtggacctggagcgctattaccagacagagaacgaggatgagagccccttcatctgctcccagccacgcgagaacggcatgcggtcctgcagaagcgtgcccacgctgcgcggggacgggggcggtggcccaccttgcggtctggactatgaggcctacaacagctccagcaacaccacctgtgtcaactggaaccagtactacaccaactgctcagcgggggagcacaaccccttcaagggcgccatcaactttgacaacattggctatgcctggatcgccatcttccaggtcatcacgctggagggctgggtcgacatcatgtactttgtgatggatgctcattccttctacaatttcatctacttcatcctcctcatcatcgtgggctccttcttcatgatcaacctgtgcctggtggtgattgccacgcagttctcagagaccaagcagcgggaaagccagctgatgcgggagcagcgtgtgcggttcctgtccaacgccagcaccctggctagcttctctgagcccggcagctgctatgaggagctgctcaagtacctggtgtacatccttcgtaaggcagcccgcaggctggctcaggtctctcgggcagcaggtgtgcgggttgggctgctcagcagcccagcacccctcgggggccaggagacccagcccagcagcagctgctctcgctcccaccgccgcctatccgtccaccacctggtgcaccaccaccaccaccatcaccaccactaccacctgggcaatgggacgctcagggccccccgggccagcccggagatccaggacagggatgccaatgggtcccgccggctcatgctgccaccaccctcgacgcctgccctctccggggccccccctggtggcgcagagtctgtgcacagcttctaccatgccgactgccacttagagccagtccgctgccaggcgccccctcccaggtccccatctgaggcatccggcaggactgtgggcagcgggaaggtgtatcccaccgtgcacaccagccctccaccggagacgctgaaggagaaggcactagtagaggtggctgccagctctgggcccccaaccctcaccagcctcaacatcccacccgggccctacagctccatgcacaagctgctggagacacagagtacaggtgcctgccaaagctcttgcaagatctccagcccttgcttgaaagcagacagtggagcctgtggtccagacagctgcccctactgtgcccgggccggggcaggggaggtggagctcgccgaccgtgaaatgcctgactcagacagcgaggcagtttatgagttcacacaggatgcccagcacagcgacctccgggacccccacagccggcggcaacggagcctgggcccagatgcagagcccagctctgtgctggccttctggaggctaatctgtgacaccttccgaaagattgtggacagcaagtactttggccggggaatcatgatcgccatcctggtcaacacactcagcatgggcatcgaataccacgagcagcccgaggagcttaccaacgccctagaaatcagcaacatcgtcttcaccagcctctttgccctggagatgctgctgaagctgcttgtgtatggtccctttggctacatcaagaatccctacaacatcttcgatggtgtcattgtggtcatcagcgtgtgggagatcgtgggccagcaggggggcggcctgtcggtgctgcggaccttccgcctgatgcgtgtgctgaagctggtgcgcttcctgccggcgctgcagcggcagctggtggtgctcatgaagaccatggacaacgtggccaccttctgcatgctgcttatgctcttcatcttcatcttcagcatcctgggcatgcatctcttcggctgcaagtttgcctctgagcgggatggggacaccctgccagaccggaagaattttgactccttgctctgggccatcgtcactgtctttcagatcctgacccaggaggactggaacaaagtcctctacaatggtatggcctccacgtcgtcctgggcggccctttatttcattgccctcatgaccttcggcaactacgtgctcttcaatttgctggtcgccattctggtggagggcttccaggcggaggaaatcagcaaacgggaagatgcgagtggacagttaagctgtattcagctgcctgtcgactcccaggggggagatgccaacaagtccgaatcagagcccgatttcttctcacccagcctggatggtgatggggacaggaagaagtgcttggccttggtgtccctgggagagcacccggagctgcggaagagcctgctgccgcctctcatcatccacacggccgccacacccatgtcgctgcccaagagcaccagcacgggcctgggcgaggcgctgggccctgcgtcgcgccgcaccagcagcagcgggtcggcagagcctggggcggcccacgagatgaagtcaccgcccagcgcccgcagctctccgcacagcccctggagcgctgcaagcagctggaccagcaggcgctccagccggaacagcctcggccgtgcacccagcctgaagcggagaagcccaagtggagagcggcggtccctgttgtcgggagaaggccaggagagccaggatgaagaggagagctcagaagaggagcgggccagccctgcgggcagtgaccatcgccacagggggtccctggagcgggaggccaagagttcctttgacctgccagacacactgcaggtgccagggctgcatcgcactgccagtggccgagggtctgcttctgagcaccaggactgcaatggcaagtcggcttcagggcgcctggcccgggccctgcggcctgatgaccccccactggatggggatgacgccgatgacgagggcaacctgagcaaaggggaacgggtccgcgcgtggatccgagcccgactccctgcctgctgcctcgagcgagactcctggtcagcctacatcttccctcctcagtccaggttccgcctcctgtgtcaccggatcatcacccacaagatgttcgaccacgtggtccttgtcatcatcttccttaactgcatcaccatcgccatggagcgccccaaaattgacccccacagcgctgaacgcatcttcctgaccctctccaattacatcttcaccgcagtctttctggctgaaatgacagtgaaggtggtggcactgggctggtgcttcggggagcaggcgtacctgcggagcagttggaacgtgctggacgggctgttggtgctcatctccgtcatcgacattctggtgtccatggtctctgacagcggcaccaagatcctgggcatgctgagggtgctgcggctgctgcggaccctgcgcccgctcagggtgatcagccgggcgcaggggctgaagctggtggtggagacgctgatgtcctcactgaaacccatcggcaacattgtagtcatctgctgtgccttcttcatcattttcggcatcttgggggtgcagctcttcaaagggaagtttttcgtgtgccagggcgaggataccaggaacatcaccaataaatcggactgtgccgaggccagttaccggtgggtccggcacaagtacaactttgacaaccttggccaggccctgatgtccctgttcgttttggcctccaaggatggttgggtggacatcatgtacgatgggctggatgctgtgggcgtggaccagcagcccatcatgaaccacaacccctggatgctgctgtacttcatctcgttcctgctcattgtggccttctttgtcctgaacatgtttgtgggtgtggtggtggagaacttccacaagtgtcggcagcaccaggaggaagaggaggcccggcggcgggaggagaagcgcctacgaagactggagaaaaagagaaggaaagcccagtgcaaaccttactactccgactactcccgcttccggctcctcgtccaccacttgtgcaccagccactacctggacctcttcatcacaggtgtcatcgggctgaacgtggtcaccatggccatggagcactaccagcagccccagattctggatgaggctctgaagatctgcaactacatcttcactgtcatctttgtcttggagtcagttttcaaacttgtggcctttggtttccgtcggttcttccaggacaggtggaaccagctggacctggccattgtgctgctgtccatcatgggcatcacgctggaggaaatcgaggtcaacgcctcgctgcccatcaaccccaccatcatccgcatcatgagggtgctgcgcattgcccgagtgctgaagctgctgaagatggctgtgggcatgcgggcgctgctggacacggtgatgcaggccctgccccagctctgggcgtggagctctttggagacctggagtgtgacgagacacacccctgtgagggcctgggccgtcatgccacctttcggaactttggcatggccttcctaaccctcttccgagtctccacaggtgacaattggaatggcattatgaaggacaccctccgggactgtgaccaggagtccacctgctacaacacggtcatctcgcctatctactttgtgtccttcgtgctgacggcccagttcgtgctagtcaacgtggtgatcgccgtgctgatgaagcacctggaggagagcaacaaggaggccaaggaggaggccgagctagaggctgagctggagctggagatgaagaccctcagcccccagccccactcgccactgggcagccccttcctctggcctggggtcgagggccccgacagccccgacagccccaagcctggggctctgcacccagcggcccacgcgagatcagcctcccacttttccctggagcaccccacgatgcagccccaccccacggagctgccaggaccagacttactgactgtgcggaagtctggggtcagccgaacgcactctctgcccaatgacagctacatgtgtcggcatgggagcactgccgaggggcccctgggacacaggggctgggggctccccaaagctcagtcaggctccgtcttgtccgttcactcccagccagcagataccagctacatcctgcagcttcccaaagatgcacctcatctgctccagccccacagcgccccaacctggggcaccatccccaaactgcccccaccaggacgctcccctttggctcagaggccactcaggcgccaggcagcaataaggactgactccttggacgttcagggtctgggcagccgggaagacctgctggcagaggtgagtgggccctccccgcccctggcccgggcctactctttctggggccagtcaagtacccaggcacagcagcactcccgcagccacagcaagatctccaagcacatgaccccgccagccccttgcccaggcccagaacccaactggggcaagggccctccagagaccagaagcagcttagagttggacacggagctgagctggatttcaggagacctcctgccccctggcggccaggaggagcccccatccccacgggacctgaagaagtgctacagcgtggaggcccagagctgccagcgccggcctacgtcctggctggatgagcagaggagacactctatcgccgtcagctgcctggacagcggctcccaaccccacctgggcacagacccctctaaccttgggggccagcctcttggggggcctgggagccggcccaagaaaaaactcagcccgcctagtatcaccatagacccccccgagagccaaggtcctcggaccccgcccagccctggtatctgcctccggaggagggctccgtccagcgactccaaggatcccttggcctctggcccccctgacagcatggctgcctcgccctccccaaagaaagatgtgctgagtctctccggtttatcctctgacccagcagacctggacccctgagtcctgccccacttt

SEQ ID NO: 113266 - DNA, 1478 bp, Homo sapiens
  Payload ID: 2145
  Gene Symbol: CACNA1G
  Gene Name: calcium channel, voltage-dependent, T type, alpha 1G subunit
  ENST ID: ENST00000506520
  CDS Start-End: 1-1014
actgccagtggccgagggtctgcttctgagcaccaggactgcaatggcaagtcggcttcagggcgcctggcccgggccctgcggcctgatgaccccccactggatggggatgacgccgatgacgagggcaacctgagcaaaggggaacgggtccgcgcgtggatccgagcccgactccctgcctgctgcctcgagcgagactcctggtcagcctacatcttccctcctcagtccaggttccgcctcctgtgtcaccggatcatcacccacaagatgttcgaccacgtggtccttgtcatcatcttccttaactgcatcaccatcgccatggagcgccccaaaattgacccccacagcgctgaacgcatcttcctgaccctctccaattacatcttcaccgcagtctttctggctgaaatgacagtgaaggtggtggcactgggctggtgcttcggggagcaggcgtacctgcggagcagttggaacgtgctggacgggctgttggtgctcatctccgtcatcgacattctggtgtccatggtctctgacagcggcaccaagatcctgggcatgctgagggtgctgcggctgctgcggaccctgcgcccgctcagggtgatcagccgggcgcaggggctgaagctggtggtggagacgctgatgtcctcactgaaacccatcggcaacattgtagtcatctgctgtgccttcttcatcattttcggcatcttgggggtgcagctcttcaaagggaagtttttcgtgtgccagggcgaggataccaggaacatcaccaataaatcggactgtgccgaggccagttaccggtgggtccggcacaagtacaactttgacaaccttggccaggccctgatgtccctgttcgttttggcctccaaggatggttgggtggacatcatgtacgatgggctggatgctgtgggcgtggaccagcaggtagggctgaggtgggcaggatccatctgtgggctcaggtcactcagcatgggctgattccaggacagaaagagcaaggcagggtggcaaaatgccatgaaagaagcatcatattttacagcagaggctgttgctggtagcctgtgggccaaatctgggcatgttttattggtctacaacatgtttaacatgttttgaattagtgatgaatatttttaaactggtgaatttgggctgtgtgcagtggctcacacctgtaatgccagtgcattgggaggcctaggcaagaggatcacttgaggccaggagttggagaccagcctgggcatcatagcaagacccccagctctacaaaaaataaaaacaattagccgggtgtggtggtatcatctggagtcccagctgaggtgggaggatctcttgagcccaggagtttgaggctgcaataagctgtgatcgcaccactgcactccagcctaagcaatagaacaagaccctgtctctaaaaaaagaaaaaataa

SEQ ID NO: 113267 - DNA, 1255 bp, Homo sapiens
  Payload ID: 2145
  Gene Symbol: CACNA1G
  Gene Name: calcium channel, voltage-dependent, T type, alpha 1G subunit
  ENST ID: ENST00000570567
  CDS Start-End: 1-834
gcctttgatgacttcatctttgccttctttgccgtggagatggtggtgaagatggtggccttgggcatctttgggaaaaagtgttacctgggagacacttggaaccggcttgactttttcatcgtcatcgcagggatgctggagtactcgctggacctgcagaacgtcagcttctcagctgtcaggacagtccgtgtgctgcgaccgctcagggccattaaccgggtgcccagcatgcgcatccttgtcacgttgctgctggatacgctgcccatgctgggcaacgtcctgctgctctgcttcttcgtcttcttcatcttcggcatcgtcggcgtccagctgtgggcagggctgcttcggaaccgatgcttcctacctgagaatttcagcctccccctgagcgtggacctggagcgctattaccagacagagaacgaggatgagagccccttcatctgctcccagccacgcgagaacggcatgcggtcctgcagaagcgtgcccacgctgcgcggggacgggggcggtggcccaccttgcggtctggactatgaggcctacaacagctccagcaacaccacctgtgtcaactggaaccagtactacaccaactgctcagcgggggagcacaaccccttcaagggcgccatcaactttgacaacattggctatgcctggatcgccatcttccaggtcatcacgctggagggctgggtcgacatcatgtactttgtgatggatgctcattccttctacaatttcatctacttcatcctcctcatcatctttttagctctcaggacaagtcctgtagagagggcatccatcatatagtaggagggacaccagatgcagagtcaggaggaaatccaaggtcaaggcgggacttaactgctattgggaccttgggcaagtcattctccatgaggcctccagcactgctctgggcctctgtttcttcatgggtaaaatgaatggttctcaacctgagatgataccacctctcccagagggcatttggaaatgggaaagggtgattctggttttgattttttttaatagctttattgagacataactcacatatcattcaattcatccctttgaatgaatccagtggttttttaagcatgtttacagagttctgtttttttgtaaggacaaggggagtgcaattggcaatttgttactgggggaggggagagaagctaaacatcctgaaatgcttgcaaataaagaattattctacccaaaa

SEQ ID NO: 113268 - DNA, 8084 bp, Homo sapiens
  Payload ID: 2146
  Gene Symbol: CACNA1H
  Gene Name: calcium channel, voltage-dependent, T type, alpha 1H subunit
  Uniprot ID: O95180
  ENST ID: ENST00000348261
  CDS Start-End: 249-7310
cgaggccgccgccgtcgcctccgccgggcgagccggagccggagtcgagccgcggccgggagccgggcgggctggggacgcgggccgggggcggaggcgctgggggccggggccggggccgggggcggaggcgctgggggccggggccggggccgggcgccgagcggggtccgcggtgaccgcgccgcccgggcgatgcccgcggggacgccgccggccagcagagcgaggtgctgccggccgccaccatgaccgagggcgcacgggccgccgacgaggtccgggtgcccctgggcgcgccgccccctggccctgcggcgttggtgggggcgtccccggagagccccggggcgccgggacgcgaggcggagcgggggtccgagctcggcgtgtcaccctccgagagcccggcggccgagcgcggcgcggagctgggtgccgacgaggagcagcgcgtcccgtacccggccttggcggccacggtcttcttctgcctcggtcagaccacgcggccgcgcagctggtgcctccggctggtctgcaacccatggttcgagcacgtgagcatgctggtaatcatgctcaactgcgtgaccctgggcatgttccggccctgtgaggacgttgagtgcggctccgagcgctgcaacatcctggaggcctttgacgccttcattttcgccttttttgcggtggagatggtcatcaagatggtggccttggggctgttcgggcagaagtgttacctgggtgacacgtggaacaggctggatttcttcatcgtcgtggcgggcatgatggagtactcgttggacggacacaacgtgagcctctcggctatcaggaccgtgcgggtgctgcggcccctccgcgccatcaaccgcgtgcctagcatgcggatcctggtcactctgctgctggatacgctgcccatgctcgggaacgtccttctgctgtgcttcttcgtcttcttcattttcggcatcgttggcgtccagctctgggctggcctcctgcggaaccgctgcttcctggacagtgcctttgtcaggaacaacaacctgaccttcctgcggccgtactaccagacggaggagggcgaggagaacccgttcatctgctcctcacgccgagacaacggcatgcagaagtgctcgcacatccccggccgccgcgagctgcgcatgccctgcaccctgggctgggaggcctacacgcagccgcaggccgagggggtgggcgctgcacgcaacgcctgcatcaactggaaccagtactacaacgtgtgccgctcgggtgactccaacccccacaacggtgccatcaacttcgacaacatcggctacgcctggattgccatcttccaggtgatcacgctggaaggctgggtggacatcatgtactacgtcatggacgcccactcattctacaacttcatctatttcatcctgctcatcatcgtgggctccttcttcatgatcaacctgtgcctggtggtgattgccacgcagttctcggagacgaagcagcgggagagtcagctgatgcgggagcagcgggcacgccacctgtccaacgacagcacgctggccagcttctccgagcctggcagctgctacgaagagctgctgaagtacgtgggccacatattccgcaaggtcaagcggcgcagcttgcgcctctacgcccgctggcagagccgctggcgcaagaaggtggaccccagtgctgtgcaaggccagggtcccgggcaccgccagcgccgggcaggcaggcacacagcctcggtgcaccacctggtctaccaccaccatcaccaccaccaccaccactaccatttcagccatggcagcccccgcaggcccggccccgagccaggcgcctgcgacaccaggctggtccgagctggcgcgcccccctcgccaccttccccaggccgcggaccccccgacgcagagtctgtgcacagcatctaccatgccgactgccacatagaggggccgcaggagagggcccgggtggcacatgccgcagccactgccgctgccagcctcagactggccacagggctgggcaccatgaactaccccacgatcctgccctcaggggtgggcagcggcaaaggcagcaccagccccggacccaaggggaagtgggccggtggaccgccaggcaccggggggcacggcccgttgagcttgaacagccctgatccctacgagaagatcccgcatgtggtcggggagcatggactgggccaggcccctggccatctgtcgggcctcagtgtgccctgccccctgcccagccccccagcgggcacactgacctgtgagctgaagagctgcccgtactgcacccgtgccctggaggacccggagggtgagctcagcggctcggaaagtggagactcagatggccgtggcgtctatgaattcacgcaggacgtccggcacggtgaccgctgggaccccacgcgaccaccccgtgcgacggacacaccaggcccaggcccaggcagcccccagcggcgggcacagcagagggcagccccgggcgagccaggctggatgggccgcctctgggttaccttcagcggcaagctgcgccgcatcgtggacagcaagtacttcagccgtggcatcatgatggccatccttgtcaacacgctgagcatgggcgtggagtaccatgagcagcccgaggagctgactaatgctctggagatcagcaacatcgtgttcaccagcatgtttgccctggagatgctgctgaagctgctggcctgcggccctctgggctacatccggaacccgtacaacatcttcgacggcatcatcgtggtcatcagcgtctgggagatcgtggggcaggcggacggtggcttgtctgtgctgcgcaccttccggctgctgcgtgtgctgaagctggtgcgctttctgccagccctgcggcgccagctcgtggtgctggtgaagaccatggacaacgtggctaccttctgcacgctgctcatgctcttcattttcatcttcagcatcctgggcatgcaccttttcggctgcaagttcagcctgaagacagacaccggagacaccgtgcctgacaggaagaacttcgactccctgctgtgggccatcgtcaccgtgttccagatcctgacccaggaggactggaacgtggtcctgtacaacggcatggcctccacctcctcctgggccgccctctacttcgtggccctcatgaccttcggcaactatgtgctcttcaacctgctggtggccatcctcgtggagggcttccaggcggagggcgatgccaacagatccgacacggacgaggacaagacgtcggtccacttcgaggaggacttccacaagctcagagaactccagaccacagagctgaagatgtgttccctggccgtgacccccaacgggcacctggagggacgaggcagcctgtcccctcccctcatcatgtgcacagctgccacgcccatgcctacccccaagagctcaccattcctggatgcagcccccagcctcccagactctcggcgtggcagcagcagctccggggacccgccactgggagaccagaagcctccggccagcctccgaagttctccctgtgccccctggggccccagtggcgcctggagcagccggcgctccagctggagcagcctgggccgtgcccccagcctcaagcgccgcggccagtgtggggaacgtgagtccctgctgtctggcgagggcaagggcagcaccgacgacgaagctgaggacggcagggccgcgcccgggccccgtgccaccccactgcggcgggccgagtccctggacccacggcccctgcggccggccgccctcccgcctaccaagtgccgcgatcgcgacgggcaggtggtggccctgcccagcgacttcttcctgcgcatcgacagccaccgtgaggatgcagccgagcttgacgacgactcggaggacagctgctgcctccgcctgcataaagtgctggagccctacaagccccagtggtgccggagccgcgaggcctgggccctctacctcttctccccacagaaccggttccgcgtctcctgccagaaggtcatcacacacaagatgtttgatcacgtggtcctcgtcttcatcttcctcaactgcgtcaccatcgccctggagaggcctgacattgatcccggcagcaccgagcgggtcttcctcagcgtctccaattacatcttcacggccatcttcgtggcggagatgatggtgaaggtggtggccctggggctgctgtccggcgagcacgcctacctgcagagcagctggaacctgctggatgggctgctggtgctggtgtccctggtggacattgtcgtggccatggcctcggctggtggcgccaagatcctgggtgttctgcgcgtgctgcgtctgctgcggaccctgcggcctctgagggtcatcagccgggccccgggcctcaagctggtggtggagacgctgatatcatcactcaggcccattgggaacatcgtcctcatctgctgcgccttcttcatcatttttggcattttgggtgtgcagctcttcaaagggaagttctactactgcgagggccccgacaccaggaacatctccaccaaggcacagtgccgggccgcccactaccgctgggtgcgacgcaagtacaacttcgacaacctgggccaggccctgatgtcgctgttcgtgctgtcatccaaggatggatgggtgaacatcatgtacgacgggctggatgccgtgggtgtcgaccagcagcctgtgcagaaccacaacccctggatgctgctgtacttcatctccttcctgctcatcgtcagcttcttcgtgctcaacatgttcgtgggcgtcgtggtcgagaacttccacaagtgccggcagcaccaggaggcggaggaggcgcggcggcgagaggagaagcggctgcggcgcctagagaggaggcgcaggagcactttccccagcccagaggcccagcgccggccctactatgccgactactcgcccacgcgccgctccattcactcgctgtgcaccagccactatctcgacctcttcatcaccttcatcatctgtgtcaacgtcatcaccatgtccatggagcactataaccaacccaagtcgctggacgaggccctcaagtactgcaactacgtcttcaccatcgtgtttgtcttcgaggctgcactgaagctggtagcatttgggttccgtcggttcttcaaggacaggtggaaccagctggacctggccatcgtgctgctgtcactcatgggcatcacgctggaggagatagagatgagcgccgcgctgcccatcaaccccaccatcatccgcatcatgcgcgtgcttcgcattgcccgtgtgctgaagctgctgaagatggctacgggcatgcgcgccctgctggacactgtggtgcaagctctcccccaggtggggaacctgggccttcttttcatgctcctgttttttatctatgctgcgctgggagtggagctgttcgggaggctggagtgcagtgaagacaacccctgcgagggcctgagcaggcacgccaccttcagcaacttcggcatggccttcctcacgctgttccgcgtgtccacgggggacaactggaacgggatcatgaaggacacgctgcgcgagtgctcccgtgaggacaagcactgcctgagctacctgccggccctgtcgcccgtctacttcgtgaccttcgtgctggtggcccagttcgtgctggtgaacgtggtggtggccgtgctcatgaagcacctggaggagagcaacaaggaggcacgggaggatgcggagctggacgccgagatcgagctggagatggcgcagggccccgggagtgcacgccgggtggacgcggacaggcctcccttgccccaggagagtccgggcgccagggacgccccaaacctggttgcacgcaaggtgtccgtgtccaggatgctctcgctgcccaacgacagctacatgttcaggcccgtggtgcctgcctcggcgccccacccccgcccgctgcaggaggtggagatggagacctatggggccggcacccccttgggctccgttgcctctgtgcactctccgcccgcagagtcctgtgcctccctccagatcccattggctgtgtcgtccccagccaggagcggcgagcccctccacgccctgtcccctcggggcacagcccgctcccccagtctcagccggctgctctgcagacaggaggctgtgcacaccgattccttggaagggaagattgacagccctagggacaccctggatcctgcagagcctggtgagaaaaccccggtgaggccggtgacccaggggggctccctgcagtccccaccacgctccccacggcccgccagcgtccgcactcgtaagcataccttcggacagcgctgcgtctccagccggccggcggccccaggcggagaggaggccgaggcctcggacccagccgacgaggaggtcagccacatcaccagctccgcctgcccctggcagcccacagccgagccccatggccccgaagcctctccggtggccggcggcgagcgggacctgcgcaggctctacagcgtggatgctcagggcttcctggacaagccgggccgggcagacgagcagtggcggccctcggcggagctgggcagcggggagcctggggaggcgaaggcctggggccctgaggccgagcccgctctgggtgcgcgcagaaagaagaagatgagccccccctgcatctcggtggaaccccctgcggaggacgagggctctgcgcggccctccgcggcagagggcggcagcaccacactgaggcgcaggaccccgtcctgtgaggccacgcctcacagggactccctggagcccacagagggctcaggcgccgggggggaccctgcagccaagggggagcgctggggccaggcctcctgccgggctgagcacctgaccgtccccagctttgcctttgagccgctggacctcggggtccccagtggagaccctttcttggacggtagccacagtgtgaccccagaatccagagcttcctcttcaggggccatagtgcccctggaacccccagaatcagagcctcccatgcccgtcggtgaccccccagagaagaggcgggggctgtacctcacagtcccccagtgtcctctggagaaaccagggtccccctcagccacccctgccccagggggtggtgcagatgaccccgtgtagctcggggcttggtgccgcccacggctttggccctggggtctgggggccccgctggggtggaggcccaggcagaaccctgcatggaccctgacttgggtcccgtcgtgagcagaaaggcccggggaggatgacggcccaggccctggttctctgcccagcgaagcaggagtagctgccgggccccacgagcctccgtccgttctggttcgggtttctccgagttttgctaccagccgaggctgtgcgggcaactgggtcagcctcccgtcaggagagaagccgcgtctgtgggacgaagaccgggcacccgccagagaggggaaggtaccaggttgcgtcctttcaggccccgcgttgttacaggacactcgctgggggccctgtgcccttgccggcggcaggttgcagccaccgcggcccaatgtcaccttcactcacagtctgagttcttgtccgcctgtcacgccctcaccaccctccccttccagccaccaccctttccgttccgctcgggccttcccagaagcgtcctgtgactctgggagaggtgacacctcactaaggggccgaccccatggagtaacgcgcccggccccgatgcgaatcaggcctcccctacatctgggggcgttggccgcgagattcccattgacacctttgtttcgtgtgcttttaaattcaggttaaatgttgcaataatctgatgcagaagactcagcttctcaagggagagggagggggcggagcggaataaatagtaacttatttaagaaa

SEQ ID NO: 113269 - DNA, 8069 bp, Homo sapiens
  Payload ID: 2146
  Gene Symbol: CACNA1H
  Gene Name: calcium channel, voltage-dependent, T type, alpha 1H subunit
  Uniprot ID: O95180
  ENST ID: ENST00000358590
  CDS Start-End: 249-7292
cgaggccgccgccgtcgcctccgccgggcgagccggagccggagtcgagccgcggccgggagccgggcgggctggggacgcgggccgggggcggaggcgctgggggccggggccggggccgggggcggaggcgctgggggccggggccggggccgggcgccgagcggggtccgcggtgaccgcgccgcccgggcgatgcccgcggggacgccgccggccagcagagcgaggtgctgccggccgccaccatgaccgagggcgcacgggccgccgacgaggtccgggtgcccctgggcgcgccgccccctggccctgcggcgttggtgggggcgtccccggagagccccggggcgccgggacgcgaggcggagcgggggtccgagctcggcgtgtcaccctccgagagcccggcggccgagcgcggcgcggagctgggtgccgacgaggagcagcgcgtcccgtacccggccttggcggccacggtcttcttctgcctcggtcagaccacgcggccgcgcagctggtgcctccggctggtctgcaacccatggttcgagcacgtgagcatgctggtaatcatgctcaactgcgtgaccctgggcatgttccggccctgtgaggacgttgagtgcggctccgagcgctgcaacatcctggaggcctttgacgccttcattttcgccttttttgcggtggagatggtcatcaagatggtggccttggggctgttcgggcagaagtgttacctgggtgacacgtggaacaggctggatttcttcatcgtcgtggcgggcatgatggagtactcgttggacggacacaacgtgagcctctcggctatcaggaccgtgcgggtgctgcggcccctccgcgccatcaaccgcgtgcctagcatgcggatcctggtcactctgctgctggatacgctgcccatgctcgggaacgtccttctgctgtgcttcttcgtcttcttcattttcggcatcgttggcgtccagctctgggctggcctcctgcggaaccgctgcttcctggacagtgcctttgtcaggaacaacaacctgaccttcctgcggccgtactaccagacggaggagggcgaggagaacccgttcatctgctcctcacgccgagacaacggcatgcagaagtgctcgcacatccccggccgccgcgagctgcgcatgccctgcaccctgggctgggaggcctacacgcagccgcaggccgagggggtgggcgctgcacgcaacgcctgcatcaactggaaccagtactacaacgtgtgccgctcgggtgactccaacccccacaacggtgccatcaacttcgacaacatcggctacgcctggattgccatcttccaggtgatcacgctggaaggctgggtggacatcatgtactacgtcatggacgcccactcattctacaacttcatctatttcatcctgctcatcatcgtgggctccttcttcatgatcaacctgtgcctggtggtgattgccacgcagttctcggagacgaagcagcgggagagtcagctgatgcgggagcagcgggcacgccacctgtccaacgacagcacgctggccagcttctccgagcctggcagctgctacgaagagctgctgaagtacgtgggccacatattccgcaaggtcaagcggcgcagcttgcgcctctacgcccgctggcagagccgctggcgcaagaaggtggaccccagtgctgtgcaaggccagggtcccgggcaccgccagcgccgggcaggcaggcacacagcctcggtgcaccacctggtctaccaccaccatcaccaccaccaccaccactaccatttcagccatggcagcccccgcaggcccggccccgagccaggcgcctgcgacaccaggctggtccgagctggcgcgcccccctcgccaccttccccaggccgcggaccccccgacgcagagtctgtgcacagcatctaccatgccgactgccacatagaggggccgcaggagagggcccgggtggcacatgccgcagccactgccgctgccagcctcagactggccacagggctgggcaccatgaactaccccacgatcctgccctcaggggtgggcagcggcaaaggcagcaccagccccggacccaaggggaagtgggccggtggaccgccaggcaccggggggcacggcccgttgagcttgaacagccctgatccctacgagaagatcccgcatgtggtcggggagcatggactgggccaggcccctggccatctgtcgggcctcagtgtgccctgccccctgcccagccccccagcgggcacactgacctgtgagctgaagagctgcccgtactgcacccgtgccctggaggacccggagggtgagctcagcggctcggaaagtggagactcagatggccgtggcgtctatgaattcacgcaggacgtccggcacggtgaccgctgggaccccacgcgaccaccccgtgcgacggacacaccaggcccaggcccaggcagcccccagcggcgggcacagcagagggcagccccgggcgagccaggctggatgggccgcctctgggttaccttcagcggcaagctgcgccgcatcgtggacagcaagtacttcagccgtggcatcatgatggccatccttgtcaacacgctgagcatgggcgtggagtaccatgagcagcccgaggagctgactaatgctctggagatcagcaacatcgtgttcaccagcatgtttgccctggagatgctgctgaagctgctggcctgcggccctctgggctacatccggaacccgtacaacatcttcgacggcatcatcgtggtcatcagcgtctgggagatcgtggggcaggcggacggtggcttgtctgtgctgcgcaccttccggctgctgcgtgtgctgaagctggtgcgctttctgccagccctgcggcgccagctcgtggtgctggtgaagaccatggacaacgtggctaccttctgcacgctgctcatgctcttcattttcatcttcagcatcctgggcatgcaccttttcggctgcaagttcagcctgaagacagacaccggagacaccgtgcctgacaggaagaacttcgactccctgctgtgggccatcgtcaccgtgttccagatcctgacccaggaggactggaacgtggtcctgtacaacggcatggcctccacctcctcctgggccgccctctacttcgtggccctcatgaccttcggcaactatgtgctcttcaacctgctggtggccatcctcgtggagggcttccaggcggagggcgatgccaacagatccgacacggacgaggacaagacgtcggtccacttcgaggaggacttccacaagctcagagaactccagaccacagagctgaagatgtgttccctggccgtgacccccaacgggcacctggagggacgaggcagcctgtcccctcccctcatcatgtgcacagctgccacgcccatgcctacccccaagagctcaccattcctggatgcagcccccagcctcccagactctcggcgtggcagcagcagctccggggacccgccactgggagaccagaagcctccggccagcctccgaagttctccctgtgccccctggggccccagtggcgcctggagcagccggcgctccagctggagcagcctgggccgtgcccccagcctcaagcgccgcggccagtgtggggaacgtgagtccctgctgtctggcgagggcaagggcagcaccgacgacgaagctgaggacggcagggccgcgcccgggccccgtgccaccccactgcggcgggccgagtccctggacccacggcccctgcggccggccgccctcccgcctaccaagtgccgcgatcgcgacgggcaggtggtggccctgcccagcgacttcttcctgcgcatcgacagccaccgtgaggatgcagccgagcttgacgacgactcggaggacagctgctgcctccgcctgcataaagtgctggagccctacaagccccagtggtgccggagccgcgaggcctgggccctctacctcttctccccacagaaccggttccgcgtctcctgccagaaggtcatcacacacaagatgtttgatcacgtggtcctcgtcttcatcttcctcaactgcgtcaccatcgccctggagaggcctgacattgatcccggcagcaccgagcgggtcttcctcagcgtctccaattacatcttcacggccatcttcgtggcggagatgatggtgaaggtggtggccctggggctgctgtccggcgagcacgcctacctgcagagcagctggaacctgctggatgggctgctggtgctggtgtccctggtggacattgtcgtggccatggcctcggctggtggcgccaagatcctgggtgttctgcgcgtgctgcgtctgctgcggaccctgcggcctctgagggtcatcagccgggccccgggcctcaagctggtggtggagacgctgatatcatcactcaggcccattgggaacatcgtcctcatctgctgcgccttcttcatcatttttggcattttgggtgtgcagctcttcaaagggaagttctactactgcgagggccccgacaccaggaacatctccaccaaggcacagtgccgggccgcccactaccgctgggtgcgacgcaagtacaacttcgacaacctgggccaggccctgatgtcgctgttcgtgctgtcatccaaggatggatgggtgaacatcatgtacgacgggctggatgccgtgggtgtcgaccagcagcctgtgcagaaccacaacccctggatgctgctgtacttcatctccttcctgctcatcgtcagcttcttcgtgctcaacatgttcgtgggcgtcgtggtcgagaacttccacaagtgccggcagcaccaggaggcggaggaggcgcggcggcgagaggagaagcggctgcggcgcctagagaggaggcgcaggaaggcccagcgccggccctactatgccgactactcgcccacgcgccgctccattcactcgctgtgcaccagccactatctcgacctcttcatcaccttcatcatctgtgtcaacgtcatcaccatgtccatggagcactataaccaacccaagtcgctggacgaggccctcaagtactgcaactacgtcttcaccatcgtgtttgtcttcgaggctgcactgaagctggtagcatttgggttccgtcggttcttcaaggacaggtggaaccagctggacctggccatcgtgctgctgtcactcatgggcatcacgctggaggagatagagatgagcgccgcgctgcccatcaaccccaccatcatccgcatcatgcgcgtgcttcgcattgcccgtgtgctgaagctgctgaagatggctacgggcatgcgcgccctgctggacactgtggtgcaagctctcccccaggtggggaacctgggccttcttttcatgctcctgttttttatctatgctgcgctgggagtggagctgttcgggaggctggagtgcagtgaagacaacccctgcgagggcctgagcaggcacgccaccttcagcaacttcggcatggccttcctcacgctgttccgcgtgtccacgggggacaactggaacgggatcatgaaggacacgctgcgcgagtgctcccgtgaggacaagcactgcctgagctacctgccggccctgtcgcccgtctacttcgtgaccttcgtgctggtggcccagttcgtgctggtgaacgtggtggtggccgtgctcatgaagcacctggaggagagcaacaaggaggcacgggaggatgcggagctggacgccgagatcgagctggagatggcgcagggccccgggagtgcacgccgggtggacgcggacaggcctcccttgccccaggagagtccgggcgccagggacgccccaaacctggttgcacgcaaggtgtccgtgtccaggatgctctcgctgcccaacgacagctacatgttcaggcccgtggtgcctgcctcggcgccccacccccgcccgctgcaggaggtggagatggagacctatggggccggcacccccttgggctccgttgcctctgtgcactctccgcccgcagagtcctgtgcctccctccagatcccattggctgtgtcgtccccagccaggagcggcgagcccctccacgccctgtcccctcggggcacagcccgctcccccagtctcagccggctgctctgcagacaggaggctgtgcacaccgattccttggaagggaagattgacagccctagggacaccctggatcctgcagagcctggtgagaaaaccccggtgaggccggtgacccaggggggctccctgcagtccccaccacgctccccacggcccgccagcgtccgcactcgtaagcataccttcggacagcgctgcgtctccagccggccggcggccccaggcggagaggaggccgaggcctcggacccagccgacgaggaggtcagccacatcaccagctccgcctgcccctggcagcccacagccgagccccatggccccgaagcctctccggtggccggcggcgagcgggacctgcgcaggctctacagcgtggatgctcagggcttcctggacaagccgggccgggcagacgagcagtggcggccctcggcggagctgggcagcggggagcctggggaggcgaaggcctggggccctgaggccgagcccgctctgggtgcgcgcagaaagaagaagatgagccccccctgcatctcggtggaaccccctgcggaggacgagggctctgcgcggccctccgcggcagagggcggcagcaccacactgaggcgcaggaccccgtcctgtgaggccacgcctcacagggactccctggagcccacagagggctcaggcgccgggggggaccctgcagccaagggggagcgctggggccaggcctcctgccgggctgagcacctgaccgtccccagctttgcctttgagccgctggacctcggggtccccagtggagaccctttcttggacggtagccacagtgtgaccccagaatccagagcttcctcttcaggggccatagtgcccctggaacccccagaatcagagcctcccatgcccgtcggtgaccccccagagaagaggcgggggctgtacctcacagtcccccagtgtcctctggagaaaccagggtccccctcagccacccctgccccagggggtggtgcagatgaccccgtgtagctcggggcttggtgccgcccacggctttggccctggggtctgggggccccgctggggtggaggcccaggcagaaccctgcatggaccctgacttgggtcccgtcgtgagcagaaaggcccggggaggatgacggcccaggccctggttctctgcccagcgaagcaggagtagctgccgggccccacgagcctccgtccgttctggttcgggtttctccgagttttgctaccagccgaggctgtgcgggcaactgggtcagcctcccgtcaggagagaagccgcgtctgtgggacgaagaccgggcacccgccagagaggggaaggtaccaggttgcgtcctttcaggccccgcgttgttacaggacactcgctgggggccctgtgcccttgccggcggcaggttgcagccaccgcggcccaatgtcaccttcactcacagtctgagttcttgtccgcctgtcacgccctcaccaccctccccttccagccaccaccctttccgttccgctcgggccttcccagaagcgtcctgtgactctgggagaggtgacacctcactaaggggccgaccccatggagtaacgcgcccggccccgatgcgaatcaggcctcccctacatctgggggcgttggccgcgagattcccattgacacctttgtttcgtgtgcttttaaattcaggttaaatgttgcaataatctgatgcagaagactcagcttctcaagggagagggagggggcggagcggaataaatagtaacttatttaagaaatgc

SEQ ID NO: 113270 - DNA, 3325 bp, Homo sapiens
  Payload ID: 2146
  Gene Symbol: CACNA1H
  Gene Name: calcium channel, voltage-dependent, T type, alpha 1H subunit
  ENST ID: ENST00000562079
  CDS Start-End: 1-3235
gccctacaagccccagtggtgccggagccgcgaggcctgggccctctacctcttctccccacagaaccggttccgcgtctcctgccagaaggtcatcacacacaagatgtttgatcacgtggtcctcgtcttcatcttcctcaactgcgtcaccatcgccctggagaggcctgacattgatcccggcagcaccgagcgggtcttcctcagcgtctccaattacatcttcacggccatcttcgtggcggagatgatggtgaaggtggtggccctggggctgctgtccggcgagcacgcctacctgcagagcagctggaacctgctggatgggctgctggtgctggtgtccctggtggacattgtcgtggccatggcctcggctggtggcgccaagatcctgggtgttctgcgcgtgctgcgtctgctgcggaccctgcggcctctgagggtcatcagccgggccccgggcctcaagctggtggtggagacgctgatatcatcactcaggcccattgggaacatcgtcctcatctgctgcgccttcttcatcatttttggcattttgggtgtgcagctcttcaaagggaagttctactactgcgagggccccgacaccaggaacatctccaccaaggcacagtgccgggccgcccactaccgctgggtgcgacgcaagtacaacttcgacaacctgggccaggccctgatgtcgctgttcgtgctgtcatccaaggatggatgggtgaacatcatgtacgacgggctggatgccgtgggtgtcgaccagcagcctgtgcagaaccacaacccctggatgctgctgtacttcatctccttcctgctcatcgtcagcttcttcgtgctcaacatgttcgtgggcgtcgtggtcgagaacttccacaagtgccggcagcaccaggaggcggaggaggcgcggcggcgagaggagaagcggctgcggcgcctagagaggaggcgcaggaaggcccagcgccggccctactatgccgactactcgcccacgcgccgctccattcactcgctgtgcaccagccactatctcgacctcttcatcaccttcatcatctgtgtcaacgtcatcaccatgtccatggagcactataaccaacccaagtcgctggacgaggccctcaagtactgcaactacgtcttcaccatcgtgtttgtcttcgaggctgcactgaagctggtagcatttgggttccgtcggttcttcaaggacaggtggaaccagctggacctggccatcgtgctgctgtcactcatgggcatcacgctggaggagatagagatgagcgccgcgctgcccatcaaccccaccatcatccgcatcatgcgcgtgcttcgcattgcccgtgtgctgaagctgctgaagatggctacgggcatgcgcgccctgctggacactgtggtgcaagctctcccccaggtggggaacctgggccttcttttcatgctcctgttttttatctatgctgcgctgggagtggagctgttcgggaggctggagtgcagtgaagacaacccctgcgagggcctgagcaggcacgccaccttcagcaacttcggcatggccttcctcacgctgttccgcgtgtccacgggggacaactggaacgggatcatgaaggacacgctgcgcgagtgctcccgtgaggacaagcactgcctgagctacctgccggccctgtcgcccgtctacttcgtgaccttcgtgctggtggcccagttcgtgctggtgaacgtggtggtggccgtgctcatgaagcacctggaggagagcaacaaggaggcacgggaggatgcggagctggacgccgagatcgagctggagatggcgcagggccccgggagtgcacgccgggtggacgcggacaggcctcccttgccccaggagagtccgggcgccagggacgccccaaacctggttgcacgcaaggtgtccgtgtccaggatgctctcgctgcccaacgacagctacatgttcaggcccgtggtgcctgcctcggcgccccacccccgcccgctgcaggaggtggagatggagacctatggggccggcacccccttggagtcctgtgcctccctccagatcccattggctgtgtcgtccccagccaggagcggcgagcccctccacgccctgtcccctcggggcacagcccgctcccccagtctcagccggctgctctgcagacaggaggctgtgcacaccgattccttggaagggaagattgacagccctagggacaccctggatcctgcagagcctggtgagaaaaccccggtgaggccggtgacccaggggggctccctgcagtccccaccacgctccccacggcccgccagcgtccgcactcgtaagcataccttcggacagcgctgcgtctccagccggccggcggccccaggcggagaggaggccgaggcctcggacccagccgacgaggaggtcagccacatcaccagctccgcctgcccctggcagcccacagccgagccccatggccccgaagcctctccggtggccggcggcgagcgggacctgcgcaggctctacagcgtggatgctcagggcttcctggacaagccgggccgggcagacgagcagtggcggccctcggcggagctgggcagcggggagcctggggaggcgaaggcctggggccctgaggccgagcccgctctgggtgcgcgcagaaagaagaagatgagccccccctgcatctcggtggaaccccctgcggaggacgagggctctgcgcggccctccgcggcagagggcggcagcaccacactgaggcgcaggaccccgtcctgtgaggccacgcctcacagggactccctggagcccacagagggctcaggcgccgggggggaccctgcagccaagggggagcgctggggccaggcctcctgccgggctgagcacctgaccgtccccagctttgcctttgagccgctggacctcggggtccccagtggagaccctttcttggacggtagccacagtgtgaccccagaatccagagcttcctcttcaggggccatagtgcccctggaacccccagaatcagagcctcccatgcccgtcggtgaccccccagagaagaggcgggggctgtacctcacagtcccccagtgtcctctggagaaaccagggtccccctcagccacccctgccccagggggtggtgcagatgaccccgtgtagctcggggcttggtgccgcccacggctttggccctggggtctgggggccccgctggggtggaggcccaggcagaaccctgcatggaccctg

SEQ ID NO: 113271 - DNA, 3391 bp, Homo sapiens
  Payload ID: 2146
  Gene Symbol: CACNA1H
  Gene Name: calcium channel, voltage-dependent, T type, alpha 1H subunit
  ENST ID: ENST00000569107
  CDS Start-End: 1-3301
gccctacaagccccagtggtgccggagccgcgaggcctgggccctctacctcttctccccacagaaccggttccgcgtctcctgccagaaggtcatcacacacaagatgtttgatcacgtggtcctcgtcttcatcttcctcaactgcgtcaccatcgccctggagaggcctgacattgatcccggcagcaccgagcgggtcttcctcagcgtctccaattacatcttcacggccatcttcgtggcggagatgatggtgaaggtggtggccctggggctgctgtccggcgagcacgcctacctgcagagcagctggaacctgctggatgggctgctggtgctggtgtccctggtggacattgtcgtggccatggcctcggctggtggcgccaagatcctgggtgttctgcgcgtgctgcgtctgctgcggaccctgcggcctctgagggtcatcagccgggccccgggcctcaagctggtggtggagacgctgatatcatcactcaggcccattgggaacatcgtcctcatctgctgcgccttcttcatcatttttggcattttgggtgtgcagctcttcaaagggaagttctactactgcgagggccccgacaccaggaacatctccaccaaggcacagtgccgggccgcccactaccgctgggtgcgacgcaagtacaacttcgacaacctgggccaggccctgatgtcgctgttcgtgctgtcatccaaggatggatgggtgaacatcatgtacgacgggctggatgccgtgggtgtcgaccagcagcctgtgcagaaccacaacccctggatgctgctgtacttcatctccttcctgctcatcgtcagcttcttcgtgctcaacatgttcgtgggcgtcgtggtcgagaacttccacaagtgccggcagcaccaggaggcggaggaggcgcggcggcgagaggagaagcggctgcggcgcctagagaggaggcgcaggagtaaggcgctcccggtggcggtggcggtggcggaggcccagcgccggccctactatgccgactactcgcccacgcgccgctccattcactcgctgtgcaccagccactatctcgacctcttcatcaccttcatcatctgtgtcaacgtcatcaccatgtccatggagcactataaccaacccaagtcgctggacgaggccctcaagtactgcaactacgtcttcaccatcgtgtttgtcttcgaggctgcactgaagctggtagcatttgggttccgtcggttcttcaaggacaggtggaaccagctggacctggccatcgtgctgctgtcactcatgggcatcacgctggaggagatagagatgagcgccgcgctgcccatcaaccccaccatcatccgcatcatgcgcgtgcttcgcattgcccgtgtgctgaagctgctgaagatggctacgggcatgcgcgccctgctggacactgtggtgcaagctctcccccaggtggggaacctgggccttcttttcatgctcctgttttttatctatgctgcgctgggagtggagctgttcgggaggctggagtgcagtgaagacaacccctgcgagggcctgagcaggcacgccaccttcagcaacttcggcatggccttcctcacgctgttccgcgtgtccacgggggacaactggaacgggatcatgaaggacacgctgcgcgagtgctcccgtgaggacaagcactgcctgagctacctgccggccctgtcgcccgtctacttcgtgaccttcgtgctggtggcccagttcgtgctggtgaacgtggtggtggccgtgctcatgaagcacctggaggagagcaacaaggaggcacgggaggatgcggagctggacgccgagatcgagctggagatggcgcagggccccgggagtgcacgccgggtggacgcggacaggcctcccttgccccaggagagtccgggcgccagggacgccccaaacctggttgcacgcaaggtgtccgtgtccaggatgctctcgctgcccaacgacagctacatgttcaggcccgtggtgcctgcctcggcgccccacccccgcccgctgcaggaggtggagatggagacctatggggccggcacccccttgggctccgttgcctctgtgcactctccgcccgcagagtcctgtgcctccctccagatcccattggctgtgtcgtccccagccaggagcggcgagcccctccacgccctgtcccctcggggcacagcccgctcccccagtctcagccggctgctctgcagacaggaggctgtgcacaccgattccttggaagggaagattgacagccctagggacaccctggatcctgcagagcctggtgagaaaaccccggtgaggccggtgacccaggggggctccctgcagtccccaccacgctccccacggcccgccagcgtccgcactcgtaagcataccttcggacagcgctgcgtctccagccggccggcggccccaggcggagaggaggccgaggcctcggacccagccgacgaggaggtcagccacatcaccagctccgcctgcccctggcagcccacagccgagccccatggccccgaagcctctccggtggccggcggcgagcgggacctgcgcaggctctacagcgtggatgctcagggcttcctggacaagccgggccgggcagacgagcagtggcggccctcggcggagctgggcagcggggagcctggggaggcgaaggcctggggccctgaggccgagcccgctctgggtgcgcgcagaaagaagaagatgagccccccctgcatctcggtggaaccccctgcggaggacgagggctctgcgcggccctccgcggcagagggcggcagcaccacactgaggcgcaggaccccgtcctgtgaggccacgcctcacagggactccctggagcccacagagggctcaggcgccgggggggaccctgcagccaagggggagcgctggggccaggcctcctgccgggctgagcacctgaccgtccccagctttgcctttgagccgctggacctcggggtccccagtggagaccctttcttggacggtagccacagtgtgaccccagaatccagagcttcctcttcaggggccatagtgcccctggaacccccagaatcagagcctcccatgcccgtcggtgaccccccagagaagaggcgggggctgtacctcacagtcccccagtgtcctctggagaaaccagggtccccctcagccacccctgccccagggggtggtgcagatgaccccgtgtagctcggggcttggtgccgcccacggctttggccctggggtctgggggccccgctggggtggaggcccaggcagaaccctgcatggaccctg

SEQ ID NO: 113272 - DNA, 3464 bp, Homo sapiens
  Payload ID: 2146
  Gene Symbol: CACNA1H
  Gene Name: calcium channel, voltage-dependent, T type, alpha 1H subunit
  ENST ID: ENST00000564927
  CDS Start-End: 1-2693
tcttcaaagggaagttctactactgcgagggccccgacaccaggaacatctccaccaaggcacagtgccgggccgcccactaccgctgggtgcgacgcaagtacaacttcgacaacctgggccaggccctgatgtcgctgttcgtgctgtcatccaaggatggatgggtgaacatcatgtacgacgggctggatgccgtgggtgtcgaccagcagcctgtgcagaaccacaacccctggatgctgctgtacttcatctccttcctgctcatcgtcagcttcttcgtgctcaacatgttcgtgggcgtcgtggtcgagaacttccacaagtgccggcagcaccaggaggcggaggaggcgcggcggcgagaggagaagcggctgcggcgcctagagaggaggcgcaggaaggcccagcgccggccctactatgccgactactcgcccacgcgccgctccattcactcgctgtgcaccagccactatctcgacctcttcatcaccttcatcatctgtgtcaacgtcatcaccatgtccatggagcactataaccaacccaagtcgctggacgaggccctcaagtactgcaactacgtcttcaccatcgtgtttgtcttcgaggctgcactgaagctggtagcatttgggttccgtcggttcttcaaggacaggtggaaccagctggacctggccatcgtgctgctgtcactcatgggcatcacgctggaggagatagagatgagcgccgcgctgcccatcaaccccaccatcatccgcatcatgcgcgtgcttcgcattgcccgtgtgctgaagctgctgaagatggctacgggcatgcgcgccctgctggacactgtggtgcaagctctcccccaggtggggaacctgggccttcttttcatgctcctgttttttatctatgctgcgctgggagtggagctgttcgggaggctggagtgcagtgaagacaacccctgcgagggcctgagcaggcacgccaccttcagcaacttcggcatggccttcctcacgctgttccgcgtgtccacgggggacaactggaacgggatcatgaaggacacgctgcgcgagtgctcccgtgaggacaagcactgcctgagctacctgccggccctgtcgcccgtctacttcgtgaccttcgtgctggtggcccagttcgtgctggtgaacgtggtggtggccgtgctcatgaagcacctggaggagagcaacaaggaggcacgggaggatgcggagctggacgccgagatcgagctggagatggcgcagggccccgggagtgcacgccgggtggacgcggacaggcctcccttgccccaggagagtccgggcgccagggacgccccaaacctggttgcacgcaaggtgtccgtgtccaggatgctctcgctgcccaacgacagctacatgttcaggcccgtggtgcctgcctcggcgccccacccccgcccgctgcaggaggtggagatggagacctatggggccggcacccccttgggctccgttgcctctgtgcactctccgcccgcagagtcctgtgcctccctccagatcccattggctgtgtcgtccccagccaggagcggcgagcccctccacgccctgtcccctcggggcacagcccgctcccccagtctcagccggctgctctgcagacaggaggctgtgcacaccgattccttggaagggaagattgacagccctagggacaccctggatcctgcagagcctggtgagaaaaccccggtgaggccggtgacccaggggggctccctgcagtccccaccacgctccccacggcccgccagcgtccgcactcgtaagcataccttcggacagcgctgcgtctccagccggccggcggccccaggcggagaggaggccgaggcctcggacccagccgacgaggaggtcagccacatcaccagctccgcctgcccctggcagcccacagccgagccccatggccccgaagcctctccggtggccggcggcgagcgggacctgcgcaggctctacagcgtggatgctcagggcttcctggacaagccgggccgggcagacgagcagtggcggccctcggcggagctgggcagcggggagcctggggaggcgaaggcctggggccctgaggccgagcccgctctgggtgcgcgcagaaagaagaagatgagccccccctgcatctcggtggaaccccctgcggaggacgagggctctgcgcggccctccgcggcagagggcggcagcaccacactgaggcgcaggaccccgtcctgtgaggccacgcctcacagggactccctggagcccacagagggctcaggcgccgggggggaccctgcagccaagggggagcgctggggccaggcctcctgccgggctgagcacctgaccgtccccagctttgcctttgagccgctggacctcggggtccccagtggagaccctttcttggacggtagccacagtgtgaccccagaatccagagcttcctcttcaggggccatagtgcccctggaacccccagaatcagagcctcccatgcccgtcggtgaccccccagagaagaggcgggggctgtacctcacagtcccccagtgtcctctggagaaaccagggtccccctcagccacccctgccccagggggtggtgcagatgaccccgtgtagctcggggcttggtgccgcccacggctttggccctggggtctgggggccccgctggggtggaggcccaggcagaaccctgcatggaccctgacttgggtcccgtcgtgagcagaaaggcccggggaggatgacggcccaggccctggttctctgcccagcgaagcaggagtagctgccgggccccacgagcctccgtccgttctggttcgggtttctccgagttttgctaccagccgaggctgtgcgggcaactgggtcagcctcccgtcaggagagaagccgcgtctgtgggacgaagaccgggcacccgccagagaggggaaggtaccaggttgcgtcctttcaggccccgcgttgttacaggacactcgctgggggccctgtgcccttgccggcggcaggttgcagccaccgcggcccaatgtcaccttcactcacagtctgagttcttgtccgcctgtcacgccctcaccaccctccccttccagccaccaccctttccgttccgctcgggccttcccagaagcgtcctgtgactctgggagaggtgacacctcactaaggggccgaccccatggagtaacgcgcccggccccgatgcgaatcaggcctcccctacatctgggggcgttggccgcgagattcccattgacacctttgtttcgtgtgcttttaaattcaggttaaatgttgcaataatctgatgcagaagactcagcttctcaagggagagggagggggcggagcggaataaatagtaacttatttaag

SEQ ID NO: 113273 - DNA, 7134 bp, Homo sapiens
  Payload ID: 2146
  Gene Symbol: CACNA1H
  Gene Name: calcium channel, voltage-dependent, T type, alpha 1H subunit
  Uniprot ID: O95180
  ENST ID: ENST00000565831
  CDS Start-End: 1-7044
atgaccgagggcgcacgggccgccgacgaggtccgggtgcccctgggcgcgccgccccctggccctgcggcgttggtgggggcgtccccggagagccccggggcgccgggacgcgaggcggagcgggggtccgagctcggcgtgtcaccctccgagagcccggcggccgagcgcggcgcggagctgggtgccgacgaggagcagcgcgtcccgtacccggccttggcggccacggtcttcttctgcctcggtcagaccacgcggccgcgcagctggtgcctccggctggtctgcaacccatggttcgagcacgtgagcatgctggtaatcatgctcaactgcgtgaccctgggcatgttccggccctgtgaggacgttgagtgcggctccgagcgctgcaacatcctggaggcctttgacgccttcattttcgccttttttgcggtggagatggtcatcaagatggtggccttggggctgttcgggcagaagtgttacctgggtgacacgtggaacaggctggatttcttcatcgtcgtggcgggcatgatggagtactcgttggacggacacaacgtgagcctctcggctatcaggaccgtgcgggtgctgcggcccctccgcgccatcaaccgcgtgcctagcatgcggatcctggtcactctgctgctggatacgctgcccatgctcgggaacgtccttctgctgtgcttcttcgtcttcttcattttcggcatcgttggcgtccagctctgggctggcctcctgcggaaccgctgcttcctggacagtgcctttgtcaggaacaacaacctgaccttcctgcggccgtactaccagacggaggagggcgaggagaacccgttcatctgctcctcacgccgagacaacggcatgcagaagtgctcgcacatccccggccgccgcgagctgcgcatgccctgcaccctgggctgggaggcctacacgcagccgcaggccgagggggtgggcgctgcacgcaacgcctgcatcaactggaaccagtactacaacgtgtgccgctcgggtgactccaacccccacaacggtgccatcaacttcgacaacatcggctacgcctggattgccatcttccaggtgatcacgctggaaggctgggtggacatcatgtactacgtcatggacgcccactcattctacaacttcatctatttcatcctgctcatcatcgtgggctccttcttcatgatcaacctgtgcctggtggtgattgccacgcagttctcggagacgaagcagcgggagagtcagctgatgcgggagcagcgggcacgccacctgtccaacgacagcacgctggccagcttctccgagcctggcagctgctacgaagagctgctgaagtacgtgggccacatattccgcaaggtcaagcggcgcagcttgcgcctctacgcccgctggcagagccgctggcgcaagaaggtggaccccagtgctgtgcaaggccagggtcccgggcaccgccagcgccgggcaggcaggcacacagcctcggtgcaccacctggtctaccaccaccatcaccaccaccaccaccactaccatttcagccatggcagcccccgcaggcccggccccgagccaggcgcctgcgacaccaggctggtccgagctggcgcgcccccctcgccaccttccccaggccgcggaccccccgacgcagagtctgtgcacagcatctaccatgccgactgccacatagaggggccgcaggagagggcccgggtggcacatgccgcagccactgccgctgccagcctcagactggccacagggctgggcaccatgaactaccccacgatcctgccctcaggggtgggcagcggcaaaggcagcaccagccccggacccaaggggaagtgggccggtggaccgccaggcaccggggggcacggcccgttgagcttgaacagccctgatccctacgagaagatcccgcatgtggtcggggagcatggactgggccaggcccctggccatctgtcgggcctcagtgtgccctgccccctgcccagccccccagcgggcacactgacctgtgagctgaagagctgcccgtactgcacccgtgccctggaggacccggagggtgagctcagcggctcggaaagtggagactcagatggccgtggcgtctatgaattcacgcaggacgtccggcacggtgaccgctgggaccccacgcgaccaccccgtgcgacggacacaccaggcccaggcccaggcagcccccagcggcgggcacagcagagggcagccccgggcgagccaggctggatgggccgcctctgggttaccttcagcggcaagctgcgccgcatcgtggacagcaagtacttcagccgtggcatcatgatggccatccttgtcaacacgctgagcatgggcgtggagtaccatgagcagcccgaggagctgactaatgctctggagatcagcaacatcgtgttcaccagcatgtttgccctggagatgctgctgaagctgctggcctgcggccctctgggctacatccggaacccgtacaacatcttcgacggcatcatcgtggtcatcagcgtctgggagatcgtggggcaggcggacggtggcttgtctgtgctgcgcaccttccggctgctgcgtgtgctgaagctggtgcgctttctgccagccctgcggcgccagctcgtggtgctggtgaagaccatggacaacgtggctaccttctgcacgctgctcatgctcttcattttcatcttcagcatcctgggcatgcaccttttcggctgcaagttcagcctgaagacagacaccggagacaccgtgcctgacaggaagaacttcgactccctgctgtgggccatcgtcaccgtgttccagatcctgacccaggaggactggaacgtggtcctgtacaacggcatggcctccacctcctcctgggccgccctctacttcgtggccctcatgaccttcggcaactatgtgctcttcaacctgctggtggccatcctcgtggagggcttccaggcggagggcgatgccaacagatccgacacggacgaggacaagacgtcggtccacttcgaggaggacttccacaagctcagagaactccagaccacagagctgaagatgtgttccctggccgtgacccccaacgggcacctggagggacgaggcagcctgtcccctcccctcatcatgtgcacagctgccacgcccatgcctacccccaagagctcaccattcctggatgcagcccccagcctcccagactctcggcgtggcagcagcagctccggggacccgccactgggagaccagaagcctccggccagcctccgaagttctccctgtgccccctggggccccagtggcgcctggagcagccggcgctccagctggagcagcctgggccgtgcccccagcctcaagcgccgcggccagtgtggggaacgtgagtccctgctgtctggcgagggcaagggcagcaccgacgacgaagctgaggacggcagggccgcgcccgggccccgtgccaccccactgcggcgggccgagtccctggacccacggcccctgcggccggccgccctcccgcctaccaagtgccgcgatcgcgacgggcaggtggtggccctgcccagcgacttcttcctgcgcatcgacagccaccgtgaggatgcagccgagcttgacgacgactcggaggacagctgctgcctccgcctgcataaagtgctggagccctacaagccccagtggtgccggagccgcgaggcctgggccctctacctcttctccccacagaaccggttccgcgtctcctgccagaaggtcatcacacacaagatgtttgatcacgtggtcctcgtcttcatcttcctcaactgcgtcaccatcgccctggagaggcctgacattgatcccggcagcaccgagcgggtcttcctcagcgtctccaattacatcttcacggccatcttcgtggcggagatgatggtgaaggtggtggccctggggctgctgtccggcgagcacgcctacctgcagagcagctggaacctgctggatgggctgctggtgctggtgtccctggtggacattgtcgtggccatggcctcggctggtggcgccaagatcctgggtgttctgcgcgtgctgcgtctgctgcggaccctgcggcctctgagggtcatcagccgggccccgggcctcaagctggtggtggagacgctgatatcatcactcaggcccattgggaacatcgtcctcatctgctgcgccttcttcatcatttttggcattttgggtgtgcagctcttcaaagggaagttctactactgcgagggccccgacaccaggaacatctccaccaaggcacagtgccgggccgcccactaccgctgggtgcgacgcaagtacaacttcgacaacctgggccaggccctgatgtcgctgttcgtgctgtcatccaaggatggatgggtgaacatcatgtacgacgggctggatgccgtgggtgtcgaccagcagcctgtgcagaaccacaacccctggatgctgctgtacttcatctccttcctgctcatcgtcagcttcttcgtgctcaacatgttcgtgggcgtcgtggtcgagaacttccacaagtgccggcagcaccaggaggcggaggaggcgcggcggcgagaggagaagcggctgcggcgcctagagaggaggcgcaggaaggcccagcgccggccctactatgccgactactcgcccacgcgccgctccattcactcgctgtgcaccagccactatctcgacctcttcatcaccttcatcatctgtgtcaacgtcatcaccatgtccatggagcactataaccaacccaagtcgctggacgaggccctcaagtactgcaactacgtcttcaccatcgtgtttgtcttcgaggctgcactgaagctggtagcatttgggttccgtcggttcttcaaggacaggtggaaccagctggacctggccatcgtgctgctgtcactcatgggcatcacgctggaggagatagagatgagcgccgcgctgcccatcaaccccaccatcatccgcatcatgcgcgtgcttcgcattgcccgtgtgctgaagctgctgaagatggctacgggcatgcgcgccctgctggacactgtggtgcaagctctcccccaggtggggaacctgggccttcttttcatgctcctgttttttatctatgctgcgctgggagtggagctgttcgggaggctggagtgcagtgaagacaacccctgcgagggcctgagcaggcacgccaccttcagcaacttcggcatggccttcctcacgctgttccgcgtgtccacgggggacaactggaacgggatcatgaaggacacgctgcgcgagtgctcccgtgaggacaagcactgcctgagctacctgccggccctgtcgcccgtctacttcgtgaccttcgtgctggtggcccagttcgtgctggtgaacgtggtggtggccgtgctcatgaagcacctggaggagagcaacaaggaggcacgggaggatgcggagctggacgccgagatcgagctggagatggcgcagggccccgggagtgcacgccgggtggacgcggacaggcctcccttgccccaggagagtccgggcgccagggacgccccaaacctggttgcacgcaaggtgtccgtgtccaggatgctctcgctgcccaacgacagctacatgttcaggcccgtggtgcctgcctcggcgccccacccccgcccgctgcaggaggtggagatggagacctatggggccggcacccccttgggctccgttgcctctgtgcactctccgcccgcagagtcctgtgcctccctccagatcccattggctgtgtcgtccccagccaggagcggcgagcccctccacgccctgtcccctcggggcacagcccgctcccccagtctcagccggctgctctgcagacaggaggctgtgcacaccgattccttggaagggaagattgacagccctagggacaccctggatcctgcagagcctggtgagaaaaccccggtgaggccggtgacccaggggggctccctgcagtccccaccacgctccccacggcccgccagcgtccgcactcgtaagcataccttcggacagcgctgcgtctccagccggccggcggccccaggcggagaggaggccgaggcctcggacccagccgacgaggaggtcagccacatcaccagctccgcctgcccctggcagcccacagccgagccccatggccccgaagcctctccggtggccggcggcgagcgggacctgcgcaggctctacagcgtggatgctcagggcttcctggacaagccgggccgggcagacgagcagtggcggccctcggcggagctgggcagcggggagcctggggaggcgaaggcctggggccctgaggccgagcccgctctgggtgcgcgcagaaagaagaagatgagccccccctgcatctcggtggaaccccctgcggaggacgagggctctgcgcggccctccgcggcagagggcggcagcaccacactgaggcgcaggaccccgtcctgtgaggccacgcctcacagggactccctggagcccacagagggctcaggcgccgggggggaccctgcagccaagggggagcgctggggccaggcctcctgccgggctgagcacctgaccgtccccagctttgcctttgagccgctggacctcggggtccccagtggagaccctttcttggacggtagccacagtgtgaccccagaatccagagcttcctcttcaggggccatagtgcccctggaacccccagaatcagagcctcccatgcccgtcggtgaccccccagagaagaggcgggggctgtacctcacagtcccccagtgtcctctggagaaaccagggtccccctcagccacccctgccccagggggtggtgcagatgaccccgtgtagctcggggcttggtgccgcccacggctttggccctggggtctgggggccccgctggggtggaggcccaggcagaaccctgcatggaccctg

SEQ ID NO: 113274 - DNA, 3343 bp, Homo sapiens
  Payload ID: 2146
  Gene Symbol: CACNA1H
  Gene Name: calcium channel, voltage-dependent, T type, alpha 1H subunit
  ENST ID: ENST00000564231
  CDS Start-End: 1-3253
gccctacaagccccagtggtgccggagccgcgaggcctgggccctctacctcttctccccacagaaccggttccgcgtctcctgccagaaggtcatcacacacaagatgtttgatcacgtggtcctcgtcttcatcttcctcaactgcgtcaccatcgccctggagaggcctgacattgatcccggcagcaccgagcgggtcttcctcagcgtctccaattacatcttcacggccatcttcgtggcggagatgatggtgaaggtggtggccctggggctgctgtccggcgagcacgcctacctgcagagcagctggaacctgctggatgggctgctggtgctggtgtccctggtggacattgtcgtggccatggcctcggctggtggcgccaagatcctgggtgttctgcgcgtgctgcgtctgctgcggaccctgcggcctctgagggtcatcagccgggccccgggcctcaagctggtggtggagacgctgatatcatcactcaggcccattgggaacatcgtcctcatctgctgcgccttcttcatcatttttggcattttgggtgtgcagctcttcaaagggaagttctactactgcgagggccccgacaccaggaacatctccaccaaggcacagtgccgggccgcccactaccgctgggtgcgacgcaagtacaacttcgacaacctgggccaggccctgatgtcgctgttcgtgctgtcatccaaggatggatgggtgaacatcatgtacgacgggctggatgccgtgggtgtcgaccagcagcctgtgcagaaccacaacccctggatgctgctgtacttcatctccttcctgctcatcgtcagcttcttcgtgctcaacatgttcgtgggcgtcgtggtcgagaacttccacaagtgccggcagcaccaggaggcggaggaggcgcggcggcgagaggagaagcggctgcggcgcctagagaggaggcgcaggagcactttccccagcccagaggcccagcgccggccctactatgccgactactcgcccacgcgccgctccattcactcgctgtgcaccagccactatctcgacctcttcatcaccttcatcatctgtgtcaacgtcatcaccatgtccatggagcactataaccaacccaagtcgctggacgaggccctcaagtactgcaactacgtcttcaccatcgtgtttgtcttcgaggctgcactgaagctggtagcatttgggttccgtcggttcttcaaggacaggtggaaccagctggacctggccatcgtgctgctgtcactcatgggcatcacgctggaggagatagagatgagcgccgcgctgcccatcaaccccaccatcatccgcatcatgcgcgtgcttcgcattgcccgtgtgctgaagctgctgaagatggctacgggcatgcgcgccctgctggacactgtggtgcaagctctcccccaggtggggaacctgggccttcttttcatgctcctgttttttatctatgctgcgctgggagtggagctgttcgggaggctggagtgcagtgaagacaacccctgcgagggcctgagcaggcacgccaccttcagcaacttcggcatggccttcctcacgctgttccgcgtgtccacgggggacaactggaacgggatcatgaaggacacgctgcgcgagtgctcccgtgaggacaagcactgcctgagctacctgccggccctgtcgcccgtctacttcgtgaccttcgtgctggtggcccagttcgtgctggtgaacgtggtggtggccgtgctcatgaagcacctggaggagagcaacaaggaggcacgggaggatgcggagctggacgccgagatcgagctggagatggcgcagggccccgggagtgcacgccgggtggacgcggacaggcctcccttgccccaggagagtccgggcgccagggacgccccaaacctggttgcacgcaaggtgtccgtgtccaggatgctctcgctgcccaacgacagctacatgttcaggcccgtggtgcctgcctcggcgccccacccccgcccgctgcaggaggtggagatggagacctatggggccggcacccccttggagtcctgtgcctccctccagatcccattggctgtgtcgtccccagccaggagcggcgagcccctccacgccctgtcccctcggggcacagcccgctcccccagtctcagccggctgctctgcagacaggaggctgtgcacaccgattccttggaagggaagattgacagccctagggacaccctggatcctgcagagcctggtgagaaaaccccggtgaggccggtgacccaggggggctccctgcagtccccaccacgctccccacggcccgccagcgtccgcactcgtaagcataccttcggacagcgctgcgtctccagccggccggcggccccaggcggagaggaggccgaggcctcggacccagccgacgaggaggtcagccacatcaccagctccgcctgcccctggcagcccacagccgagccccatggccccgaagcctctccggtggccggcggcgagcgggacctgcgcaggctctacagcgtggatgctcagggcttcctggacaagccgggccgggcagacgagcagtggcggccctcggcggagctgggcagcggggagcctggggaggcgaaggcctggggccctgaggccgagcccgctctgggtgcgcgcagaaagaagaagatgagccccccctgcatctcggtggaaccccctgcggaggacgagggctctgcgcggccctccgcggcagagggcggcagcaccacactgaggcgcaggaccccgtcctgtgaggccacgcctcacagggactccctggagcccacagagggctcaggcgccgggggggaccctgcagccaagggggagcgctggggccaggcctcctgccgggctgagcacctgaccgtccccagctttgcctttgagccgctggacctcggggtccccagtggagaccctttcttggacggtagccacagtgtgaccccagaatccagagcttcctcttcaggggccatagtgcccctggaacccccagaatcagagcctcccatgcccgtcggtgaccccccagagaagaggcgggggctgtacctcacagtcccccagtgtcctctggagaaaccagggtccccctcagccacccctgccccagggggtggtgcagatgaccccgtgtagctcggggcttggtgccgcccacggctttggccctggggtctgggggccccgctggggtggaggcccaggcagaaccctgcatggaccctg

SEQ ID NO: 113275 - DNA, 6740 bp, Homo sapiens
  Payload ID: 2147
  Gene Symbol: CACNA1I
  Gene Name: calcium channel, voltage-dependent, T type, alpha 1I subunit
  Uniprot ID: Q9P0X4
  ENST ID: ENST00000401624
  CDS Start-End: 1-6051
atggctgagagcgcctccccgccctcctcatctgcagcagccccagccgctgagccaggagtcaccacggagcagcccggaccccggagccccccatcctccccgccaggcctggaggagcctctggatggagctgatcctcatgtcccacacccagacctggcgcctattgccttcttctgcctgcgacagaccaccagcccccggaactggtgcatcaagatggtgtgcaacccgtggtttgaatgtgtcagcatgctggtgatcctgctgaactgcgtgacacttggcatgtaccagccgtgcgacgacatggactgcctgtccgaccgctgcaagatcctgcaggtctttgatgacttcatctttatcttctttgccatggagatggtgctcaagatggtggccctggggatttttggcaagaagtgctacctcggggacacatggaaccgcctggatttcttcatcgtcatggcagggatggtcgagtactccctggaccttcagaacatcaacctgtcagccatccgcaccgtgcgcgtcctgaggcccctcaaagccatcaaccgcgtgcccagtatgcggatcctggtgaacctgctcctggacacactgcccatgctggggaatgtcctgctgctctgcttctttgtcttcttcatctttggcatcataggtgtgcagctctgggcgggcctgctgcgtaaccgctgcttcctggaggagaacttcaccatacaaggggatgtggccttgcccccatactaccagccggaggaggatgatgagatgcccttcatctgctccctgtcgggcgacaatgggataatgggctgccatgagatccccccgctcaaggagcagggccgtgagtgctgcctgtccaaggacgacgtctacgactttggggcggggcgccaggacctcaatgccagcggcctctgtgtcaactggaaccgttactacaatgtgtgccgcacgggcagcgccaacccccacaagggtgccatcaactttgacaacatcggttatgcttggattgtcatcttccaggtgatcactctggaaggctgggtggagatcatgtactacgtgatggatgctcactccttctacaacttcatctacttcatcctgcttatcatagtgggctccttcttcatgatcaacctgtgcctcgttgtcatagcgacccagttctcggagaccaagcaacgggagcaccggctgatgctggagcagcggcagcgctacctgtcctccagcacggtggccagctacgccgagcctggcgactgctacgaggagatcttccagtatgtctgccacatcctgcgcaaggccaagcgccgcgccctgggcctctaccaggccctgcagagccggcgccaggccctgggcccggaggccccggcccccgccaaacctgggccccacgccaaggagccccggcactaccatgggaagactaagggtcagggagatgaagggagacatctcggaagccggcattgccagactttgcatgggcctgcctcccctggaaatgatcactcgggaagagagctgtgcccgcaacatagccccctggatgcgacgccccacaccctggtgcagcccatccccgccacgctggcttccgatcccgccagctgcccttgctgccagcatgaggacggccggcggccctcgggcctgggcagcaccgactcgggccaggagggctcgggctccgggagctccgctggtggcgaggacgaggcggatggggacggggcccggagcagcgaggacggagcctcctcagaactggggaaggaggaggaggaggaggagcaggcggatggggcggtctggctgtgcggggatgtgtggcgggagacgcgagccaagctgcgcggcatcgtggacagcaagtacttcaaccggggcatcatgatggccatcctggtcaacaccgtcagcatgggcatcgagcaccacgagcagccggaggagctgaccaacatcctggagatctgcaatgtggtcttcaccagcatgtttgccctggagatgatcctgaagctggctgcatttgggctcttcgactacctgcgtaacccctacaacatcttcgacagcatcattgtcatcatcagcatctgggagattgtggggcaggcggacggtgggctgtcggtgctgcggaccttccggctgctgcgcgtgctgaaactggtgcgcttcatgcctgccctgcggcgccagctcgtggtgctcatgaagaccatggacaacgtggccaccttctgcatgctgctcatgctcttcatcttcatcttcagcatccttgggatgcatatttttggctgcaagttcagcctccgcacggacactggagacacggtgcccgacaggaagaacttcgactccctgctgtgggccatcgtcactgtgttccagatcctcacccaggaggactggaacgtcgttctctacaatggcatggcctccacttctccctgggcctccctctactttgtcgccctcatgaccttcggcaactatgtgctcttcaacctgctggtggccatcctggtggagggcttccaggcggagggtgacgccaatcgctcctactcggacgaggaccagagctcatccaacatagaagagtttgataagctccaggaaggcctggacagcagcggagatcccaagctctgcccaatccccatgacccccaatgggcacctggaccccagtctcccactgggtgggcacctaggtcctgctggggctgcgggacctgccccccgactctcactgcagccggaccccatgctggtggccctgggctcccgaaagagcagtgtcatgtctctagggaggatgagctatgaccagcgctccctgtccagctcccggagctcctactacgggccatggggccgcagcgcggcctgggccagccgtcgctccagctggaacagcctcaagcacaagccgccgtcggcggagcatgagtccctgctctctgcggagcgcggcggcggcgcccgggtctgcgaggttgccgcggacgaggggccgccgcgggccgcacccctgcacaccccacacgcccaccacattcatcacgggccccatctggcgcaccgccaccgccaccaccgccggacgctgtccctcgacaacagggactcggtggacctggccgagctggtgcccgcggtgggcgcccacccccgggccgcctggagggcggcaggcccggcccccgggcatgaggactgcaatggcaggatgcccagcatcgccaaagacgtcttcaccaagatgggcgaccgcggggatcgcggggaggatgaggaggaaatcgactacaccctgtgcttccgcgtccgcaagatgatcgacgtctataagcccgactggtgcgaggtccgcgaagactggtctgtctacctcttctctcccgagaacaggttccgggtcctgtgtcagaccattattgcccacaaactcttcgactacgtcgtcctggccttcatctttctcaactgcatcaccatcgccctggagcggcctcagatcgaggccggcagcaccgaacgcatctttctcaccgtgtccaactacatcttcacggccatcttcgtgggcgagatgacattgaaggtagtctcgctgggcctgtacttcggcgagcaggcgtacctacgcagcagctggaacgtgctggatggctttcttgtcttcgtgtccatcatcgacatcgtggtgtccctggcctcagccgggggagccaagatcttgggggtcctccgagtcttgcggctcctgcgcaccctacgccccctgcgtgtcatcagccgggcgccgggcctgaagctggtggtggagacactcatctcctccctcaagcccatcggcaacatcgtgctcatctgctgtgccttcttcatcatctttggcatcctgggagtgcagctcttcaagggcaagttctaccactgtctgggcgtggacacccgcaacatcaccaaccgctcggactgcatggccgccaactaccgctgggtccatcacaaatacaacttcgacaacctgggccaggctctgatgtccctctttgtcctggcatccaaggatggttgggtgaacatcatgtacaatggactggatgctgttgctgtggaccagcagcctgtgaccaaccacaacccctggatgctgctgtacttcatctccttcctgctcatcgtcagcttctttgtgctcaacatgtttgtgggtgtcgtggtggagaacttccacaagtgccggcagcaccaggaggctgaagaggcacggcggcgtgaggagaagcggctgcggcgcctggagaagaagcgccggaaggcccagcggctgccctactatgccacctattgtcacacccggctgctcatccactccatgtgcaccagccactacctggacatcttcatcaccttcatcatctgcctcaacgtggtcaccatgtccctggagcactacaatcagcccacgtccctggagacagccctcaagtactgcaactatatgttcaccactgtctttgtgctggaggctgtgctgaagctggtggcatttggtctgaggcgcttcttcaaggaccgatggaaccagctggacctggccattgtgctactgtcagtcatgggcatcaccctggaggagatcgagatcaatgcggccctgcccatcaatcccaccatcatccgcatcatgagggttctgcgcattgcccgagtgctgaagctgttgaagatggccacaggaatgcgggccctgctggacacggtggtgcaagctttgccccaggtgggcaacctgggcctcctcttcatgctgctcttcttcatctatgctgctctcggggtggagctctttgggaagctggtctgcaacgacgagaacccgtgcgagggcatgagccggcatgccaccttcgagaacttcggcatggccttcctcacactcttccaggtctccacgggtgacaactggaacgggatcatgaaggacacgctgcgggactgcacccacgacgagcgcagctgcctgagcagcctgcagtttgtgtcgccgctgtacttcgtgagcttcgtgctcaccgcgcagttcgtgctcatcaacgtggtggtggctgtgctcatgaagcacctggacgacagcaacaaggaggcgcaggaggacgccgagatggatgccgagctcgagctggagatggcccatggcctgggccctggcccgaggctgcctaccggctccccgggcgcccctggccgagggccgggaggggcgggcggcgggggcgacaccgagggcggcttgtgccggcgctgctactcgcctgcccaggagaacctgtggctggacagcgtctctttaatcatcaaggactccttggagggggagctgaccatcatcgacaacctgtcgggctccatcttccaccactactcctcgcctgccggctgcaagaagtgtcaccacgacaagcaagaggtgcagctggctgagacggaggccttctccctgaactcagacaggtcctcgtccatcctgctgggtgacgacctgagtctcgaggaccccacagcctgcccacctggccgcaaagacagcaagggtgagctggacccacctgagcccatgcgtgtgggagacctgggcgaatgcttcttccccttgtcctctacggccgtctcgccggatccagagaacttcctgtgtgagatggaggagatcccattcaaccctgtccggtcctggctgaaacatgacagcagtcaagcacccccaagtcccttctccccggatgcctccagccctctcctgcccatgccagccgagttcttccaccctgcagtgtctgccagccagaaaggcccagaaaagggcactggcactggaaccctccccaagattgcgctgcagggctcctgggcatctctgcggtcaccaagggtcaactgtaccctcctccggcaggtaccgacacctcccaggccctagagcactggtctgtgggcaaggggcaggatctaagccaggcctggaagtccaagggactgggaggggaaggacccaaccaaaggccgagggcaccaccgtgcaagggggtttgggaacgctggggtgacgctgagactggagggggaggtggcactggggcggatggagtgggcggggctgggtcctggggacagcagagtgtggggaggaccccaaggcgggtctggaagaggcctgtgatccctagcttgaggggaggggaggagaggaggaggagtactggaggttttgcagggtggcggggtgctggcagtggggaggacaccctgggtgctctgggtgggtgtgagtgggggcttgattactaggaatggaggtgggagggcgggtctggtggatgagaagcctcgggctgcagggtcccccgtactggattggccagggccacagccctcctacccacgggcacacagaggtctgaagcactgagggctccgctgtgggggtggggaaatggggccgggccggctcccacagtgagtgcagttgattcactgggtgactgtctgacccgtcacaccaggctgtgtgctctggcgggcaggacacaaactccctgcctgccgggctcactgtttagtgctgagagtgagctgcctgggtgcaggagggatgataaccaaaataaa

SEQ ID NO: 113276 - DNA, 9892 bp, Homo sapiens
  Payload ID: 2147
  Gene Symbol: CACNA1I
  Gene Name: calcium channel, voltage-dependent, T type, alpha 1I subunit
  Uniprot ID: Q9P0X4
  ENST ID: ENST00000404898
  CDS Start-End: 1-6567
atggctgagagcgcctccccgccctcctcatctgcagcagccccagccgctgagccaggagtcaccacggagcagcccggaccccggagccccccatcctccccgccaggcctggaggagcctctggatggagctgatcctcatgtcccacacccagacctggcgcctattgccttcttctgcctgcgacagaccaccagcccccggaactggtgcatcaagatggtgtgcaacccgtggtttgaatgtgtcagcatgctggtgatcctgctgaactgcgtgacacttggcatgtaccagccgtgcgacgacatggactgcctgtccgaccgctgcaagatcctgcaggtctttgatgacttcatctttatcttctttgccatggagatggtgctcaagatggtggccctggggatttttggcaagaagtgctacctcggggacacatggaaccgcctggatttcttcatcgtcatggcagggatggtcgagtactccctggaccttcagaacatcaacctgtcagccatccgcaccgtgcgcgtcctgaggcccctcaaagccatcaaccgcgtgcccagtatgcggatcctggtgaacctgctcctggacacactgcccatgctggggaatgtcctgctgctctgcttctttgtcttcttcatctttggcatcataggtgtgcagctctgggcgggcctgctgcgtaaccgctgcttcctggaggagaacttcaccatacaaggggatgtggccttgcccccatactaccagccggaggaggatgatgagatgcccttcatctgctccctgtcgggcgacaatgggataatgggctgccatgagatccccccgctcaaggagcagggccgtgagtgctgcctgtccaaggacgacgtctacgactttggggcggggcgccaggacctcaatgccagcggcctctgtgtcaactggaaccgttactacaatgtgtgccgcacgggcagcgccaacccccacaagggtgccatcaactttgacaacatcggttatgcttggattgtcatcttccaggtgatcactctggaaggctgggtggagatcatgtactacgtgatggatgctcactccttctacaacttcatctacttcatcctgcttatcatagtgggctccttcttcatgatcaacctgtgcctcgttgtcatagcgacccagttctcggagaccaagcaacgggagcaccggctgatgctggagcagcggcagcgctacctgtcctccagcacggtggccagctacgccgagcctggcgactgctacgaggagatcttccagtatgtctgccacatcctgcgcaaggccaagcgccgcgccctgggcctctaccaggccctgcagagccggcgccaggccctgggcccggaggccccggcccccgccaaacctgggccccacgccaaggagccccggcactaccagctgtgcccgcaacatagccccctggatgcgacgccccacaccctggtgcagcccatccccgccacgctggcttccgatcccgccagctgcccttgctgccagcatgaggacggccggcggccctcgggcctgggcagcaccgactcgggccaggagggctcgggctccgggagctccgctggtggcgaggacgaggcggatggggacggggcccggagcagcgaggacggagcctcctcagaactggggaaggaggaggaggaggaggagcaggcggatggggcggtctggctgtgcggggatgtgtggcgggagacgcgagccaagctgcgcggcatcgtggacagcaagtacttcaaccggggcatcatgatggccatcctggtcaacaccgtcagcatgggcatcgagcaccacgagcagccggaggagctgaccaacatcctggagatctgcaatgtggtcttcaccagcatgtttgccctggagatgatcctgaagctggctgcatttgggctcttcgactacctgcgtaacccctacaacatcttcgacagcatcattgtcatcatcagcatctgggagattgtggggcaggcggacggtgggctgtcggtgctgcggaccttccggctgctgcgcgtgctgaaactggtgcgcttcatgcctgccctgcggcgccagctcgtggtgctcatgaagaccatggacaacgtggccaccttctgcatgctgctcatgctcttcatcttcatcttcagcatccttgggatgcatatttttggctgcaagttcagcctccgcacggacactggagacacggtgcccgacaggaagaacttcgactccctgctgtgggccatcgtcactgtgttccagatcctcacccaggaggactggaacgtcgttctctacaatggcatggcctccacttctccctgggcctccctctactttgtcgccctcatgaccttcggcaactatgtgctcttcaacctgctggtggccatcctggtggagggcttccaggcggagggtgacgccaatcgctcctactcggacgaggaccagagctcatccaacatagaagagtttgataagctccaggaaggcctggacagcagcggagatcccaagctctgcccaatccccatgacccccaatgggcacctggaccccagtctcccactgggtgggcacctaggtcctgctggggctgcgggacctgccccccgactctcactgcagccggaccccatgctggtggccctgggctcccgaaagagcagtgtcatgtctctagggaggatgagctatgaccagcgctccctgtccagctcccggagctcctactacgggccatggggccgcagcgcggcctgggccagccgtcgctccagctggaacagcctcaagcacaagccgccgtcggcggagcatgagtccctgctctctgcggagcgcggcggcggcgcccgggtctgcgaggttgccgcggacgaggggccgccgcgggccgcacccctgcacaccccacacgcccaccacattcatcacgggccccatctggcgcaccgccaccgccaccaccgccggacgctgtccctcgacaacagggactcggtggacctggccgagctggtgcccgcggtgggcgcccacccccgggccgcctggagggcggcaggcccggcccccgggcatgaggactgcaatggcaggatgcccagcatcgccaaagacgtcttcaccaagatgggcgaccgcggggatcgcggggaggatgaggaggaaatcgactacaccctgtgcttccgcgtccgcaagatgatcgacgtctataagcccgactggtgcgaggtccgcgaagactggtctgtctacctcttctctcccgagaacaggttccgggtcctgtgtcagaccattattgcccacaaactcttcgactacgtcgtcctggccttcatctttctcaactgcatcaccatcgccctggagcggcctcagatcgaggccggcagcaccgaacgcatctttctcaccgtgtccaactacatcttcacggccatcttcgtgggcgagatgacattgaaggtagtctcgctgggcctgtacttcggcgagcaggcgtacctacgcagcagctggaacgtgctggatggctttcttgtcttcgtgtccatcatcgacatcgtggtgtccctggcctcagccgggggagccaagatcttgggggtcctccgagtcttgcggctcctgcgcaccctacgccccctgcgtgtcatcagccgggcgccgggcctgaagctggtggtggagacactcatctcctccctcaagcccatcggcaacatcgtgctcatctgctgtgccttcttcatcatctttggcatcctgggagtgcagctcttcaagggcaagttctaccactgtctgggcgtggacacccgcaacatcaccaaccgctcggactgcatggccgccaactaccgctgggtccatcacaaatacaacttcgacaacctgggccaggctctgatgtccctctttgtcctggcatccaaggatggttgggtgaacatcatgtacaatggactggatgctgttgctgtggaccagcagcctgtgaccaaccacaacccctggatgctgctgtacttcatctccttcctgctcatcgtcagcttctttgtgctcaacatgtttgtgggtgtcgtggtggagaacttccacaagtgccggcagcaccaggaggctgaagaggcacggcggcgtgaggagaagcggctgcggcgcctggagaagaagcgccggaaggcccagcggctgccctactatgccacctattgtcacacccggctgctcatccactccatgtgcaccagccactacctggacatcttcatcaccttcatcatctgcctcaacgtggtcaccatgtccctggagcactacaatcagcccacgtccctggagacagccctcaagtactgcaactatatgttcaccactgtctttgtgctggaggctgtgctgaagctggtggcatttggtctgaggcgcttcttcaaggaccgatggaaccagctggacctggccattgtgctactgtcagtcatgggcatcaccctggaggagatcgagatcaatgcggccctgcccatcaatcccaccatcatccgcatcatgagggttctgcgcattgcccgagtgctgaagctgttgaagatggccacaggaatgcgggccctgctggacacggtggtgcaagctttgccccaggtgggcaacctgggcctcctcttcatgctgctcttcttcatctatgctgctctcggggtggagctctttgggaagctggtctgcaacgacgagaacccgtgcgagggcatgagccggcatgccaccttcgagaacttcggcatggccttcctcacactcttccaggtctccacgggtgacaactggaacgggatcatgaaggacacgctgcgggactgcacccacgacgagcgcagctgcctgagcagcctgcagtttgtgtcgccgctgtacttcgtgagcttcgtgctcaccgcgcagttcgtgctcatcaacgtggtggtggctgtgctcatgaagcacctggacgacagcaacaaggaggcgcaggaggacgccgagatggatgccgagctcgagctggagatggcccatggcctgggccctggcccgaggctgcctaccggctccccgggcgcccctggccgagggccgggaggggcgggcggcgggggcgacaccgagggcggcttgtgccggcgctgctactcgcctgcccaggagaacctgtggctggacagcgtctctttaatcatcaaggactccttggagggggagctgaccatcatcgacaacctgtcgggctccatcttccaccactactcctcgcctgccggctgcaagaagtgtcaccacgacaagcaagaggtgcagctggctgagacggaggccttctccctgaactcagacaggtcctcgtccatcctgctgggtgacgacctgagtctcgaggaccccacagcctgcccacctggccgcaaagacagcaagggtgagctggacccacctgagcccatgcgtgtgggagacctgggcgaatgcttcttccccttgtcctctacggccgtctcgccggatccagagaacttcctgtgtgagatggaggagatcccattcaaccctgtccggtcctggctgaaacatgacagcagtcaagcacccccaagtcccttctccccggatgcctccagccctctcctgcccatgccagccgagttcttccaccctgcagtgtctgccagccagaaaggcccagaaaagggcactggcactggaaccctccccaagattgcgctgcagggctcctgggcatctctgcggtcaccaagggtcaactgtaccctcctccggcaggccaccgggagcgacacgtcgctggacgccagccccagcagctccgcgggcagcctgcagaccacgctcgaggacagcctgaccctgagcgacagcccccggcgtgccctggggccgcccgcgcctgctccaggaccccgggccggcctgtcccccgccgctcgccgccgcctgagcctgcgcggccggggcctcttcagcctgcgggggctgcgggcgcatcagcgcagccacagcagcgggggctccaccagcccgggctgcacccaccacgactccatggacccctcggacgaggagggccgcggtggcgcgggcggcgggggcgcgggcagcgagcactcggagaccctcagcagcctctcgctcacctccctcttctgcccgccgcccccgccgccagcccccggcctcacgcccgccaggaagttcagcagcaccagcagcctggccgcccccggccgcccccacgccgccgccctggcccacggcctggcccggagcccctcgtgggccgcggaccgcagcaaggacccccccggccgggcaccgctgcccatgggcctgggccccttggcgcccccgccgcaaccgctccccggagagctggagccgggagacgccgccagcaagaggaagagatgagggtcgcaggggcccccggccgcccaccgcccgccccgtctcaccttctttacctcaggagccaggagcagacagcaatacttcgtccacacctgggatcgcgcagggcccgcagggcacaggcgcccgacagccgggctgagcggagtctgggttagccaggcctgcgtggcccatggtggcccttccagtgcatatacatacatatatatatatatatgcatatatatatatatatatatatatatgtgtatacacacacacatagacagacatatatatatatatttattttttttactgagagcttatgacttccagaaagtgctaaaggtgggaggtgggccagggcctggacggggcttttgtctgatgctctgggattctggccagacccaccccagggcacatgtcctgcgggggcgtcccagctgtgttttttgatgtctcctccctggttaagagtagcttggagaggaccctcaggcctctgagggcaccaggccctggagaagaggtgcaattcagggtgtgtgtgtgttttttttcctttaaagaagaaacgctgctaagatcccacgtggctcccacgtgtcggggtgtctgtcctgtcatcctgactgtctcgttattgtgaagtctttcgtagacaccccagagcacacacatccccttagtccaccggttagatgtctctctttagaaaaatcaggggtgagtagctgtgtttccttaggcctggggtaggggatggagagcagctccaaggctgagctggggctctggccccaggtgaggtccccagctcctgagcacttctgagggggtgggttccacccccaggagggcgggggtgggtggagcaggagtggaggcagcctgcagaggaagggtgcgggagactgagccggcagtggcttgcttggaggggctagggtacccgcctggtctcggctggctccagctgccctgcaggtgcccctgggctcaggtagttagttgttcagccactaatgccttttatcccccatatgggcgctgagctgtggctgttcctggacactgtgctgtccccgtcctgagcaactatgcccccgccccagtaggttcaaggcaaagcagctctgaccgaattctaggcaggggtgggggcacctgcctgggccctgggtccagccgcatccccatgcccagcctttcgcgtcacctggaggccacatcttcccaccccacctgccagcccctgtctctcctccccgctgcccctaactgcagctcagctttcactatagcagtgcttcccaaacgggttctagacttgggtgtttgatttgaagagttacgcatttatttcactatttattgggaaaaaaatgcattgaacccgtgatttcacagacattttgcttaggtcaaggctactttttaaaaagggagtgactttcatgaagtcagtttgaagaaggaggttgggagcatgttggtggcagtgatctggagaggctgcaggggccacgagtttgcagatgctgtacttcagcaataaccttgcctttgctaagaccccctccgagggcttcaggggggcctgccaagggggggccttgttcttgttcccaaactctgacttggaagaactcagcttgtggccgggctggtgagggtgtggggtgcgcccttcccttttgggctgagggagagggggccgggaggggttgtcaagcccacccgggaaactgagccctggagaggggaagcagccagcccaggatgcttcagggccctggcagcaaagaagctggggtggtgtggagggccctactccacaccctagagctgtgatgctgagcaaggtgcctgtggcggaaggaactgcccagtcctccctgggggcaggtagacctgtggggatggctcggtccaagcccaacactgcccgctccagagagcctcagccctgcctccctttccacagaggtggttttatgtggaacgaggtaccttgtctggggaagaagtggagctgggcaggcttgactgctcctggctgaccctgagctctcgcagttggagggaagcagacagacttgactttttgcaagtccgcgtgttgctggagggacacgtgtattggagcccagaagaggggctgtgtggcctgggaataccatgtggaaggttgggcttcaagttaacaggatcagacaccagtcaagcagcctcaggtcatcttgcgactccactgagcagcctttcctgttgtcacatgggttcagagcagctgagcagggaacacgtcctaggcaggtctgacgtgaaacctccccttaccctgaaccgtgtgactctgcaagcagacacctcgaggcaggtgttctaggcaaagggatgggcatgagcgaaggctccagggtccacagagcagggagtgtggagaaggtggaagagctgagctcagaggcagagaagctccttgcagggagcactgggagatggcctggcccgtcccaggctcctggaggccccacctgccgatcccaggcacttgaccttgttcctgtgggtgacagagatgagaaccagggaagctgtgatccactggccaggacaagtcaacatgggtgagggttgggcaaagggcccttccttcctccccaaccctgtggtctggggccatggcctcaggcttgtgtctatcacaaaagcacaaacttgccctaacccacatgggcctggctgtggggaaagtggggacccaggtccctgagctgtctgctgggctccgtagagcggtggtgggcaggcaccttggcatctgtgcagagacggcccagtctggccaaatcctcttcctctcccctgctctaccttctccggcaccaggcagccccttaaaggaggacaaagtgtgtaaagcccgtctgctgtcttcccccaaatcctcagctcagagccttccgcttccagggccaaccccagccccgtttgctgcgttgtgtaagggcttggggtcttagaagctgctctttagcccagatacacatactcttttttgtctttgtgcaataatcagtgttcctggcagagcctgggccaagctgcagcctactgaggaggcagaggccacctcctccagaaagccctcggcctgggccgccgccgtgactctagcactctcagtcgctgtacagtttctatggtgtgaatgaacttccctcctagttgctgatggcgctggtacctgctggcccatggcccgggtgtagagaaaccaagcggcagccaccaccagtgttgttttgaataaaagcccagaagcctattt

SEQ ID NO: 113277 - DNA, 10004 bp, Homo sapiens
  Payload ID: 2147
  Gene Symbol: CACNA1I
  Gene Name: calcium channel, voltage-dependent, T type, alpha 1I subunit
  Uniprot ID: Q9P0X4
  ENST ID: ENST00000402142
  CDS Start-End: 1-6672
atggctgagagcgcctccccgccctcctcatctgcagcagccccagccgctgagccaggagtcaccacggagcagcccggaccccggagccccccatcctccccgccaggcctggaggagcctctggatggagctgatcctcatgtcccacacccagacctggcgcctattgccttcttctgcctgcgacagaccaccagcccccggaactggtgcatcaagatggtgtgcaacccgtggtttgaatgtgtcagcatgctggtgatcctgctgaactgcgtgacacttggcatgtaccagccgtgcgacgacatggactgcctgtccgaccgctgcaagatcctgcaggtctttgatgacttcatctttatcttctttgccatggagatggtgctcaagatggtggccctggggatttttggcaagaagtgctacctcggggacacatggaaccgcctggatttcttcatcgtcatggcagggatggtcgagtactccctggaccttcagaacatcaacctgtcagccatccgcaccgtgcgcgtcctgaggcccctcaaagccatcaaccgcgtgcccagtatgcggatcctggtgaacctgctcctggacacactgcccatgctggggaatgtcctgctgctctgcttctttgtcttcttcatctttggcatcataggtgtgcagctctgggcgggcctgctgcgtaaccgctgcttcctggaggagaacttcaccatacaaggggatgtggccttgcccccatactaccagccggaggaggatgatgagatgcccttcatctgctccctgtcgggcgacaatgggataatgggctgccatgagatccccccgctcaaggagcagggccgtgagtgctgcctgtccaaggacgacgtctacgactttggggcggggcgccaggacctcaatgccagcggcctctgtgtcaactggaaccgttactacaatgtgtgccgcacgggcagcgccaacccccacaagggtgccatcaactttgacaacatcggttatgcttggattgtcatcttccaggtgatcactctggaaggctgggtggagatcatgtactacgtgatggatgctcactccttctacaacttcatctacttcatcctgcttatcatagtgggctccttcttcatgatcaacctgtgcctcgttgtcatagcgacccagttctcggagaccaagcaacgggagcaccggctgatgctggagcagcggcagcgctacctgtcctccagcacggtggccagctacgccgagcctggcgactgctacgaggagatcttccagtatgtctgccacatcctgcgcaaggccaagcgccgcgccctgggcctctaccaggccctgcagagccggcgccaggccctgggcccggaggccccggcccccgccaaacctgggccccacgccaaggagccccggcactaccatgggaagactaagggtcagggagatgaagggagacatctcggaagccggcattgccagactttgcatgggcctgcctcccctggaaatgatcactcgggaagagagctgtgcccgcaacatagccccctggatgcgacgccccacaccctggtgcagcccatccccgccacgctggcttccgatcccgccagctgcccttgctgccagcatgaggacggccggcggccctcgggcctgggcagcaccgactcgggccaggagggctcgggctccgggagctccgctggtggcgaggacgaggcggatggggacggggcccggagcagcgaggacggagcctcctcagaactggggaaggaggaggaggaggaggagcaggcggatggggcggtctggctgtgcggggatgtgtggcgggagacgcgagccaagctgcgcggcatcgtggacagcaagtacttcaaccggggcatcatgatggccatcctggtcaacaccgtcagcatgggcatcgagcaccacgagcagccggaggagctgaccaacatcctggagatctgcaatgtggtcttcaccagcatgtttgccctggagatgatcctgaagctggctgcatttgggctcttcgactacctgcgtaacccctacaacatcttcgacagcatcattgtcatcatcagcatctgggagattgtggggcaggcggacggtgggctgtcggtgctgcggaccttccggctgctgcgcgtgctgaaactggtgcgcttcatgcctgccctgcggcgccagctcgtggtgctcatgaagaccatggacaacgtggccaccttctgcatgctgctcatgctcttcatcttcatcttcagcatccttgggatgcatatttttggctgcaagttcagcctccgcacggacactggagacacggtgcccgacaggaagaacttcgactccctgctgtgggccatcgtcactgtgttccagatcctcacccaggaggactggaacgtcgttctctacaatggcatggcctccacttctccctgggcctccctctactttgtcgccctcatgaccttcggcaactatgtgctcttcaacctgctggtggccatcctggtggagggcttccaggcggagggtgacgccaatcgctcctactcggacgaggaccagagctcatccaacatagaagagtttgataagctccaggaaggcctggacagcagcggagatcccaagctctgcccaatccccatgacccccaatgggcacctggaccccagtctcccactgggtgggcacctaggtcctgctggggctgcgggacctgccccccgactctcactgcagccggaccccatgctggtggccctgggctcccgaaagagcagtgtcatgtctctagggaggatgagctatgaccagcgctccctgtccagctcccggagctcctactacgggccatggggccgcagcgcggcctgggccagccgtcgctccagctggaacagcctcaagcacaagccgccgtcggcggagcatgagtccctgctctctgcggagcgcggcggcggcgcccgggtctgcgaggttgccgcggacgaggggccgccgcgggccgcacccctgcacaccccacacgcccaccacattcatcacgggccccatctggcgcaccgccaccgccaccaccgccggacgctgtccctcgacaacagggactcggtggacctggccgagctggtgcccgcggtgggcgcccacccccgggccgcctggagggcggcaggcccggcccccgggcatgaggactgcaatggcaggatgcccagcatcgccaaagacgtcttcaccaagatgggcgaccgcggggatcgcggggaggatgaggaggaaatcgactacaccctgtgcttccgcgtccgcaagatgatcgacgtctataagcccgactggtgcgaggtccgcgaagactggtctgtctacctcttctctcccgagaacaggttccgggtcctgtgtcagaccattattgcccacaaactcttcgactacgtcgtcctggccttcatctttctcaactgcatcaccatcgccctggagcggcctcagatcgaggccggcagcaccgaacgcatctttctcaccgtgtccaactacatcttcacggccatcttcgtgggcgagatgacattgaaggtagtctcgctgggcctgtacttcggcgagcaggcgtacctacgcagcagctggaacgtgctggatggctttcttgtcttcgtgtccatcatcgacatcgtggtgtccctggcctcagccgggggagccaagatcttgggggtcctccgagtcttgcggctcctgcgcaccctacgccccctgcgtgtcatcagccgggcgccgggcctgaagctggtggtggagacactcatctcctccctcaagcccatcggcaacatcgtgctcatctgctgtgccttcttcatcatctttggcatcctgggagtgcagctcttcaagggcaagttctaccactgtctgggcgtggacacccgcaacatcaccaaccgctcggactgcatggccgccaactaccgctgggtccatcacaaatacaacttcgacaacctgggccaggctctgatgtccctctttgtcctggcatccaaggatggttgggtgaacatcatgtacaatggactggatgctgttgctgtggaccagcagcctgtgaccaaccacaacccctggatgctgctgtacttcatctccttcctgctcatcgtcagcttctttgtgctcaacatgtttgtgggtgtcgtggtggagaacttccacaagtgccggcagcaccaggaggctgaagaggcacggcggcgtgaggagaagcggctgcggcgcctggagaagaagcgccggaaggcccagcggctgccctactatgccacctattgtcacacccggctgctcatccactccatgtgcaccagccactacctggacatcttcatcaccttcatcatctgcctcaacgtggtcaccatgtccctggagcactacaatcagcccacgtccctggagacagccctcaagtactgcaactatatgttcaccactgtctttgtgctggaggctgtgctgaagctggtggcatttggtctgaggcgcttcttcaaggaccgatggaaccagctggacctggccattgtgctactgtcagtcatgggcatcaccctggaggagatcgagatcaatgcggccctgcccatcaatcccaccatcatccgcatcatgagggttctgcgcattgcccgagtgctgaagctgttgaagatggccacaggaatgcgggccctgctggacacggtggtgcaagctttgccccaggtgggcaacctgggcctcctcttcatgctgctcttcttcatctatgctgctctcggggtggagctctttgggaagctggtctgcaacgacgagaacccgtgcgagggcatgagccggcatgccaccttcgagaacttcggcatggccttcctcacactcttccaggtctccacgggtgacaactggaacgggatcatgaaggacacgctgcgggactgcacccacgacgagcgcagctgcctgagcagcctgcagtttgtgtcgccgctgtacttcgtgagcttcgtgctcaccgcgcagttcgtgctcatcaacgtggtggtggctgtgctcatgaagcacctggacgacagcaacaaggaggcgcaggaggacgccgagatggatgccgagctcgagctggagatggcccatggcctgggccctggcccgaggctgcctaccggctccccgggcgcccctggccgagggccgggaggggcgggcggcgggggcgacaccgagggcggcttgtgccggcgctgctactcgcctgcccaggagaacctgtggctggacagcgtctctttaatcatcaaggactccttggagggggagctgaccatcatcgacaacctgtcgggctccatcttccaccactactcctcgcctgccggctgcaagaagtgtcaccacgacaagcaagaggtgcagctggctgagacggaggccttctccctgaactcagacaggtcctcgtccatcctgctgggtgacgacctgagtctcgaggaccccacagcctgcccacctggccgcaaagacagcaagggtgagctggacccacctgagcccatgcgtgtgggagacctgggcgaatgcttcttccccttgtcctctacggccgtctcgccggatccagagaacttcctgtgtgagatggaggagatcccattcaaccctgtccggtcctggctgaaacatgacagcagtcaagcacccccaagtcccttctccccggatgcctccagccctctcctgcccatgccagccgagttcttccaccctgcagtgtctgccagccagaaaggcccagaaaagggcactggcactggaaccctccccaagattgcgctgcagggctcctgggcatctctgcggtcaccaagggtcaactgtaccctcctccggcaggccaccgggagcgacacgtcgctggacgccagccccagcagctccgcgggcagcctgcagaccacgctcgaggacagcctgaccctgagcgacagcccccggcgtgccctggggccgcccgcgcctgctccaggaccccgggccggcctgtcccccgccgctcgccgccgcctgagcctgcgcggccggggcctcttcagcctgcgggggctgcgggcgcatcagcgcagccacagcagcgggggctccaccagcccgggctgcacccaccacgactccatggacccctcggacgaggagggccgcggtggcgcgggcggcgggggcgcgggcagcgagcactcggagaccctcagcagcctctcgctcacctccctcttctgcccgccgcccccgccgccagcccccggcctcacgcccgccaggaagttcagcagcaccagcagcctggccgcccccggccgcccccacgccgccgccctggcccacggcctggcccggagcccctcgtgggccgcggaccgcagcaaggacccccccggccgggcaccgctgcccatgggcctgggccccttggcgcccccgccgcaaccgctccccggagagctggagccgggagacgccgccagcaagaggaagagatgagggtcgcaggggcccccggccgcccaccgcccgccccgtctcaccttctttacctcaggagccaggagcagacagcaatacttcgtccacacctgggatcgcgcagggcccgcagggcacaggcgcccgacagccgggctgagcggagtctgggttagccaggcctgcgtggcccatggtggcccttccagtgcatatacatacatatatatatatatatgcatatatatatatatatatatatatatgtgtatacacacacacatagacagacatatatatatatatttattttttttactgagagcttatgacttccagaaagtgctaaaggtgggaggtgggccagggcctggacggggcttttgtctgatgctctgggattctggccagacccaccccagggcacatgtcctgcgggggcgtcccagctgtgttttttgatgtctcctccctggttaagagtagcttggagaggaccctcaggcctctgagggcaccaggccctggagaagaggtgcaattcagggtgtgtgtgtgttttttttcctttaaagaagaaacgctgctaagatcccacgtggctcccacgtgtcggggtgtctgtcctgtcatcctgactgtctcgttattgtgaagtctttcgtagacaccccagagcacacacatccccttagtccaccggttagatgtctctctttagaaaaatcaggggtgagtagctgtgtttccttaggcctggggtaggggatggagagcagctccaaggctgagctggggctctggccccaggtgaggtccccagctcctgagcacttctgagggggtgggttccacccccaggagggcgggggtgggtggagcaggagtggaggcagcctgcagaggaagggtgcgggagactgagccggcagtggcttgcttggaggggctagggtacccgcctggtctcggctggctccagctgccctgcaggtgcccctgggctcaggtagttagttgttcagccactaatgccttttatcccccatatgggcgctgagctgtggctgttcctggacactgtgctgtccccgtcctgagcaactatgcccccgccccagtaggttcaaggcaaagcagctctgaccgaattctaggcaggggtgggggcacctgcctgggccctgggtccagccgcatccccatgcccagcctttcgcgtcacctggaggccacatcttcccaccccacctgccagcccctgtctctcctccccgctgcccctaactgcagctcagctttcactatagcagtgcttcccaaacgggttctagacttgggtgtttgatttgaagagttacgcatttatttcactatttattgggaaaaaaatgcattgaacccgtgatttcacagacattttgcttaggtcaaggctactttttaaaaagggagtgactttcatgaagtcagtttgaagaaggaggttgggagcatgttggtggcagtgatctggagaggctgcaggggccacgagtttgcagatgctgtacttcagcaataaccttgcctttgctaagaccccctccgagggcttcaggggggcctgccaagggggggccttgttcttgttcccaaactctgacttggaagaactcagcttgtggccgggctggtgagggtgtggggtgcgcccttcccttttgggctgagggagagggggccgggaggggttgtcaagcccacccgggaaactgagccctggagaggggaagcagccagcccaggatgcttcagggccctggcagcaaagaagctggggtggtgtggagggccctactccacaccctagagctgtgatgctgagcaaggtgcctgtggcggaaggaactgcccagtcctccctgggggcaggtagacctgtggggatggctcggtccaagcccaacactgcccgctccagagagcctcagccctgcctccctttccacagaggtggttttatgtggaacgaggtaccttgtctggggaagaagtggagctgggcaggcttgactgctcctggctgaccctgagctctcgcagttggagggaagcagacagacttgactttttgcaagtccgcgtgttgctggagggacacgtgtattggagcccagaagaggggctgtgtggcctgggaataccatgtggaaggttgggcttcaagttaacaggatcagacaccagtcaagcagcctcaggtcatcttgcgactccactgagcagcctttcctgttgtcacatgggttcagagcagctgagcagggaacacgtcctaggcaggtctgacgtgaaacctccccttaccctgaaccgtgtgactctgcaagcagacacctcgaggcaggtgttctaggcaaagggatgggcatgagcgaaggctccagggtccacagagcagggagtgtggagaaggtggaagagctgagctcagaggcagagaagctccttgcagggagcactgggagatggcctggcccgtcccaggctcctggaggccccacctgccgatcccaggcacttgaccttgttcctgtgggtgacagagatgagaaccagggaagctgtgatccactggccaggacaagtcaacatgggtgagggttgggcaaagggcccttccttcctccccaaccctgtggtctggggccatggcctcaggcttgtgtctatcacaaaagcacaaacttgccctaacccacatgggcctggctgtggggaaagtggggacccaggtccctgagctgtctgctgggctccgtagagcggtggtgggcaggcaccttggcatctgtgcagagacggcccagtctggccaaatcctcttcctctcccctgctctaccttctccggcaccaggcagccccttaaaggaggacaaagtgtgtaaagcccgtctgctgtcttcccccaaatcctcagctcagagccttccgcttccagggccaaccccagccccgtttgctgcgttgtgtaagggcttggggtcttagaagctgctctttagcccagatacacatactcttttttgtctttgtgcaataatcagtgttcctggcagagcctgggccaagctgcagcctactgaggaggcagaggccacctcctccagaaagccctcggcctgggccgccgccgtgactctagcactctcagtcgctgtacagtttctatggtgtgaatgaacttccctcctagttgctgatggcgctggtacctgctggcccatggcccgggtgtagagaaaccaagcggcagccaccaccagtgttgttttgaataaaagcccagaagcctatttaagaatt

SEQ ID NO: 113278 - DNA, 5952 bp, Homo sapiens
  Payload ID: 2147
  Gene Symbol: CACNA1I
  Gene Name: calcium channel, voltage-dependent, T type, alpha 1I subunit
  Uniprot ID: Q9P0X4
  ENST ID: ENST00000407673
  CDS Start-End: 1-5946
atggctgagagcgcctccccgccctcctcatctgcagcagccccagccgctgagccaggagtcaccacggagcagcccggaccccggagccccccatcctccccgccaggcctggaggagcctctggatggagctgatcctcatgtcccacacccagacctggcgcctattgccttcttctgcctgcgacagaccaccagcccccggaactggtgcatcaagatggtgtgcaacccgtggtttgaatgtgtcagcatgctggtgatcctgctgaactgcgtgacacttggcatgtaccagccgtgcgacgacatggactgcctgtccgaccgctgcaagatcctgcaggtctttgatgacttcatctttatcttctttgccatggagatggtgctcaagatggtggccctggggatttttggcaagaagtgctacctcggggacacatggaaccgcctggatttcttcatcgtcatggcagggatggtcgagtactccctggaccttcagaacatcaacctgtcagccatccgcaccgtgcgcgtcctgaggcccctcaaagccatcaaccgcgtgcccagtatgcggatcctggtgaacctgctcctggacacactgcccatgctggggaatgtcctgctgctctgcttctttgtcttcttcatctttggcatcataggtgtgcagctctgggcgggcctgctgcgtaaccgctgcttcctggaggagaacttcaccatacaaggggatgtggccttgcccccatactaccagccggaggaggatgatgagatgcccttcatctgctccctgtcgggcgacaatgggataatgggctgccatgagatccccccgctcaaggagcagggccgtgagtgctgcctgtccaaggacgacgtctacgactttggggcggggcgccaggacctcaatgccagcggcctctgtgtcaactggaaccgttactacaatgtgtgccgcacgggcagcgccaacccccacaagggtgccatcaactttgacaacatcggttatgcttggattgtcatcttccaggtgatcactctggaaggctgggtggagatcatgtactacgtgatggatgctcactccttctacaacttcatctacttcatcctgcttatcatagtgggctccttcttcatgatcaacctgtgcctcgttgtcatagcgacccagttctcggagaccaagcaacgggagcaccggctgatgctggagcagcggcagcgctacctgtcctccagcacggtggccagctacgccgagcctggcgactgctacgaggagatcttccagtatgtctgccacatcctgcgcaaggccaagcgccgcgccctgggcctctaccaggccctgcagagccggcgccaggccctgggcccggaggccccggcccccgccaaacctgggccccacgccaaggagccccggcactaccagctgtgcccgcaacatagccccctggatgcgacgccccacaccctggtgcagcccatccccgccacgctggcttccgatcccgccagctgcccttgctgccagcatgaggacggccggcggccctcgggcctgggcagcaccgactcgggccaggagggctcgggctccgggagctccgctggtggcgaggacgaggcggatggggacggggcccggagcagcgaggacggagcctcctcagaactggggaaggaggaggaggaggaggagcaggcggatggggcggtctggctgtgcggggatgtgtggcgggagacgcgagccaagctgcgcggcatcgtggacagcaagtacttcaaccggggcatcatgatggccatcctggtcaacaccgtcagcatgggcatcgagcaccacgagcagccggaggagctgaccaacatcctggagatctgcaatgtggtcttcaccagcatgtttgccctggagatgatcctgaagctggctgcatttgggctcttcgactacctgcgtaacccctacaacatcttcgacagcatcattgtcatcatcagcatctgggagattgtggggcaggcggacggtgggctgtcggtgctgcggaccttccggctgctgcgcgtgctgaaactggtgcgcttcatgcctgccctgcggcgccagctcgtggtgctcatgaagaccatggacaacgtggccaccttctgcatgctgctcatgctcttcatcttcatcttcagcatccttgggatgcatatttttggctgcaagttcagcctccgcacggacactggagacacggtgcccgacaggaagaacttcgactccctgctgtgggccatcgtcactgtgttccagatcctcacccaggaggactggaacgtcgttctctacaatggcatggcctccacttctccctgggcctccctctactttgtcgccctcatgaccttcggcaactatgtgctcttcaacctgctggtggccatcctggtggagggcttccaggcggagggtgacgccaatcgctcctactcggacgaggaccagagctcatccaacatagaagagtttgataagctccaggaaggcctggacagcagcggagatcccaagctctgcccaatccccatgacccccaatgggcacctggaccccagtctcccactgggtgggcacctaggtcctgctggggctgcgggacctgccccccgactctcactgcagccggaccccatgctggtggccctgggctcccgaaagagcagtgtcatgtctctagggaggatgagctatgaccagcgctccctgtccagctcccggagctcctactacgggccatggggccgcagcgcggcctgggccagccgtcgctccagctggaacagcctcaagcacaagccgccgtcggcggagcatgagtccctgctctctgcggagcgcggcggcggcgcccgggtctgcgaggttgccgcggacgaggggccgccgcgggccgcacccctgcacaccccacacgcccaccacattcatcacgggccccatctggcgcaccgccaccgccaccaccgccggacgctgtccctcgacaacagggactcggtggacctggccgagctggtgcccgcggtgggcgcccacccccgggccgcctggagggcggcaggcccggcccccgggcatgaggactgcaatggcaggatgcccagcatcgccaaagacgtcttcaccaagatgggcgaccgcggggatcgcggggaggatgaggaggaaatcgactacaccctgtgcttccgcgtccgcaagatgatcgacgtctataagcccgactggtgcgaggtccgcgaagactggtctgtctacctcttctctcccgagaacaggttccgggtcctgtgtcagaccattattgcccacaaactcttcgactacgtcgtcctggccttcatctttctcaactgcatcaccatcgccctggagcggcctcagatcgaggccggcagcaccgaacgcatctttctcaccgtgtccaactacatcttcacggccatcttcgtgggcgagatgacattgaaggtagtctcgctgggcctgtacttcggcgagcaggcgtacctacgcagcagctggaacgtgctggatggctttcttgtcttcgtgtccatcatcgacatcgtggtgtccctggcctcagccgggggagccaagatcttgggggtcctccgagtcttgcggctcctgcgcaccctacgccccctgcgtgtcatcagccgggcgccgggcctgaagctggtggtggagacactcatctcctccctcaagcccatcggcaacatcgtgctcatctgctgtgccttcttcatcatctttggcatcctgggagtgcagctcttcaagggcaagttctaccactgtctgggcgtggacacccgcaacatcaccaaccgctcggactgcatggccgccaactaccgctgggtccatcacaaatacaacttcgacaacctgggccaggctctgatgtccctctttgtcctggcatccaaggatggttgggtgaacatcatgtacaatggactggatgctgttgctgtggaccagcagcctgtgaccaaccacaacccctggatgctgctgtacttcatctccttcctgctcatcgtcagcttctttgtgctcaacatgtttgtgggtgtcgtggtggagaacttccacaagtgccggcagcaccaggaggctgaagaggcacggcggcgtgaggagaagcggctgcggcgcctggagaagaagcgccggaaggcccagcggctgccctactatgccacctattgtcacacccggctgctcatccactccatgtgcaccagccactacctggacatcttcatcaccttcatcatctgcctcaacgtggtcaccatgtccctggagcactacaatcagcccacgtccctggagacagccctcaagtactgcaactatatgttcaccactgtctttgtgctggaggctgtgctgaagctggtggcatttggtctgaggcgcttcttcaaggaccgatggaaccagctggacctggccattgtgctactgtcagtcatgggcatcaccctggaggagatcgagatcaatgcggccctgcccatcaatcccaccatcatccgcatcatgagggttctgcgcattgcccgagtgctgaagctgttgaagatggccacaggaatgcgggccctgctggacacggtggtgcaagctttgccccaggtgggcaacctgggcctcctcttcatgctgctcttcttcatctatgctgctctcggggtggagctctttgggaagctggtctgcaacgacgagaacccgtgcgagggcatgagccggcatgccaccttcgagaacttcggcatggccttcctcacactcttccaggtctccacgggtgacaactggaacgggatcatgaaggacacgctgcgggactgcacccacgacgagcgcagctgcctgagcagcctgcagtttgtgtcgccgctgtacttcgtgagcttcgtgctcaccgcgcagttcgtgctcatcaacgtggtggtggctgtgctcatgaagcacctggacgacagcaacaaggaggcgcaggaggacgccgagatggatgccgagctcgagctggagatggcccatggcctgggccctggcccgaggctgcctaccggctccccgggcgcccctggccgagggccgggaggggcgggcggcgggggcgacaccgagggcggcttgtgccggcgctgctactcgcctgcccaggagaacctgtggctggacagcgtctctttaatcatcaaggactccttggagggggagctgaccatcatcgacaacctgtcgggctccatcttccaccactactcctcgcctgccggctgcaagaagtgtcaccacgacaagcaagaggtgcagctggctgagacggaggccttctccctgaactcagacaggtcctcgtccatcctgctgggtgacgacctgagtctcgaggaccccacagcctgcccacctggccgcaaagacagcaagggtgagctggacccacctgagcccatgcgtgtgggagacctgggcgaatgcttcttccccttgtcctctacggccgtctcgccggatccagagaacttcctgtgtgagatggaggagatcccattcaaccctgtccggtcctggctgaaacatgacagcagtcaagcacccccaagtcccttctccccggatgcctccagccctctcctgcccatgccagccgagttcttccaccctgcagtgtctgccagccagaaaggcccagaaaagggcactggcactggaaccctccccaagattgcgctgcagggctcctgggcatctctgcggtcaccaagggtcaactgtaccctcctccggcaggtaccgacacctcccaggccctagagcact

SEQ ID NO: 113279 - DNA, 4084 bp, Homo sapiens
  Payload ID: 2148
  Gene Symbol: CHERP
  Gene Name: calcium homeostasis endoplasmic reticulum protein
  ENST ID: ENST00000198939
  CDS Start-End: 38-2821
cgtgtggcgccggaggacgttccccgcggccggagccatggagatgccgctgccccccgatgaccaggagcttcgaaatgtcatcgacaagctcgcccagttcgtggctcgcaatgggcccgagtttgagaagatgactatggagaagcagaaggacaaccccaaattctcgtttcttttcggaggcgaattctacagttactacaagtgcaagctggcgctggagcagcagcagctcatctgcaagcagcagaccccggagctggagccagccgccaccatgccacccctgccacagcccccgctggcccccgccgcgcccatcccgccggcccagggcgcgccatccatggacgagctcatccagcagagccagtggaacctccagcagcaggagcagcacttgctggcgctcagacaggagcaagtgacagcggccgtggcccacgcggtggagcagcagatgcagaagcttctggaggagacccagctagacatgaacgagtttgacaacctcctgcagcccatcatcgacacgtgcaccaaggacgccatctcggccgggaagaactggatgttcagcaatgccaagtccccgccgcactgtgagctgatggccggccacctccggaaccgcatcacggctgatggggcacacttcgagctgcggctgcacctcatctacctgatcaatgacgtgctgcaccactgggccctgacgcgcggaaagtctctccctcacagccagcgcaagcaggcccgggagctgctggccgccctgcagaaggtcgtggtgcccatctactgcaccagcttcttggccgtggaggaagacaagcagcagaagatcgcccggctcctgcagctctgggagaaaaacggctacttcgatgactccatcattcagcagctacagagcccagccctggggcttggtcagtaccaggccaccctcatcaacgagtactcctcagtggtccagccggtgcagctggccttccagcagcagatccagaccctcaagacgcagcacgaggagtttgtcaccagcctggcccagcagcagcagcagcagcaacagcagcagcagcagctccagatgccgcagatggaggctgaagtcaaggccacgcctccaccgcctgctccacccccggccccagcacctgcccctgccatcccgcccaccacccagcctgatgacagcaagcctcccatccagatgcctggctcttcagagtacgaagctccaggaggggtccaggatcctgcagctgccggcccccggggccccgggccacacgaccagatcccaccaaacaagcccccttggtttgaccagcctcaccccgtggctccttggggccagcagcagccgccagagcagccaccctacccgcaccaccagggcggcccaccccactgccccccctggaacaacagccatgagggcatgtggggcgagcagcgcggtgaccccggctggaacggccagcgcgacgcgccctggaacaaccagcccgacgccgcctggaacagccagttcgagggcccctggaacagccagcacgagcagccgccctggggcgggggccagcgcgagccacccttccgcatgcagcggcccccacacttccgggggcccttcccgccccaccagcagcacccgcagttcaaccagcctccgcacccccacaacttcaaccgcttcccgccccgcttcatgcaggacgacttcccgccacggcaccccttcgagcggccgccctatccccaccgcttcgactacccccagggggacttccctgccgaaatggggccccctcaccaccaccctggccaccgcatgcctcatcctggcatcaacgagcacccgccttgggctggaccccagcaccctgacttcggccctcccccccatggcttcaacgggcagcccccacacatgcggcgacagggcccaccccacatcaaccacgatgaccccagcctggtccccaatgtgccctacttcgatctccctgctgggctgatggcccccctcgtgaagctggaagatcacgagtacaagcctttggaccctaaagacatccgcctcccaccccccatgccgcccagcgagaggctgctggctgcagtggaggccttctacagccccccgtcccacgacaggcccaggaacagtgaaggctgggagcagaacggcctctatgagttcttccgagcaaaaatgcgggcccggcggaggaaaggccaggagaagaggaacagcggaccctcgaggtctcggagcagatccaagagtcgagggcgttcttcctcccgctccaactcaagatcctccaagtcttcaggctcgtactcaaggtcaaggtcgcgctcctgctcccgttcctactcccgctccagatctagaagtcggagcaggtcgcgctcctccagaagccgctcccggtcccagtcgcggtcccggtccaagtcgtactccccaggaagaagacgccggtcacggtccaggagccccaccccgccttcctctgctggtctgggttctaattcggcgcctcccatccctgactcaaggctcggagaagagaacaaaggccatcagatgctggtgaagatgggctggagcggctcaggcggcctcggtgcgaaggagcaagggatccaggaccccatcaagggcggggacgtccgggataagtgggaccagtataaaggcgtgggcgtggctctggatgacccctatgagaactaccgcaggaacaagagctactccttcatcgcccgcatgaaggccagggacgagtgtaagtaggcgcccatgccgggagccgcgccggtggccagcggtgccggctgtgggaccttcctggctgactggcagaggaagattgcagtgacagctcagttcttacaccgtctccacttgtggagagccacaggaagagaaggaagaccagcgcatgcccagtgggaacgccgtgctccatggcgtggagggcacgggtgccacccacaaaccacaccaggaggcgctgcagccaccagggccccaggctcgttttcctttatagcgaagcaaaaaacacaagaccctccgcccgagtaaattcttcagccacgaagggatggatgtgcatctgccctaagtcagattgaagcctcctcctaggctccaggaggagcatgtgcaggaagggttggcctgagccagagccggcaccccagctccttcctccagctccccgcacccaccggccctgacctggcttcccctcggctgtgtagggacaaagccgaagcccagtgccatgactgcccgcggattgaaaaacagaaacacaaaactttgacttgacttgcgaagtgaagcagggttttcatttttactctccttggtttaggtctagaaagaagaatactgacctgagaggaggcccagtgagattctgaaacctaattcttcgaaggcgtactggcccttagttcagttattttagttgtataagttgatattttttttctggaatgtagccatttgctgttatctgggaaacaagattctaacaggaaaccagcctaagacacttcaggttgagcgctgcctcggagtctgtgcccgtcgcgtcccctgcttgagttttgcacttggaagaaccctgcaccggctggcgtgtgcgacggcccagtcccatccagagcatggagcccgaccccagccagcgccttccactccatcatttcatttcacacccccgaagggaggggaggccaggaggggagctgctcctgccagaagctggtgggtgaccgttgggaatcggccacacctggtgtccatgggcagcctggtgcaattccattcatttgtacagaaacatttttgaaaaattcttttcaataagatgcaaaatcttccaacttttcaacccaacgtgatgaatatttgattttgttctagatttcctgtagctgtgaattgttaaaatgtatgattcaggataaaacgtaaacacgtgctgttagtaatttcttgtggatttcattgttttgccttcaaataaagcctttttttaaa

SEQ ID NO: 113280 - DNA, 4173 bp, Homo sapiens
  Payload ID: 2148
  Gene Symbol: CHERP
  Gene Name: calcium homeostasis endoplasmic reticulum protein
  Uniprot ID: Q8IWX8
  ENST ID: ENST00000546361
  CDS Start-End: 153-2903
ggagtttcccagcgacggccgtaagtggcgggcggaagcggccctagaagcccgccgtaaacggctccctcgcgccacttccggccggcttccgcagacggcgctggtggtcgatcgtgtggcgccggaggacgttccccgcggccggagccatggagatgccgctgccccccgatgaccaggagcttcgaaatgtcatcgacaagctcgcccagttcgtggctcgcaatgggcccgagtttgagaagatgactatggagaagcagaaggacaaccccaaattctcgtttcttttcggaggcgaattctacagttactacaagtgcaagctggcgctggagcagcagcagctcatctgcaagcagcagaccccggagctggagccagccgccaccatgccacccctgccacagcccccgctggcccccgccgcgcccatcccgccggcccagggcgcgccatccatggacgagctcatccagcagagccagtggaacctccagcagcaggagcagcacttgctggcgctcagacaggagcaagtgacagcggccgtggcccacgcggtggagcagcagatgcagaagcttctggaggagacccagctagacatgaacgagtttgacaacctcctgcagcccatcatcgacacgtgcaccaaggacgccatctcggccgggaagaactggatgttcagcaatgccaagtccccgccgcactgtgagctgatggccggccacctccggaaccgcatcacggctgatggggcacacttcgagctgcggctgcacctcatctacctgatcaatgacgtgctgcaccactgccagcgcaagcaggcccgggagctgctggccgccctgcagaaggtcgtggtgcccatctactgcaccagcttcttggccgtggaggaagacaagcagcagaagatcgcccggctcctgcagctctgggagaaaaacggctacttcgatgactccatcattcagcagctacagagcccagccctggggcttggtcagtaccaggccaccctcatcaacgagtactcctcagtggtccagccggtgcagctggccttccagcagcagatccagaccctcaagacgcagcacgaggagtttgtcaccagcctggcccagcagcagcagcagcagcaacagcagcagcagcagctccagatgccgcagatggaggctgaagtcaaggccacgcctccaccgcctgctccacccccggccccagcacctgcccctgccatcccgcccaccacccagcctgatgacagcaagcctcccatccagatgcctggctcttcagagtacgaagctccaggaggggtccaggatcctgcagctgccggcccccggggccccgggccacacgaccagatcccaccaaacaagcccccttggtttgaccagcctcaccccgtggctccttggggccagcagcagccgccagagcagccaccctacccgcaccaccagggcggcccaccccactgccccccctggaacaacagccatgagggcatgtggggcgagcagcgcggtgaccccggctggaacggccagcgcgacgcgccctggaacaaccagcccgacgccgcctggaacagccagttcgagggcccctggaacagccagcacgagcagccgccctggggcgggggccagcgcgagccacccttccgcatgcagcggcccccacacttccgggggcccttcccgccccaccagcagcacccgcagttcaaccagcctccgcacccccacaacttcaaccgcttcccgccccgcttcatgcaggacgacttcccgccacggcaccccttcgagcggccgccctatccccaccgcttcgactacccccagggggacttccctgccgaaatggggccccctcaccaccaccctggccaccgcatgcctcatcctggcatcaacgagcacccgccttgggctggaccccagcaccctgacttcggccctcccccccatggcttcaacgggcagcccccacacatgcggcgacagggcccaccccacatcaaccacgatgaccccagcctggtccccaatgtgccctacttcgatctccctgctgggctgatggcccccctcgtgaagctggaagatcacgagtacaagcctttggaccctaaagacatccgcctcccaccccccatgccgcccagcgagaggctgctggctgcagtggaggccttctacagccccccgtcccacgacaggcccaggaacagtgaaggctgggagcagaacggcctctatgagttcttccgagcaaaaatgcgggcccggcggaggaaaggccaggagaagaggaacagcggaccctcgaggtctcggagcagatccaagagtcgagggcgttcttcctcccgctccaactcaagatcctccaagtcttcaggctcgtactcaaggtcaaggtcgcgctcctgctcccgttcctactcccgctccagatctagaagtcggagcaggtcgcgctcctccagaagccgctcccggtcccagtcgcggtcccggtccaagtcgtactccccaggaagaagacgccggtcacggtccaggagccccaccccgccttcctctgctggtctgggttctaattcggcgcctcccatccctgactcaaggctcggagaagagaacaaaggccatcagatgctggtgaagatgggctggagcggctcaggcggcctcggtgcgaaggagcaagggatccaggaccccatcaagggcggggacgtccgggataagtgggaccagtataaaggcgtgggcgtggctctggatgacccctatgagaactaccgcaggaacaagagctactccttcatcgcccgcatgaaggccagggacgagtgtaagtaggcgcccatgccgggagccgcgccggtggccagcggtgccggctgtgggaccttcctggctgactggcagaggaagattgcagtgacagctcagttcttacaccgtctccacttgtggagagccacaggaagagaaggaagaccagcgcatgcccagtgggaacgccgtgctccatggcgtggagggcacgggtgccacccacaaaccacaccaggaggcgctgcagccaccagggccccaggctcgttttcctttatagcgaagcaaaaaacacaagaccctccgcccgagtaaattcttcagccacgaagggatggatgtgcatctgccctaagtcagattgaagcctcctcctaggctccaggaggagcatgtgcaggaagggttggcctgagccagagccggcaccccagctccttcctccagctccccgcacccaccggccctgacctggcttcccctcggctgtgtagggacaaagccgaagcccagtgccatgactgcccgcggattgaaaaacagaaacacaaaactttgacttgacttgcgaagtgaagcagggttttcatttttactctccttggtttaggtctagaaagaagaatactgacctgagaggaggcccagtgagattctgaaacctaattcttcgaaggcgtactggcccttagttcagttattttagttgtataagttgatattttttttctggaatgtagccatttgctgttatctgggaaacaagattctaacaggaaaccagcctaagacacttcaggttgagcgctgcctcggagtctgtgcccgtcgcgtcccctgcttgagttttgcacttggaagaaccctgcaccggctggcgtgtgcgacggcccagtcccatccagagcatggagcccgaccccagccagcgccttccactccatcatttcatttcacacccccgaagggaggggaggccaggaggggagctgctcctgccagaagctggtgggtgaccgttgggaatcggccacacctggtgtccatgggcagcctggtgcaattccattcatttgtacagaaacatttttgaaaaattcttttcaataagatgcaaaatcttccaacttttcaacccaacgtgatgaatatttgattttgttctagatttcctgtagctgtgaattgttaaaatgtatgattcaggataaaacgtaaacacgtgctgttagtaatttcttgtggatttcattgttttgccttcaaataaagcctttttttaaagaccttt

SEQ ID NO: 113281 - DNA, 3053 bp, Homo sapiens
  Payload ID: 2149
  Gene Symbol: CALHM1
  Gene Name: calcium homeostasis modulator 1
  Uniprot ID: Q8IU99
  ENST ID: ENST00000329905
  CDS Start-End: 138-1178
ctctgctctgagctctgttggtcccagccaggagagcccgagtcatgaggtgggcacccagtgggcagggtgggcagcaggggccctcttggaggcagcagtgagttgggaagaggaggccgggccccacagcgggcatgatggacaagttccggatgatcttccagttcctgcagtccaaccaggagtccttcatgaatggcatctgtggcatcatggccctggccagtgcccagatgtactcggccttcgacttcaactgcccctgcctgccgggctacaatgcagcctacagcgcgggcatcctgctggcgccacccctggtgctctttctgcttggcctggtcatgaacaacaacgtgtccatgctggccgaagagtggaagcggccgctgggccgccgggccaaggaccccgctgtgttgcgctacatgttctgctccatggcccagcgcgccctcatcgcgcctgtcgtctgggtggccgtcacgctactcgacggcaaatgcttcctctgtgccttctgcactgccgtgcccgtgagcgcactgggcaacggcagcctggcacccggccttcctgcccccgagctcgcccgcctgctggcccgggtgccctgccctgagatctacgatggcgactggctgttggcccgagaggtggccgtgcgttacctccgctgcatctcccaggcgctgggctggtccttcgtgctgctgaccactctgctggcattcgtggtgcgctctgtgcggccctgcttcacgcaggccgccttcctcaagagcaagtactggtcccactatatcgacatcgagcgcaagctcttcgacgagacgtgcacggagcacgccaaagcctttgccaaggtctgcatccagcagttcttcgaggccatgaaccatgacctggagctgggtcacacccacgggacactggccacggcccctgcttccgcagctgcccccacgacccccgatggtgcggaggaggaaagggagaagctgcgtggcatcacggatcaaggcaccatgaacaggctgctcacgagctggcacaaatgcaaaccgcctctgcggctgggccaggaggagccaccgctgatgggcaacggctgggctgggggtgggccccggcctccgcgtaaggaggtggccacctacttcagcaaagtgtgaggtgtggccagctgaagaggcaggaacggggatctgagcccacagcccctccaacccccaaaccaggtggaaaaaggaagggtttcagtgctgggcagtactcccctaggcagatccacactccctagcactcgcctgcccattggaggcaggaaatttggagctggaaggggatctgatgccttcaggtgtgacactgccctggatggccctagggcagtgggcccatgagcagtattagtctaaaggggtcggaactgtcatggcaggtacagggaccaatggctcccctctgcccagcccttcccaggctgatgttcactgtctcctcccaggttcaacagacatccctgccccagggtccaccctcgtctgtggctgttcagtacctctcttcctttatgctccgggctcggggagtgggaatcatcaggcgtctcatgaagtgggagccctctgatttgggcaagcgtgtcgtaggtgagactgggtgtgccggggcaggtccataaggacatgacacacagcctacctggtgtgacacacctggggtgacaggcgatgagacaagatgtcagaagctaggttcacatggaagaggtcagagtgtgtggtcaccatgggggtcatgtgacaattgtccaggtggactgcatgtttatttagcacaaaccaagcacaaaagtcctcctgtagaggggtctttgaaaaaccaccttaatacccccgtcacatccaggtctccaggggaaatcagaccatccccaaggcttgagaagttagacacagaagctgaagtctctccatttttctcaaagaccccacctcttggggatggagttctaagaggctaagaggagctccaaggctctagcccaggtgggatgagggtggaggagagcagtgtaaagagaaagcagctcagattccagagtgagacagaactgggtcaaatggtgtctctaccactcacaaaccctgtccctgggccagctgcatcactgcctgtgccttcgtttcttcatctatacaatgaggatgaggcccccccggcccgccatcatggggttgctgtgtgtaaaagcacatggcacatagtaggcacccagcacagggtggctaatgtatttgttgatttctgaacctaaggacttccttcctcctcccctgggcagggatgagacagcaacacaaacactcgagcttccatcttgttgaggaggaaacagaggtacagataggtttctcagcaccgccctcagctctgagacataagtcccaagcatctaaggattcattttgatcttggcatgattccatccttttttatccatccttccctctattcccacttctggggtccagtttccctcctcttaattatttgggaggagttgctcagatctttgtgggccaaggtgggctgggagggctcttccaggaggtaggagttggtatgggccctgaagtcagggaggattaggatgagcaaaaaacaaggtgtatgttggtgggtggcagcacttccagtgggaagagaaggcccggaggtatcaggaggtacaaatgtgatgaagagcaaagctttgggtcaggcacacctgagttcaaataccagcactgcaggacttgtggccagtcacccagccactctaagcctcagtgtgtctgtctataaaatggatattagaagacctgcttggccaggcggagtggctcatgcctgtaatcccagcacttgggaggccaaggagggaggatcacttgagcctgggagttggagaccagcctgggcaacatagcaagactctgtctctgtaaagtaataataataataagaagaagaagaagaataaagagaagatttataatttt

SEQ ID NO: 113282 - DNA, 1859 bp, Homo sapiens
  Payload ID: 2150
  Gene Symbol: CALHM2
  Gene Name: calcium homeostasis modulator 2
  Uniprot ID: Q9HA72
  ENST ID: ENST00000260743
  CDS Start-End: 525-1496
gttagattagtctgaagccgccaccagccccaggcccccgtgcagaagaaaagcgggagggaacggcggaggccgccgctgccctgcaccgccctcctggaggccacttggagagtccggccccgaggaggccatggccacaagtgcccacagctggccccaggttgccagcgtcgctacagcccagaccaaggcagaataatctccggatgagctggtggcaccgctgagcctttggtctcaccagggcttcctgttgctggcaggcggggtggagcggagctgctgggaggctgctggataggagaggggtcacggctgcggaagaggaggttcttcgggacacccgtggatggacacggcaaggaaacaccaggccaaccacagctggggataaaatagcacaaccacaccctgccgtccagcgcctcccagcctgtgccccttcctagtaccaccagcaaccatcaatcccgtctcctcctgcctcctctcctgcaatccaccccgccacgactatcgccatggcagccctgatcgcagagaacttccgcttcctgtcacttttcttcaagagcaaggatgtgatgattttcaacggcctggtggcactgggcacggtgggcagccaggagctgttctctgtggtggccttccactgcccctgctcgccggcccggaactacctgtacgggctggcggccatcggcgtgcccgccctggtgctcttcatcattggcatcatcctcaacaaccacacctggaacctcgtggccgagtgccagcaccggaggaccaagaactgctccgccgcccccaccttcctccttctaagctccatcctgggacgtgcggctgtggcccctgtcacctggtctgtcatctccctgctgcgtggtgaggcttatgtctgtgctctcagtgagttcgtggacccttcctcactcacggccagggaagagcacttcccatcagcccacgccactgaaatcctggccaggttcccctgcaaggagaaccctgacaacctgtcagacttccgggaggaggtcagccgcaggctcaggtatgagtcccagctctttggatggctgctcatcggcgtggtggccatcctggtgttcctgaccaagtgcctcaagcattactgctcaccactcagctaccgccaggaggcctactgggcgcagtaccgcgccaatgaggaccagctgttccagcgcacggccgaggtgcactctcgggtgctcgctgccaacaatgtgcgccgcttctttggctttgtggcgctcaacaaggatgatgaggaactgattgccaacttcccagtggaaggcacgcagccacggccacagtggaatgccatcaccggcgtctacttgtaccgtgagaaccagggcctcccactctacagccgcctgcacaagtgggcccagggtctggcaggcaacggcgcggcccctgacaacgtggagatggccctgctcccctcctaaggaggtgcttcccatgctctttgtaaatggcactacttggtcccaaactgaaccccactgcttgctcacatccatatcagaaggggatttttaaaaaactgttatcttcttggccaggggaaaggaccacaaggcaatctggggtgtggacagacccagtagacaatggaagccccagccagcagggccaggtgacagtgaagctcaccagtgggctcctttatggtactctatgcagttaacatgtatctagctgcatagggacacccagcgcagcagtgcaccactgggaagtggcctccagtgcagcctctggccttattttatatatttaaatttttgataaagtttttcttactaaaa

SEQ ID NO: 113283 - DNA, 1843 bp, Homo sapiens
  Payload ID: 2150
  Gene Symbol: CALHM2
  Gene Name: calcium homeostasis modulator 2
  Uniprot ID: Q9HA72
  ENST ID: ENST00000369788
  CDS Start-End: 506-1477
ctctgcctggtggcgccgggaggctgtttttccactcactggcgcgcagactccatcccactgttttcttctctcttttctggagttagattagtctgaagccgccaccagccccaggcccccgtgcagaagaaaagcgggagggaacggcggaggccgccgctgccctgcaccgccctcctggaggccacttggagagtccggccccgaggaggccatggccacaagtgcccacagctggccccaggcggggtggagcggagctgctgggaggctgctggataggagaggggtcacggctgcggaagaggaggttcttcgggacacccgtggatggacacggcaaggaaacaccaggccaaccacagctggggataaaatagcacaaccacaccctgccgtccagcgcctcccagcctgtgccccttcctagtaccaccagcaaccatcaatcccgtctcctcctgcctcctctcctgcaatccaccccgccacgactatcgccatggcagccctgatcgcagagaacttccgcttcctgtcacttttcttcaagagcaaggatgtgatgattttcaacggcctggtggcactgggcacggtgggcagccaggagctgttctctgtggtggccttccactgcccctgctcgccggcccggaactacctgtacgggctggcggccatcggcgtgcccgccctggtgctcttcatcattggcatcatcctcaacaaccacacctggaacctcgtggccgagtgccagcaccggaggaccaagaactgctccgccgcccccaccttcctccttctaagctccatcctgggacgtgcggctgtggcccctgtcacctggtctgtcatctccctgctgcgtggtgaggcttatgtctgtgctctcagtgagttcgtggacccttcctcactcacggccagggaagagcacttcccatcagcccacgccactgaaatcctggccaggttcccctgcaaggagaaccctgacaacctgtcagacttccgggaggaggtcagccgcaggctcaggtatgagtcccagctctttggatggctgctcatcggcgtggtggccatcctggtgttcctgaccaagtgcctcaagcattactgctcaccactcagctaccgccaggaggcctactgggcgcagtaccgcgccaatgaggaccagctgttccagcgcacggccgaggtgcactctcgggtgctcgctgccaacaatgtgcgccgcttctttggctttgtggcgctcaacaaggatgatgaggaactgattgccaacttcccagtggaaggcacgcagccacggccacagtggaatgccatcaccggcgtctacttgtaccgtgagaaccagggcctcccactctacagccgcctgcacaagtgggcccagggtctggcaggcaacggcgcggcccctgacaacgtggagatggccctgctcccctcctaaggaggtgcttcccatgctctttgtaaatggcactacttggtcccaaactgaaccccactgcttgctcacatccatatcagaaggggatttttaaaaaactgttatcttcttggccaggggaaaggaccacaaggcaatctggggtgtggacagacccagtagacaatggaagccccagccagcagggccaggtgacagtgaagctcaccagtgggctcctttatggtactctatgcagttaacatgtatctagctgcatagggacacccagcgcagcagtgcaccactgggaagtggcctccagtgcagcctctggccttattttatatatttaaatttttgataaagtttttcttactaaaagga

SEQ ID NO: 113284 - DNA, 1652 bp, Homo sapiens
  Payload ID: 2151
  Gene Symbol: CALHM3
  Gene Name: calcium homeostasis modulator 3
  Uniprot ID: Q86XJ0
  ENST ID: ENST00000369783
  CDS Start-End: 209-1243
gcctgtccctgccttaagtgcctactggatcccgggagcctgggctggggcctgggcactgcttcctccttggcccctcaggcccttggaagcagagagagaacctcttgcagatcccaggctcgtccccagcacagcagacaccaggaaggtggccagagcctcactgagccgaaccgacggccgcccacccacccaggctggagccatggataaattccgcatgctcttccagcacttccagtcaagctcggagtcggtgatgaatggcatctgcctgctgctggctgcggtcaccgtcaagctgtactcctcctttgacttcaactgtccctgcctggtgcactacaatgcactctacggcctgggcctgctgctgacgcccccgctcgccctgtttctctgcggcctcctcgccaaccggcagtctgtggtgatggtcgaggagtggcgccggcccgcagggcaccggaggaaggacccaggcatcatcaggtacatgtgctcctctgtgctgcagagggcgctggccgcccccctggtctggatcctgctggccctccttgacgggaagtgcttcgtgtgtgccttcagcagctctgtggaccctgagaagtttctggactttgccaacatgacccccagccaggtacagctcttcctggccaaggttccctgcaaggaggatgagctggtcagggatagccctgctcggaaggcagtgtctcgctacctgcggtgcctgtcacaggccatcggctggagcgtcaccctgctgctgatcatcgcggccttcctggcccgctgcctgaggccctgcttcgaccagacagtcttcctgcagcgcagatactggagcaactacgtggacctggagcagaagctcttcgacgagacctgctgtgagcatgcgcgggacttcgcgcaccgctgcgtgctgcacttctttgccagcatgcggagtgagctgcaggcgcgggggctgcgccggggcaatgcaggcaggagactcgagctccccgcagtgcctgagcccccagaaggcctggatagtggaagtgggaaggcccacctgcgcgcaatctccagccgggagcaggtggaccgcctcctaagcacgtggtactccagcaagccgccgctggacctggctgcatcccccgggctctgcgggggtggccttagccaccgcgcccctaccttggcactgggcacgaggctgtcacaacacaccgacgtgtagggtcctggccaggcttgaagcggcagtgttcgcaggtgaaatgccgcgctgacaaagttctggagtctttccaggccgtggggaccccacggcaggcaccctaagtcttgttagcctcctttttaaagtagcccaatctctgcctagtttctgggtgtggcctccagcgcgcttcacaaactttaatgtggactcggttcaccgagggccttgttaaatacaggttcagacagtgtagccaggaccgagtctgagattctgcattttaaacaagctcctggaggctgatgtgcttttggtcagtgaaccaaactttgagtagcaagaatctaagtaaatctgccatgggttctgggttctagatgtcaattctaaataataataatgaccttagtctgctgcctcgata

SEQ ID NO: 113285 - DNA, 2221 bp, Homo sapiens
  Payload ID: 2152
  Gene Symbol: CAMLG
  Gene Name: calcium modulating ligand
  Uniprot ID: P49069
  ENST ID: ENST00000297156
  CDS Start-End: 121-1011
gggggcgggtctatagtgggaaggggacgcgcgccctgcggcccggcctctagtcatcgccctcgcagcggcggccaacatcaccgccactgccacccctcccagactgtggacgggaggatggagtcgatggccgtcgctaccgacggcggggagaggccgggggtcccagcgggctcaggtctgtcggcttcccagcgtcgggcggagctgcgtcggagaaagctgctcatgaactcggaacagcgcatcaaccggatcatgggctttcacaggcccgggagcggcgcggaagaagaaagtcaaacaaaatcaaagcagcaggacagtgataaactgaactccctcagcgttccttccgtttcaaagcgagtagtgctgggtgattcagtcagtacaggaacaactgaccagcagggtggtgtggccgaggtaaaggggacccaactgggagacaaattggactcgttcattaaaccacctgagtgcagtagtgatgtcaaccttgagctccggcagcggaacagaggggacctgacagcggactcggtccagaggggttcccgccatggcctagagcagtacctttccagattcgaagaagcaatgaagctaaggaaacagctgattagtgaaaaacccagtcaagaggatggaaatacaacagaagaatttgactcttttcgaatatttagattggtgggatgtgctcttcttgctcttggagtcagagcttttgtttgcaaatacttgtccatatttgctccatttcttactttacaacttgcgtacatgggattatacaaatattttcccaagagtgaaaagaagataaagacaacagtactaacagctgcacttctattgtcgggaattcctgccgaagtgataaatcgatcaatggatacctatagcaaaatgggcgaagtcttcacagatctctgtgtctactttttcacttttatcttttgtcatgaactgcttgattattggggctctgaagtaccatgaagcctgtagaactgagaaggagaagcttacaaaaaaaaaaaaatcctcttctatattgcagtgtctctaaaggaggcaaattggtttacaccttcatgtaattcttttactttaggggttgtaaagctactttattagatatagaatggcagattctctgatttaaaagggctgagtttgtattattactgatatgaagaatagagtaccaatgtcattaattgatttttcttgttaatcagaattcctattctgtacctttcctctaacttctcagatttgtaattcttcttttgggagctgagctagtgcttttaggagaacagataaatgtggtctcagccagccctagagactgcttcttgtgtttgtgtcattctgtcctgagaaatgaagtcatctgaaaaataaaatgaaagaaactgaattgtctaatgttaactctgcacattgtaacttttcttgttgagttagtatcttaatttttactccagcacaagtatttaatcaaagaaaagattcatacatgtgaaattggaaggtatttataaaatttttattgctgtataccaaactcagaattggaactttttacatttgagtttcactttttagaagtatgttttaagcaagcaaaaacaaaatgggatgtgaagaattgaggcatgcaacccaatagcataaatgtcctttttccccccaaatatggtctagatgagttattataaacattgtttttatttttttgagacagagtttcgctcttgttgcccaggctagagtgcaatggcgccatctcggctcaccgcaacctccaccttcctggttcaagggattctcctgcctcagcctcccaagtagctgggattacaggcatgcaccaccacgcccagctaatttttatattctttagtaaagacagggtttctccatgttggtcaggctggtctcgaacttctgacctcaggtgatctgcccacctcggcctcccaaagtgctgggattacaggcgtgagccactgcacctggccttataaatatccttttaactaactcagtaactgccatattttgttgggttgtcttcttaaaagaatataagactaaagtgttaatgtcacttggtgttacatttccttacagatttttgtatagtctaatttggttaatccttgtgacattaaaaacacatacactttttaaaaaatta

SEQ ID NO: 113286 - DNA, 895 bp, Homo sapiens
  Payload ID: 2152
  Gene Symbol: CAMLG
  Gene Name: calcium modulating ligand
  ENST ID: ENST00000514518
  CDS Start-End: 39-281
accgccactgccacccctcccagactgtggacgggaggatggagtcgatggccgtcgctaccgacggcggggagaggccgggggtcccagcgggctcaggtctgtcggcttcccagcgtcgggcggagctgcgtcggagaaagctgctcatgaactcggaacagcgcatcaaccggatcatgggctttcacaggcccgggagcggcgcggtccatatttgctccatttcttactttacaacttgcgtacatgggattatacaaatattttcccaagagtgaaaagaagataaagacaacagtactaacagctgcacttctattgtcgggaattcctgccgaagtgataaatcgatcaatggatacctatagcaaaatgggcgaagtcttcacagatctctgtgtctactttttcacttttatcttttgtcatgaactgcttgattattggggctctgaagtaccatgaagcctgtagaactgagaaggagaagcttacaaaaaaaaaaaaatcctcttctatattgcagtgtctctaaaggaggcaaattggtttacaccttcatgtaattcttttactttaggggttgtaaagctactttattagatatagaatggcagattctctgatttaaaagggctgagtttgtattattactgatatgaagaatagagtaccaatgtcattaattgatttttcttgttaatcagaattcctattctgtacctttcctctaacttctcagatttgtaattcttcttttgggagctgagctagtgcttttaggagaacagataaatgtggtctcagccagccctagagactgcttcttgtgtttgtgtcattctgtcctgagaaatgaagtcatctgaaaaataaaatgaaagaaactgaa

SEQ ID NO: 113287 - DNA, 746 bp, Homo sapiens
  Payload ID: 2153
  Gene Symbol: CARHSP1
  Gene Name: calcium regulated heat stable protein 1, 24kDa
  Uniprot ID: Q9Y2V2
  ENST ID: ENST00000311052
  CDS Start-End: 52-495
ctcagtcggagcgaagcggctggcggagcagaacggattgcagggtcagccatgtcatctgagcctcccccaccaccacagccccccacccatcaagcttcagtcgggctgctggacacccctcggagccgtgagcgctcaccatcccctctgcggggcaacgtggtcccaagcccactgcccactcgccggacgaggaccttctcggcgacggtgcgggcttcacagggccccgtctacaaaggagtctgcaaatgcttctgccggtccaagggccatggcttcattactccagctgatggcggccccgacatcttcctgcacatctctgatgtggaaggggagtatgtcccagtggaaggcgacgaggtcacctataaaatgtgctccatcccacccaagaatgagaagctgcaggccgtggaggtcgtcatcactcacctggcaccaggcaccaagcatgagacctggtctggacatgtcatcagctcctaggagatggtggaagcaccccttgtcctgtgcttgtgggagactttgcagggaggaggcagcagacactggagatgacattcttccacacgagacggggcttcagccgggcatggtccctctcaagtatctcctggaggaaggggtatggggggcaggtgtggggtgtggggtgttcccggccatcagcacagcctatgaccattgcaacaacctctcaccatctgaagagcattaaaagcatttaaaaagga

SEQ ID NO: 113288 - DNA, 3026 bp, Homo sapiens
  Payload ID: 2153
  Gene Symbol: CARHSP1
  Gene Name: calcium regulated heat stable protein 1, 24kDa
  Uniprot ID: Q9Y2V2
  ENST ID: ENST00000396593
  CDS Start-End: 361-804
ggtgccttaggcgctggagaaaaacttcacccgcgcccacaggccccctttccgcaggctgcgctggcggttcaggtttgcaggccggaagtgaaatgttcttttttgatttttaaaaaggaagcctccggccctatggttttctggggttggagtggatgtgtgtgctgggggaggcggagacgtcccgctccaggcagggccttgggtcttaataggtggggaaatctctgccaaataggaggcctctcggagcctcagtttccccatctgcagactgggctctgacttcttctggcatgagagggtgtgtgagagtaaaaggaggcagctagccccgtgccgggagacacgtcagccatgtcatctgagcctcccccaccaccacagccccccacccatcaagcttcagtcgggctgctggacacccctcggagccgtgagcgctcaccatcccctctgcggggcaacgtggtcccaagcccactgcccactcgccggacgaggaccttctcggcgacggtgcgggcttcacagggccccgtctacaaaggagtctgcaaatgcttctgccggtccaagggccatggcttcattactccagctgatggcggccccgacatcttcctgcacatctctgatgtggaaggggagtatgtcccagtggaaggcgacgaggtcacctataaaatgtgctccatcccacccaagaatgagaagctgcaggccgtggaggtcgtcatcactcacctggcaccaggcaccaagcatgagacctggtctggacatgtcatcagctcctaggagatggtggaagcaccccttgtcctgtgcttgtgggagactttgcagggaggaggcagcagacactggagatgacattcttccacacgagacggggcttcagccgggcatggtccctctcaagtatctcctggaggaaggggtatggggggcaggtgtggggtgtggggtgttcccggccatcagcacagcctatgaccattgcaacaacctctcaccatctgaagagcattaaaagcatttaaaaaggagaggtgcccactggtggctgagtggaggttccaaccccatcccagggagtggatcaagggtggtatttctccagctgctcagacacatgggctcaacccacagaatccctcttcctcctggagctggaggccccagattcccagatctggccccctggcagcctgacagggaccttgcgtgacttctccaaggcaaatttccacctaagtgccccttgcgcctctcctggggcctgggcaaagcagttttctaattcttggcttggttggttctaggggagctggcttgaagtgggtggggaaaggcgggggtggcggtctttggattggacggatgttgccttttggtgcctttgcagtgggaggcggcatagctgcctgtctggggaagacagttctcccagcactcccacccctgggcacagcaggctggtactgggaggctgaacccctcttagagcctgaccttttcatctgccttctggttgtgtgaccatcactcaacagccatttcacagcccctgtaattatggcggcggggggctggggtggtggtggtgggaagggcttgtggagaggacacagtctttgtttaaaaactttgtcccgatccatccagaaaagagtaggtagcttgcatcctgacagcctggcaaagtcaagaaagttgaaggagaaacatacctttggagagggggttttctttaaaactagtgttaagaaatgcttagggattttttttttcttatttttcataactaaagctttcacccagagccggctctgtttgcactttgctgccgacattgcaaactttttggcagggtgggagactgagtctcattctgtcacccaggctggagtgcagtggcccgatctcagcttactgcaacctctgccctccagggttctggcaattccgcctcagtctcctgagtagctgggattacaggcatgcgccaccacacccggttaatttttgtatttttagtagagaccaggtttcatcatgttgggcaggatggtcttgaacccctgacctcagatgatctgcccatctcggcctctcaaagtgctgggattacaagtgtgagccatcgcgcccggcctgcaaacttttttgtaggtatttctggtaaacaaatccttaggttatctttgctgtggttgtggtttggctttagtcatgatttcaaagtagaaatagctaggcattattttttgaaatatatgacctatatgtagtcaagaatccactgaacagaggcaagcaaaccttttggaaactggcttttgggcagacagtaaacgtccagtttgatgctggaagcatgaacagcttcatcaggtaggtactcctcaactctgatgagtttgtcctttcagcctaagggggtggaagggagttgtttgagaatagcaaatacgcatgttgattgcgagtgtgtggagacaaaggcagttcccaccacagttaggtcctggccattgtttcctcgcctgcgatgctccttgtacatcctcaccctcctctcccgcctctgccttctgctgggtcaaaggtggccttttctctccagccttgaattgttccctgttggcttcccaagggcccatctgctggtacagtccacacttccacagccaagacccgagagggctttcactgccccaagcctctctcctgtgaccctgggattctgtcttggcagaatcctttgtcagcggctcttactctgtccttcctgtttggccacagctctttcaatcaatgggtattctagaaccgcaggatgtcagagctggaagggacgcgataccggtttacacaaggggaaactcctcgaggctctgggagggacggagggttttggtgacagagcgagagctaaaattgaggattcctgaatccagatcttgcctcccatcagccatctttctcccaataaatttttgttttgtgcaaggcta

SEQ ID NO: 113289 - DNA, 556 bp, Homo sapiens
  Payload ID: 2153
  Gene Symbol: CARHSP1
  Gene Name: calcium regulated heat stable protein 1, 24kDa
  ENST ID: ENST00000565287
  CDS Start-End: 163-556
agtcggagcgaagcggctggcggagcagaacggattgcaggcaggccccccagtcctgggtgcaggcttgtgacagctgctcagggatccaaacgtggcgcttgagctctctgcgacgtgttccacagttccctggaggcggacactgcgtgagggtcagccatgtcatctgagcctcccccaccaccacagccccccacccatcaagcttcagtcgggctgctggacacccctcggagccgtgagcgctcaccatcccctctgcggggcaacgtggtcccaagcccactgcccactcgccggacgaggaccttctcggcgacggtgcgggcttcacagggccccgtctacaaaggagtctgcaaatgcttctgccggtccaagggccatggcttcattactccagctgatggcggccccgacatcttcctgcacatctctgatgtggaaggggagtatgtcccagtggaaggcgacgaggtcacctataaaatgtgctccatcccacccaagaatgagaagctgcaggccgtggaggtcgtcatcactcacctgg

SEQ ID NO: 113290 - DNA, 729 bp, Homo sapiens
  Payload ID: 2153
  Gene Symbol: CARHSP1
  Gene Name: calcium regulated heat stable protein 1, 24kDa
  Uniprot ID: Q9Y2V2
  ENST ID: ENST00000561530
  CDS Start-End: 43-486
aggccccctttccgcaggctgcgctggcggttcaggtcagccatgtcatctgagcctcccccaccaccacagccccccacccatcaagcttcagtcgggctgctggacacccctcggagccgtgagcgctcaccatcccctctgcggggcaacgtggtcccaagcccactgcccactcgccggacgaggaccttctcggcgacggtgcgggcttcacagggccccgtctacaaaggagtctgcaaatgcttctgccggtccaagggccatggcttcattactccagctgatggcggccccgacatcttcctgcacatctctgatgtggaaggggagtatgtcccagtggaaggcgacgaggtcacctataaaatgtgctccatcccacccaagaatgagaagctgcaggccgtggaggtcgtcatcactcacctggcaccaggcaccaagcatgagacctggtctggacatgtcatcagctcctaggagatggtggaagcaccccttgtcctgtgcttgtgggagactttgcagggaggaggcagcagacactggagatgacattcttccacacgagacggggcttcagccgggcatggtccctctcaagtatctcctggaggaaggggtatggggggcaggtgtggggtgtggggtgttcccggccatcagcacagcctatgaccattgcaacaacctctcaccatctgaagagcattaaaagcattt

SEQ ID NO: 113291 - DNA, 565 bp, Homo sapiens
  Payload ID: 2153
  Gene Symbol: CARHSP1
  Gene Name: calcium regulated heat stable protein 1, 24kDa
  ENST ID: ENST00000567908
  CDS Start-End: 189-565
attgtcgtctaagtccccaacttctcagcagggcttcctgttatcttccgccactaccttctccagcctctctctgcctctgttctccctcccttcgggcctttggccctcctctgggctcggggtcctccttggagaccccaccgccctctgcactccctgggtggcctcggtgatgaccgtcagccatgtcatctgagcctcccccaccaccacagccccccacccatcaagcttcagtcgggctgctggacacccctcggagccgtgagcgctcaccatcccctctgcggggcaacgtggtcccaagcccactgcccactcgccggacgaggaccttctcggcgacggtgcgggcttcacagggccccgtctacaaaggagtctgcaaatgcttctgccggtccaagggccatggcttcattactccagctgatggcggccccgacatcttcctgcacatctctgatgtggaaggggagtatgtcccagtggaaggcgacgaggtcacctataaaatgtgctccatcccacccaagaatgagaagctgcaggccgtggaggt

SEQ ID NO: 113292 - DNA, 598 bp, Homo sapiens
  Payload ID: 2153
  Gene Symbol: CARHSP1
  Gene Name: calcium regulated heat stable protein 1, 24kDa
  Uniprot ID: Q9Y2V2
  ENST ID: ENST00000567554
  CDS Start-End: 56-499
caggagttcctccttggccgcggctgtagctgagagaagggacaggaggtcagccatgtcatctgagcctcccccaccaccacagccccccacccatcaagcttcagtcgggctgctggacacccctcggagccgtgagcgctcaccatcccctctgcggggcaacgtggtcccaagcccactgcccactcgccggacgaggaccttctcggcgacggtgcgggcttcacagggccccgtctacaaaggagtctgcaaatgcttctgccggtccaagggccatggcttcattactccagctgatggcggccccgacatcttcctgcacatctctgatgtggaaggggagtatgtcccagtggaaggcgacgaggtcacctataaaatgtgctccatcccacccaagaatgagaagctgcaggccgtggaggtcgtcatcactcacctggcaccaggcaccaagcatgagacctggtctggacatgtcatcagctcctaggagatggtggaagcaccccttgtcctgtgcttgtgggagactttgcagggaggaggcagcagacactggagatgacattcttccacacgagacggggct

SEQ ID NO: 113293 - DNA, 461 bp, Homo sapiens
  Payload ID: 2153
  Gene Symbol: CARHSP1
  Gene Name: calcium regulated heat stable protein 1, 24kDa
  ENST ID: ENST00000568968
  CDS Start-End: 118-461
atgcgggggccctggcccccaggccagcagctggggcctttttgaggtgggggctccccggactcaggagttcctccttggccgcggctgtagctgagagaagggacaggaggtaggatgccacctcctccagaaggtcagccatgtcatctgagcctcccccaccaccacagccccccacccatcaagcttcagtcgggctgctggacacccctcggagccgtgagcgctcaccatcccctctgcggggcaacgtggtcccaagcccactgcccactcgccggacgaggaccttctcggcgacggtgcgggcttcacagggccccgtctacaaaggagtctgcaaatgcttctgccggtccaagggccatggcttcattactccagctgatggcggccccgacatcttcctgcacatctctgatgtggaaggggagtatgtcccagtggaaggcgacgag

SEQ ID NO: 113294 - DNA, 521 bp, Homo sapiens
  Payload ID: 2153
  Gene Symbol: CARHSP1
  Gene Name: calcium regulated heat stable protein 1, 24kDa
  ENST ID: ENST00000568117
  CDS Start-End: 185-521
gtggactgagcccgccgtgcgcttggcattttcgcggcaccatctgcacagcgtccgagccctgcgacgcagcaccgctcctgtcccctttgacagatgaggaaactcgggtggggcggtgaaatcgcctggcaggggtcacagagggagtggggaccagtcagggctcaatctcaggtcagccatgtcatctgagcctcccccaccaccacagccccccacccatcaagcttcagtcgggctgctggacacccctcggagccgtgagcgctcaccatcccctctgcggggcaacgtggtcccaagcccactgcccactcgccggacgaggaccttctcggcgacggtgcgggcttcacagggccccgtctacaaaggagtctgcaaatgcttctgccggtccaagggccatggcttcattactccagctgatggcggccccgacatcttcctgcacatctctgatgtggaaggggagtatgtcccagtggaaggcgacgaggtcacctataaaatgtgct

SEQ ID NO: 113295 - DNA, 442 bp, Homo sapiens
  Payload ID: 2153
  Gene Symbol: CARHSP1
  Gene Name: calcium regulated heat stable protein 1, 24kDa
  ENST ID: ENST00000569398
  CDS Start-End: 230-442
gggggccctggcccccaggccagcagctggggcctttttgaggtgggggctccccggactcaggagttcctccttggccgcggctgtagctgagagaagggacaggagcaggccccccagtcctgggtgcaggcttgtgacagctgctcagggatccaaacgtggcgcttgagctctctgcgacgtgttccacagttccctggaggcggacactgcgtgagggtcagccatgtcatctgagcctcccccaccaccacagccccccacccatcaagcttcagtcgggctgctggacacccctcggagccgtgagcgctcaccatcccctctgcggggcaacgtggtcccaagcccactgcccactcgccggacgaggaccttctcggcgacggtgcgggcttcacagggccccgtctacaaaggagtctgcaaatgcttctgc

SEQ ID NO: 113296 - DNA, 681 bp, Homo sapiens
  Payload ID: 2153
  Gene Symbol: CARHSP1
  Gene Name: calcium regulated heat stable protein 1, 24kDa
  ENST ID: ENST00000570125
  CDS Start-End: 308-681
acttcccgcctggccacctgttctctgcgtgcaggggaagctcttcccgccctccccgctgcttttgcctttgggcgggagccctggacgggggactcgccgggcggtggggcgaggcgcggggggcgtcgcacgcgggaagcagagccaccccccgccgggcctggccgcgccagctgtggctcgaggaggcctctcggagcctcagtttccccatctgcagactgggctctgacttcttctggcatgagagggtgtgtgagagtaaaaggaggcagctagccccgtgccgggagacacgtcagccatgtcatctgagcctcccccaccaccacagccccccacccatcaagcttcagtcgggctgctggacacccctcggagccgtgagcgctcaccatcccctctgcggggcaacgtggtcccaagcccactgcccactcgccggacgaggaccttctcggcgacggtgcgggcttcacagggccccgtctacaaaggagtctgcaaatgcttctgccggtccaagggccatggcttcattactccagctgatggcggccccgacatcttcctgcacatctctgatgtggaaggggagtatgtcccagtggaaggcgacgaggtcacctataaaatgtgctccatcccacccaagaatgagaagctgcaggccgtgga

SEQ ID NO: 113297 - DNA, 843 bp, Homo sapiens
  Payload ID: 2153
  Gene Symbol: CARHSP1
  Gene Name: calcium regulated heat stable protein 1, 24kDa
  ENST ID: ENST00000562843
  CDS Start-End: 303-587
ctgcgctggcggttcaggtttgcaggccggaagtgaaatgttcttttttgatttttaaaaaggaagcctccggccctatggttttctggggttggagtggatgtgtgtgctgggggaggcggagacgtcccgctccaggcagggccttgggtcttaataggtggggaaatctctgccaaataggaggcctctcggagcctcagtttccccatctgcagactgggctctgacttcttctggcatgagagggtgtgtgagagtaaaaggaggcagctagccccgtgccgggagacacgtcagccatgtcatctgagcctcccccaccaccacagccccccacccatcaagcttcagtcgggctgctggacacccctcggagccgtgagcgctcaccatcccctctgcggggcaacgtggtcccaagcccactgcccactcgccggacgaggaccttctcggcgacggtgcgggcttcacagggccccgtctacaaaggagtctgcaaatgcttctgccggtccaagggccatggcttcattactccagctgatggcggccccgacatcttcctgcacatctctgagtgagtcagcggcaggtctgggtggcctggctggggtgggcgcttccttggccctgtggaggtggggatggtgtgtgactctgatgggcgctgggtgtgaggacgaatggctgggcctgtgtgactctgcctgtggctggtgctccagctgtgctcctgtgtgtgtgttgggttggggttgtgagactctacggagctgtgttgggggatgtgaggctgggggcgacacggtacttgtgattgtccctgggtgtgtcttt

SEQ ID NO: 113298 - DNA, 2841 bp, Homo sapiens
  Payload ID: 2153
  Gene Symbol: CARHSP1
  Gene Name: calcium regulated heat stable protein 1, 24kDa
  Uniprot ID: Q9Y2V2
  ENST ID: ENST00000610831
  CDS Start-End: 177-620
attctaggactctatgacctgtgctggtaggtcatgcgggggccctggcccccaggccagcagctggggcctttttgaggtgggggctccccggactcaggagttcctccttggccgcggctgtagctgagagaagggacaggaggtaggatgccacctcctccagaaggtcagccatgtcatctgagcctcccccaccaccacagccccccacccatcaagcttcagtcgggctgctggacacccctcggagccgtgagcgctcaccatcccctctgcggggcaacgtggtcccaagcccactgcccactcgccggacgaggaccttctcggcgacggtgcgggcttcacagggccccgtctacaaaggagtctgcaaatgcttctgccggtccaagggccatggcttcattactccagctgatggcggccccgacatcttcctgcacatctctgatgtggaaggggagtatgtcccagtggaaggcgacgaggtcacctataaaatgtgctccatcccacccaagaatgagaagctgcaggccgtggaggtcgtcatcactcacctggcaccaggcaccaagcatgagacctggtctggacatgtcatcagctcctaggagatggtggaagcaccccttgtcctgtgcttgtgggagactttgcagggaggaggcagcagacactggagatgacattcttccacacgagacggggcttcagccgggcatggtccctctcaagtatctcctggaggaaggggtatggggggcaggtgtggggtgtggggtgttcccggccatcagcacagcctatgaccattgcaacaacctctcaccatctgaagagcattaaaagcatttaaaaaggagaggtgcccactggtggctgagtggaggttccaaccccatcccagggagtggatcaagggtggtatttctccagctgctcagacacatgggctcaacccacagaatccctcttcctcctggagctggaggccccagattcccagatctggccccctggcagcctgacagggaccttgcgtgacttctccaaggcaaatttccacctaagtgccccttgcgcctctcctggggcctgggcaaagcagttttctaattcttggcttggttggttctaggggagctggcttgaagtgggtggggaaaggcgggggtggcggtctttggattggacggatgttgccttttggtgcctttgcagtgggaggcggcatagctgcctgtctggggaagacagttctcccagcactcccacccctgggcacagcaggctggtactgggaggctgaacccctcttagagcctgaccttttcatctgccttctggttgtgtgaccatcactcaacagccatttcacagcccctgtaattatggcggcggggggctggggtggtggtggtgggaagggcttgtggagaggacacagtctttgtttaaaaactttgtcccgatccatccagaaaagagtaggtagcttgcatcctgacagcctggcaaagtcaagaaagttgaaggagaaacatacctttggagagggggttttctttaaaactagtgttaagaaatgcttagggattttttttttcttatttttcataactaaagctttcacccagagccggctctgtttgcactttgctgccgacattgcaaactttttggcagggtgggagactgagtctcattctgtcacccaggctggagtgcagtggcccgatctcagcttactgcaacctctgccctccagggttctggcaattccgcctcagtctcctgagtagctgggattacaggcatgcgccaccacacccggttaatttttgtatttttagtagagaccaggtttcatcatgttgggcaggatggtcttgaacccctgacctcagatgatctgcccatctcggcctctcaaagtgctgggattacaagtgtgagccatcgcgcccggcctgcaaacttttttgtaggtatttctggtaaacaaatccttaggttatctttgctgtggttgtggtttggctttagtcatgatttcaaagtagaaatagctaggcattattttttgaaatatatgacctatatgtagtcaagaatccactgaacagaggcaagcaaaccttttggaaactggcttttgggcagacagtaaacgtccagtttgatgctggaagcatgaacagcttcatcaggtaggtactcctcaactctgatgagtttgtcctttcagcctaagggggtggaagggagttgtttgagaatagcaaatacgcatgttgattgcgagtgtgtggagacaaaggcagttcccaccacagttaggtcctggccattgtttcctcgcctgcgatgctccttgtacatcctcaccctcctctcccgcctctgccttctgctgggtcaaaggtggccttttctctccagccttgaattgttccctgttggcttcccaagggcccatctgctggtacagtccacacttccacagccaagacccgagagggctttcactgccccaagcctctctcctgtgaccctgggattctgtcttggcagaatcctttgtcagcggctcttactctgtccttcctgtttggccacagctctttcaatcaatgggtattctagaaccgcaggatgtcagagctggaagggacgcgataccggtttacacaaggggaaactcctcgaggctctgggagggacggagggttttggtgacagagcgagagctaaaattgaggattcctgaatccagatcttgcctcccatcagccatctttctcccaataaatttttgttttgtgcaaggct

SEQ ID NO: 113299 - DNA, 2849 bp, Homo sapiens
  Payload ID: 2153
  Gene Symbol: CARHSP1
  Gene Name: calcium regulated heat stable protein 1, 24kDa
  Uniprot ID: Q9Y2V2
  ENST ID: ENST00000619881
  CDS Start-End: 185-628
gtggactgagcccgccgtgcgcttggcattttcgcggcaccatctgcacagcgtccgagccctgcgacgcagcaccgctcctgtcccctttgacagatgaggaaactcgggtggggcggtgaaatcgcctggcaggggtcacagagggagtggggaccagtcagggctcaatctcaggtcagccatgtcatctgagcctcccccaccaccacagccccccacccatcaagcttcagtcgggctgctggacacccctcggagccgtgagcgctcaccatcccctctgcggggcaacgtggtcccaagcccactgcccactcgccggacgaggaccttctcggcgacggtgcgggcttcacagggccccgtctacaaaggagtctgcaaatgcttctgccggtccaagggccatggcttcattactccagctgatggcggccccgacatcttcctgcacatctctgatgtggaaggggagtatgtcccagtggaaggcgacgaggtcacctataaaatgtgctccatcccacccaagaatgagaagctgcaggccgtggaggtcgtcatcactcacctggcaccaggcaccaagcatgagacctggtctggacatgtcatcagctcctaggagatggtggaagcaccccttgtcctgtgcttgtgggagactttgcagggaggaggcagcagacactggagatgacattcttccacacgagacggggcttcagccgggcatggtccctctcaagtatctcctggaggaaggggtatggggggcaggtgtggggtgtggggtgttcccggccatcagcacagcctatgaccattgcaacaacctctcaccatctgaagagcattaaaagcatttaaaaaggagaggtgcccactggtggctgagtggaggttccaaccccatcccagggagtggatcaagggtggtatttctccagctgctcagacacatgggctcaacccacagaatccctcttcctcctggagctggaggccccagattcccagatctggccccctggcagcctgacagggaccttgcgtgacttctccaaggcaaatttccacctaagtgccccttgcgcctctcctggggcctgggcaaagcagttttctaattcttggcttggttggttctaggggagctggcttgaagtgggtggggaaaggcgggggtggcggtctttggattggacggatgttgccttttggtgcctttgcagtgggaggcggcatagctgcctgtctggggaagacagttctcccagcactcccacccctgggcacagcaggctggtactgggaggctgaacccctcttagagcctgaccttttcatctgccttctggttgtgtgaccatcactcaacagccatttcacagcccctgtaattatggcggcggggggctggggtggtggtggtgggaagggcttgtggagaggacacagtctttgtttaaaaactttgtcccgatccatccagaaaagagtaggtagcttgcatcctgacagcctggcaaagtcaagaaagttgaaggagaaacatacctttggagagggggttttctttaaaactagtgttaagaaatgcttagggattttttttttcttatttttcataactaaagctttcacccagagccggctctgtttgcactttgctgccgacattgcaaactttttggcagggtgggagactgagtctcattctgtcacccaggctggagtgcagtggcccgatctcagcttactgcaacctctgccctccagggttctggcaattccgcctcagtctcctgagtagctgggattacaggcatgcgccaccacacccggttaatttttgtatttttagtagagaccaggtttcatcatgttgggcaggatggtcttgaacccctgacctcagatgatctgcccatctcggcctctcaaagtgctgggattacaagtgtgagccatcgcgcccggcctgcaaacttttttgtaggtatttctggtaaacaaatccttaggttatctttgctgtggttgtggtttggctttagtcatgatttcaaagtagaaatagctaggcattattttttgaaatatatgacctatatgtagtcaagaatccactgaacagaggcaagcaaaccttttggaaactggcttttgggcagacagtaaacgtccagtttgatgctggaagcatgaacagcttcatcaggtaggtactcctcaactctgatgagtttgtcctttcagcctaagggggtggaagggagttgtttgagaatagcaaatacgcatgttgattgcgagtgtgtggagacaaaggcagttcccaccacagttaggtcctggccattgtttcctcgcctgcgatgctccttgtacatcctcaccctcctctcccgcctctgccttctgctgggtcaaaggtggccttttctctccagccttgaattgttccctgttggcttcccaagggcccatctgctggtacagtccacacttccacagccaagacccgagagggctttcactgccccaagcctctctcctgtgaccctgggattctgtcttggcagaatcctttgtcagcggctcttactctgtccttcctgtttggccacagctctttcaatcaatgggtattctagaaccgcaggatgtcagagctggaagggacgcgataccggtttacacaaggggaaactcctcgaggctctgggagggacggagggttttggtgacagagcgagagctaaaattgaggattcctgaatccagatcttgcctcccatcagccatctttctcccaataaatttttgttttgtgcaaggct

SEQ ID NO: 113300 - DNA, 2931 bp, Homo sapiens
  Payload ID: 2153
  Gene Symbol: CARHSP1
  Gene Name: calcium regulated heat stable protein 1, 24kDa
  Uniprot ID: Q9Y2V2
  ENST ID: ENST00000614449
  CDS Start-End: 267-710
attctaggactctatgacctgtgctggtaggtcatgcgggggccctggcccccaggccagcagctggggcctttttgaggtgggggctccccggactcaggagttcctccttggccgcggctgtagctgagagaagggacaggagcaggccccccagtcctgggtgcaggcttgtgacagctgctcagggatccaaacgtggcgcttgagctctctgcgacgtgttccacagttccctggaggcggacactgcgtgagggtcagccatgtcatctgagcctcccccaccaccacagccccccacccatcaagcttcagtcgggctgctggacacccctcggagccgtgagcgctcaccatcccctctgcggggcaacgtggtcccaagcccactgcccactcgccggacgaggaccttctcggcgacggtgcgggcttcacagggccccgtctacaaaggagtctgcaaatgcttctgccggtccaagggccatggcttcattactccagctgatggcggccccgacatcttcctgcacatctctgatgtggaaggggagtatgtcccagtggaaggcgacgaggtcacctataaaatgtgctccatcccacccaagaatgagaagctgcaggccgtggaggtcgtcatcactcacctggcaccaggcaccaagcatgagacctggtctggacatgtcatcagctcctaggagatggtggaagcaccccttgtcctgtgcttgtgggagactttgcagggaggaggcagcagacactggagatgacattcttccacacgagacggggcttcagccgggcatggtccctctcaagtatctcctggaggaaggggtatggggggcaggtgtggggtgtggggtgttcccggccatcagcacagcctatgaccattgcaacaacctctcaccatctgaagagcattaaaagcatttaaaaaggagaggtgcccactggtggctgagtggaggttccaaccccatcccagggagtggatcaagggtggtatttctccagctgctcagacacatgggctcaacccacagaatccctcttcctcctggagctggaggccccagattcccagatctggccccctggcagcctgacagggaccttgcgtgacttctccaaggcaaatttccacctaagtgccccttgcgcctctcctggggcctgggcaaagcagttttctaattcttggcttggttggttctaggggagctggcttgaagtgggtggggaaaggcgggggtggcggtctttggattggacggatgttgccttttggtgcctttgcagtgggaggcggcatagctgcctgtctggggaagacagttctcccagcactcccacccctgggcacagcaggctggtactgggaggctgaacccctcttagagcctgaccttttcatctgccttctggttgtgtgaccatcactcaacagccatttcacagcccctgtaattatggcggcggggggctggggtggtggtggtgggaagggcttgtggagaggacacagtctttgtttaaaaactttgtcccgatccatccagaaaagagtaggtagcttgcatcctgacagcctggcaaagtcaagaaagttgaaggagaaacatacctttggagagggggttttctttaaaactagtgttaagaaatgcttagggattttttttttcttatttttcataactaaagctttcacccagagccggctctgtttgcactttgctgccgacattgcaaactttttggcagggtgggagactgagtctcattctgtcacccaggctggagtgcagtggcccgatctcagcttactgcaacctctgccctccagggttctggcaattccgcctcagtctcctgagtagctgggattacaggcatgcgccaccacacccggttaatttttgtatttttagtagagaccaggtttcatcatgttgggcaggatggtcttgaacccctgacctcagatgatctgcccatctcggcctctcaaagtgctgggattacaagtgtgagccatcgcgcccggcctgcaaacttttttgtaggtatttctggtaaacaaatccttaggttatctttgctgtggttgtggtttggctttagtcatgatttcaaagtagaaatagctaggcattattttttgaaatatatgacctatatgtagtcaagaatccactgaacagaggcaagcaaaccttttggaaactggcttttgggcagacagtaaacgtccagtttgatgctggaagcatgaacagcttcatcaggtaggtactcctcaactctgatgagtttgtcctttcagcctaagggggtggaagggagttgtttgagaatagcaaatacgcatgttgattgcgagtgtgtggagacaaaggcagttcccaccacagttaggtcctggccattgtttcctcgcctgcgatgctccttgtacatcctcaccctcctctcccgcctctgccttctgctgggtcaaaggtggccttttctctccagccttgaattgttccctgttggcttcccaagggcccatctgctggtacagtccacacttccacagccaagacccgagagggctttcactgccccaagcctctctcctgtgaccctgggattctgtcttggcagaatcctttgtcagcggctcttactctgtccttcctgtttggccacagctctttcaatcaatgggtattctagaaccgcaggatgtcagagctggaagggacgcgataccggtttacacaaggggaaactcctcgaggctctgggagggacggagggttttggtgacagagcgagagctaaaattgaggattcctgaatccagatcttgcctcccatcagccatctttctcccaataaatttttgttttgtgcaaggct

SEQ ID NO: 113301 - DNA, 2833 bp, Homo sapiens
  Payload ID: 2153
  Gene Symbol: CARHSP1
  Gene Name: calcium regulated heat stable protein 1, 24kDa
  Uniprot ID: Q9Y2V2
  ENST ID: ENST00000611932
  CDS Start-End: 169-612
gctctcagtcggagcgaagcggctggcggagcagaacggattgcaggcaggccccccagtcctgggtgcaggcttgtgacagctgctcagggatccaaacgtggcgcttgagctctctgcgacgtgttccacagttccctggaggcggacactgcgtgagggtcagccatgtcatctgagcctcccccaccaccacagccccccacccatcaagcttcagtcgggctgctggacacccctcggagccgtgagcgctcaccatcccctctgcggggcaacgtggtcccaagcccactgcccactcgccggacgaggaccttctcggcgacggtgcgggcttcacagggccccgtctacaaaggagtctgcaaatgcttctgccggtccaagggccatggcttcattactccagctgatggcggccccgacatcttcctgcacatctctgatgtggaaggggagtatgtcccagtggaaggcgacgaggtcacctataaaatgtgctccatcccacccaagaatgagaagctgcaggccgtggaggtcgtcatcactcacctggcaccaggcaccaagcatgagacctggtctggacatgtcatcagctcctaggagatggtggaagcaccccttgtcctgtgcttgtgggagactttgcagggaggaggcagcagacactggagatgacattcttccacacgagacggggcttcagccgggcatggtccctctcaagtatctcctggaggaaggggtatggggggcaggtgtggggtgtggggtgttcccggccatcagcacagcctatgaccattgcaacaacctctcaccatctgaagagcattaaaagcatttaaaaaggagaggtgcccactggtggctgagtggaggttccaaccccatcccagggagtggatcaagggtggtatttctccagctgctcagacacatgggctcaacccacagaatccctcttcctcctggagctggaggccccagattcccagatctggccccctggcagcctgacagggaccttgcgtgacttctccaaggcaaatttccacctaagtgccccttgcgcctctcctggggcctgggcaaagcagttttctaattcttggcttggttggttctaggggagctggcttgaagtgggtggggaaaggcgggggtggcggtctttggattggacggatgttgccttttggtgcctttgcagtgggaggcggcatagctgcctgtctggggaagacagttctcccagcactcccacccctgggcacagcaggctggtactgggaggctgaacccctcttagagcctgaccttttcatctgccttctggttgtgtgaccatcactcaacagccatttcacagcccctgtaattatggcggcggggggctggggtggtggtggtgggaagggcttgtggagaggacacagtctttgtttaaaaactttgtcccgatccatccagaaaagagtaggtagcttgcatcctgacagcctggcaaagtcaagaaagttgaaggagaaacatacctttggagagggggttttctttaaaactagtgttaagaaatgcttagggattttttttttcttatttttcataactaaagctttcacccagagccggctctgtttgcactttgctgccgacattgcaaactttttggcagggtgggagactgagtctcattctgtcacccaggctggagtgcagtggcccgatctcagcttactgcaacctctgccctccagggttctggcaattccgcctcagtctcctgagtagctgggattacaggcatgcgccaccacacccggttaatttttgtatttttagtagagaccaggtttcatcatgttgggcaggatggtcttgaacccctgacctcagatgatctgcccatctcggcctctcaaagtgctgggattacaagtgtgagccatcgcgcccggcctgcaaacttttttgtaggtatttctggtaaacaaatccttaggttatctttgctgtggttgtggtttggctttagtcatgatttcaaagtagaaatagctaggcattattttttgaaatatatgacctatatgtagtcaagaatccactgaacagaggcaagcaaaccttttggaaactggcttttgggcagacagtaaacgtccagtttgatgctggaagcatgaacagcttcatcaggtaggtactcctcaactctgatgagtttgtcctttcagcctaagggggtggaagggagttgtttgagaatagcaaatacgcatgttgattgcgagtgtgtggagacaaaggcagttcccaccacagttaggtcctggccattgtttcctcgcctgcgatgctccttgtacatcctcaccctcctctcccgcctctgccttctgctgggtcaaaggtggccttttctctccagccttgaattgttccctgttggcttcccaagggcccatctgctggtacagtccacacttccacagccaagacccgagagggctttcactgccccaagcctctctcctgtgaccctgggattctgtcttggcagaatcctttgtcagcggctcttactctgtccttcctgtttggccacagctctttcaatcaatgggtattctagaaccgcaggatgtcagagctggaagggacgcgataccggtttacacaaggggaaactcctcgaggctctgggagggacggagggttttggtgacagagcgagagctaaaattgaggattcctgaatccagatcttgcctcccatcagccatctttctcccaataaatttttgttttgtgcaaggct

SEQ ID NO: 113302 - DNA, 2972 bp, Homo sapiens
  Payload ID: 2153
  Gene Symbol: CARHSP1
  Gene Name: calcium regulated heat stable protein 1, 24kDa
  Uniprot ID: Q9Y2V2
  ENST ID: ENST00000618335
  CDS Start-End: 308-751
acttcccgcctggccacctgttctctgcgtgcaggggaagctcttcccgccctccccgctgcttttgcctttgggcgggagccctggacgggggactcgccgggcggtggggcgaggcgcggggggcgtcgcacgcgggaagcagagccaccccccgccgggcctggccgcgccagctgtggctcgaggaggcctctcggagcctcagtttccccatctgcagactgggctctgacttcttctggcatgagagggtgtgtgagagtaaaaggaggcagctagccccgtgccgggagacacgtcagccatgtcatctgagcctcccccaccaccacagccccccacccatcaagcttcagtcgggctgctggacacccctcggagccgtgagcgctcaccatcccctctgcggggcaacgtggtcccaagcccactgcccactcgccggacgaggaccttctcggcgacggtgcgggcttcacagggccccgtctacaaaggagtctgcaaatgcttctgccggtccaagggccatggcttcattactccagctgatggcggccccgacatcttcctgcacatctctgatgtggaaggggagtatgtcccagtggaaggcgacgaggtcacctataaaatgtgctccatcccacccaagaatgagaagctgcaggccgtggaggtcgtcatcactcacctggcaccaggcaccaagcatgagacctggtctggacatgtcatcagctcctaggagatggtggaagcaccccttgtcctgtgcttgtgggagactttgcagggaggaggcagcagacactggagatgacattcttccacacgagacggggcttcagccgggcatggtccctctcaagtatctcctggaggaaggggtatggggggcaggtgtggggtgtggggtgttcccggccatcagcacagcctatgaccattgcaacaacctctcaccatctgaagagcattaaaagcatttaaaaaggagaggtgcccactggtggctgagtggaggttccaaccccatcccagggagtggatcaagggtggtatttctccagctgctcagacacatgggctcaacccacagaatccctcttcctcctggagctggaggccccagattcccagatctggccccctggcagcctgacagggaccttgcgtgacttctccaaggcaaatttccacctaagtgccccttgcgcctctcctggggcctgggcaaagcagttttctaattcttggcttggttggttctaggggagctggcttgaagtgggtggggaaaggcgggggtggcggtctttggattggacggatgttgccttttggtgcctttgcagtgggaggcggcatagctgcctgtctggggaagacagttctcccagcactcccacccctgggcacagcaggctggtactgggaggctgaacccctcttagagcctgaccttttcatctgccttctggttgtgtgaccatcactcaacagccatttcacagcccctgtaattatggcggcggggggctggggtggtggtggtgggaagggcttgtggagaggacacagtctttgtttaaaaactttgtcccgatccatccagaaaagagtaggtagcttgcatcctgacagcctggcaaagtcaagaaagttgaaggagaaacatacctttggagagggggttttctttaaaactagtgttaagaaatgcttagggattttttttttcttatttttcataactaaagctttcacccagagccggctctgtttgcactttgctgccgacattgcaaactttttggcagggtgggagactgagtctcattctgtcacccaggctggagtgcagtggcccgatctcagcttactgcaacctctgccctccagggttctggcaattccgcctcagtctcctgagtagctgggattacaggcatgcgccaccacacccggttaatttttgtatttttagtagagaccaggtttcatcatgttgggcaggatggtcttgaacccctgacctcagatgatctgcccatctcggcctctcaaagtgctgggattacaagtgtgagccatcgcgcccggcctgcaaacttttttgtaggtatttctggtaaacaaatccttaggttatctttgctgtggttgtggtttggctttagtcatgatttcaaagtagaaatagctaggcattattttttgaaatatatgacctatatgtagtcaagaatccactgaacagaggcaagcaaaccttttggaaactggcttttgggcagacagtaaacgtccagtttgatgctggaagcatgaacagcttcatcaggtaggtactcctcaactctgatgagtttgtcctttcagcctaagggggtggaagggagttgtttgagaatagcaaatacgcatgttgattgcgagtgtgtggagacaaaggcagttcccaccacagttaggtcctggccattgtttcctcgcctgcgatgctccttgtacatcctcaccctcctctcccgcctctgccttctgctgggtcaaaggtggccttttctctccagccttgaattgttccctgttggcttcccaagggcccatctgctggtacagtccacacttccacagccaagacccgagagggctttcactgccccaagcctctctcctgtgaccctgggattctgtcttggcagaatcctttgtcagcggctcttactctgtccttcctgtttggccacagctctttcaatcaatgggtattctagaaccgcaggatgtcagagctggaagggacgcgataccggtttacacaaggggaaactcctcgaggctctgggagggacggagggttttggtgacagagcgagagctaaaattgaggattcctgaatccagatcttgcctcccatcagccatctttctcccaataaatttttgttttgtgcaaggct

SEQ ID NO: 113303 - DNA, 2186 bp, Homo sapiens
  Payload ID: 2154
  Gene Symbol: CRACR2A
  Gene Name: calcium release activated channel regulator 2A
  Uniprot ID: Q9BSW2
  ENST ID: ENST00000252322
  CDS Start-End: 470-1657
gtcgggcggagcaggcggctgcttgacagctgagagccgagcgggcggcgcgggcaggtccacgggaagcctacacgcccaaggtcatgccctgaccacagctgcccttcaggaggctggcacggagccacctggggccattgggctgtttgtcaagggtggggcagcagcaacttgccactcttcctccatgagcccagccagagcctccactgggcacttagcacaagaaaaaccctgcaggagccggatccagagcgctgggattcagcaggagtgccaggagaattcaacacaggtgtgctgcctcctctcctgccaggtgtgtggctgcacaggagtcttgctgatggtggaattcaagtcaccagtggccaaagtaccctccaggtgtgaagagttgcaggtcctccgaggagccgggagctgcaaggttctgaaaaagacttcaagaaactgactaatcgcgatggctgcccctgacgggagggtagtctccagaccccagagacttggtcaggggtctggccaggggccaaaggggagtggagcctgcctgcatcccctggacagcctggagcagaaggagactcaggagcaaacgtcgggccagctagtcatgctgaggaaggcacaggagttctttcagacctgtgatgctgaaggcaagggcttcatcgccaggaaggatatgcagaggctgcataaggagctaccgctcagcctggaggaactggaggatgtgtttgatgccctggatgctgatggcaatggctatctgaccccacaggagttcactactggatttagtcacttcttcttcagccagaataacccaagtcaggaagatgcaggtgaacaggtggcccagcgccatgaagagaaggtgtatctgtccagaggggatgaggatctgggcgacatgggcgaagatgaggaagcccagttccggatgctgatggacagacttggagcccaaaaggtgttggaagatgaaagtgatgtcaagcagctctggttgcagctgaagaaggaggaacctcatttactgtccaactttgaagacttcctgaccagaatcatctcccagctccaagaagcccatgaggagaagaatgaactggagtgtgccctaaaaaggaaaattgctgcttatgatgaagaaatccagcatctctatgaggagatggaacaacaaatcaaaagtgagaaggagcagtttctcctgaaggacacagagaggtttcaagcccgcagtcaagagctggagcagaaactgttatgtaaggagcaggagctggagcagctcacccagaagcagaaaaggctggaaggtcagtgcacagccctgcatcatgacaagcatgagaccaaggctgagaataccaagctgaaactcactaaccaggagctggcccgggagctggagcggacttcctgggagctccaggatgctcagcagcagttggaaagcctccagcaagaggcctgcaaactccaccaagagaaggagatggaagtgtaccgtgtgacggagagtctacagcgtgagaaggccgggctcctcaagcagctggatttcctaaggtgcgtcggtgggcactggcctgtgctgagagcacctcccagaagcctggggtcggaaggaccagtctgagggtcatccttgcctacgtgctggaaaaacgtgcctgctgagagagtgccctcaattcccttggtccccagtgcagtgtttggaccaccaagtagccactctattatgtttggtccgtttacacatgcgcccacatccagtttattcctcctggtggggaggctctgccccactcctctgagtccctcacaggactgtgcttggtacttgatctcatgcgagcagagctgggtttaatgagcatttaatctatgctagaaatattatctcgttcattgtcagcaaaactgttaggtgagtagggcagttcattcacaggaatttactgatgggaagttgatattagaggaaagaagtaatttaccacaggcgacacagctactctctgatggggccagaatggaaatccgtaactcggctgtgttctgttcatgtttgttgaatgagtaaatgaatcacaaacagagcaccaagaaaaagctttctcagccttcaaagacccccagcaataaactcaaagtttactggt

SEQ ID NO: 113304 - DNA, 3207 bp, Homo sapiens
  Payload ID: 2154
  Gene Symbol: CRACR2A
  Gene Name: calcium release activated channel regulator 2A
  ENST ID: ENST00000333750
  CDS Start-End: 1-596
aagacttcctgaccagaatcatctcccagctccaagaagcccatgaggagaagaatgaactggagtgtgccctaaaaaggaaaattgctgcttatgatgaagaaatccagcatctctatgaggagatggaacaacaaatcaaaagtgagaaggagcagtttctcctgaaggacacagagaggtttcaagcccgcagtcaagagctggagcagaaactgttatgtaaggagcaggagctggagcagctcacccagaagcagaaaaggctggaaggtcagtgcacagccctgcatcatgacaagcatgagaccaaggctgagaataccaagctgaaactcactaaccaggagctggcccgggagctggagcggacttcctgggagctccaggatgctcagcagcagttggaaagcctccagcaagaggcctgcaaactccaccaagagaaggagatggaagtgtaccgtgtgacggagagtctacagcgtgagaaggccgggctcctcaagcagctggatttcctaaggtgcgtcggtgggcactggcctgtgctgagagcacctcccagaagcctggggtcggaaggaccagtctgagggtcatccttgcctacgtgctggaaaaacgtgcctgctgagagagtgccctcaattcccttggtccccagtgcagtgtttggaccaccaagtagccactctattatgtttgggaaaggaacaagcaccttcgggatgaacgggacatatgttttcagaaaaataaggcagccaaggcaaacacagctgcttccagggcaagttggaaaaagagatctggctctgtgataggcaaatatgtggacagcagagggattcttaggagtagccagtcagaggaggaggaggaggtgtttggcatcccaaggagaagctccctgggcctgagtggatatcccctaacagaagaggagccaggaaccggggagccagggcctgggggtccgtacccccggccgctccgcagaatcatctccgttgaagaagaccccctgccccagctcctggatggtggctttgagcaacccctgagcaaatgctcagaagaggaagaggtctctgaccagggggtacagggacaaatcccggaggccccacccttgaaactcacccccacatccccccgagggcagcctgttggaaaagaagccctgtgtaaggaggaaagctctccctctgcccctgaccggctcttcaagattgtgttcgtgggcaattccgcggtggggaagacatccttcctgaggagattctgtgaggaccggttctccccaggcatggcggccactgtgggcattgattaccgtgtgaagacgttgaatgtggacaactctcaggtggccctgcagctgtgggacacggctgggcaggagaggtaccggtgcatcacccagcagttcttcagaaaggcagatggtgtcatcgtcatgtacgatctcacagacaagcagtcgttcctgtcggtccggcggtggctgagcagcgtggaggaagctgtgggagaccgggtgcctgttcttctgctgggtaataagcttgacaacgagaaggagcgggaagtcccccggggcctcggagagcagcttgccacggagaacaatctgatcttctatgaatgcagcgcctactctggtcacaacaccaaagagtccctgctccatctggccaggttcctcaaggagcaagaagacacagtgagagaggacaccattcaggtcggccaccctgctaagaagaaatcctgctgtggctgatagggtcctacaaggactgcccccagcaaacctgaggtcacagagcctgccctgatcctgcacacggctcctgcacagatgccacccaccggggcccgcccagtccttttctttgtcagtcactcacctcccccaaaaggaagggaagcacatcccatcaggagagctgctcttggagcatctcagagtcttttctctcctttctctttctagaccccagatgcctgtccctgctttgttgttgttgttgttttccccgacttagtttcctaggggaaagaaacagatgggcttttccagaaaagccaccacgtgccttctccacgcccccttctcctccccttgcccttaggagcctcagcactgctgttgccgtgacaactatgcagggctcgacttgcggcttcctgcaggccaaagacagtgtggtgcccaacaaagcatccgtctcaacaccccgcggcctccccagctgccactagtagcaatccattacccacaggcagctcaacaactcaatgtgacttgggctccacgcctctacacaaaagatgcttccctgccctgttctcctccttcctgttgtgaaagcagcctcccttgcccttacccagctgtggctctctcagcggcttcctctagccccaaaggcctgctcagaataaggacctgcacacaagttgtgtggccctgggcaaaacctggagctgcttgatgttctgagcctgctttcaaatctgcaaaatagtgctctctgccttactccctcgcaggctcgtgtgaaggtcaaaagagaactcctgggaaagagcttagtcagctgaaaggctctaaacaaatgatagttattacatcgtcctctgtctccccatgcaagagaccagaacaaaacaatatacaaaagagagagaaaatcccacacctcttggtaactggaaaggctgaggccatgggtgagagcacctcccatttccctgggaaaggagaataagtaaaacttgaattccttcaattagagactcatctaagaatcctttctatcttcccactctgttttgaagtaggacagggggcccagcatcacagacgacaaggttcttaccttgtagttctggtctcatttgtttctgtatttatcaagcctggtacataaacacagtaggtaggtggatggatgaatttgctgtccggtcaagacttcagctagcacattcctaattgacctgcctttacatatatggtttctaaaacactttcacactgggatgatgacagagttctggagatggatggtggtgatggttgcacacactattgggaatatacttaatgacgttgaattgtacatttttaaatggttaaaattgtaaattttatggtatgtatattttaccacaataaaaaattttaagaagaaa

SEQ ID NO: 113305 - DNA, 2697 bp, Homo sapiens
  Payload ID: 2154
  Gene Symbol: CRACR2A
  Gene Name: calcium release activated channel regulator 2A
  Uniprot ID: Q9BSW2
  ENST ID: ENST00000440314
  CDS Start-End: 475-2670
aaagagtcgggcggagcaggcggctgcttgacagctgagagccgagcgggcggcgcgggcaggtccacgggaagcctacacgcccaaggtcatgccctgaccacagctgcccttcaggaggctggcacggagccacctggggccattgggctgtttgtcaagggtggggcagcagcaacttgccactcttcctccatgagcccagccagagcctccactgggcacttagcacaagaaaaaccctgcaggagccggatccagagcgctgggattcagcaggagtgccaggagaattcaacacaggtgtgctgcctcctctcctgccaggtgtgtggctgcacaggagtcttgctgatggtggaattcaagtcaccagtggccaaagtaccctccaggtgtgaagagttgcaggtcctccgaggagccgggagctgcaaggttctgaaaaagacttcaagaaactgactaatcgcgatggctgcccctgacgggagggtagtctccagaccccagagacttggtcaggggtctggccaggggccaaaggggagtggagcctgcctgcatcccctggacagcctggagcagaaggagactcaggagcaaacgtcgggccagctagtcatgctgaggaaggcacaggagttctttcagacctgtgatgctgaaggcaagggcttcatcgccaggaaggatatgcagaggctgcataaggagctaccgctcagcctggaggaactggaggatgtgtttgatgccctggatgctgatggcaatggctatctgaccccacaggagttcactactggatttagtcacttcttcttcagccagaataacccaagtcaggaagatgcaggtgaacaggtggcccagcgccatgaagagaaggtgtatctgtccagaggggatgaggatctgggcgacatgggcgaagatgaggaagcccagttccggatgctgatggacagacttggagcccaaaaggtgttggaagatgaaagtgatgtcaagcagctctggttgcagctgaagaaggaggaacctcatttactgtccaactttgaagacttcctgaccagaatcatctcccagctccaagaagcccatgaggagaagaatgaactggagtgtgccctaaaaaggaaaattgctgcttatgatgaagaaatccagcatctctatgaggagatggaacaacaaatcaaaagtgagaaggagcagtttctcctgaaggacacagagaggtttcaagcccgcagtcaagagctggagcagaaactgttatgtaaggagcaggagctggagcagctcacccagaagcagaaaaggctggaaggtcagtgcacagccctgcatcatgacaagcatgagaccaaggctgagaataccaagctgaaactcactaaccaggagctggcccgggagctggagcggacttcctgggagctccaggatgctcagcagcagttggaaagcctccagcaagaggcctgcaaactccaccaagagaaggagatggaagtgtaccgtgtgacggagagtctacagcgtgagaaggccgggctcctcaagcagctggatttcctaagggaaaggaacaagcaccttcgggatgaacgggacatatgttttcagaaaaataaggcagccaaggcaaacacagctgcttccagggcaagttggaaaaagagatctggctctgtgataggcaaatatgtggacagcagagggattcttaggagccagtcagaggaggaggaggaggtgtttggcatcccaaggagaagctccctgggcctgagtggatatcccctaacagaagaggagccaggaaccggggagccagggcctgggggtccgtacccccggccgctccgcagaatcatctccgttgaagaagaccccctgccccagctcctggatggtggctttgagcaacccctgagcaaatgctcagaagaggaagaggtctctgaccagggggtacagggacaaatcccggaggccccacccttgaaactcacccccacatccccccgagggcagcctgttggaaaagaagccctgtgtaaggaggaaagctctccctctgcccctgaccggctcttcaagattgtgttcgtgggcaattccgcggtggggaagacatccttcctgaggagattctgtgaggaccggttctccccaggcatggcggccactgtgggcattgattaccgtgtgaagacgttgaatgtggacaactctcaggtggccctgcagctgtgggacacggctgggcaggagaggtaccggtgcatcacccagcagttcttcagaaaggcagatggtgtcatcgtcatgtacgatctcacagacaagcagtcgttcctgtcggtccggcggtggctgagcagcgtggaggaagctgtgggagaccgggtgcctgttcttctgctgggtaataagcttgacaacgagaaggagcgggaagtcccccggggcctcggagagcagcttgccacggagaacaatctgatcttctatgaatgcagcgcctactctggtcacaacaccaaagagtccctgctccatctggccaggttcctcaaggagcaagaagacacagtgagagaggacaccattcaggtcggccaccctgctaagaagaaatcctgctgtggctgatagggtcctacaaggactgcccccagc

SEQ ID NO: 113306 - DNA, 630 bp, Homo sapiens
  Payload ID: 2154
  Gene Symbol: CRACR2A
  Gene Name: calcium release activated channel regulator 2A
  ENST ID: ENST00000535292
  CDS Start-End: 1-355
agagaaggagatggaagtgtaccgtgtgacggagagtctacagcgtgagaaggccgggctcctcaagcagctggatttcctaagggaaaggaacaagcaccttcgggatgaacgggacatatgttttcagaaaaataaggcagccaaggcaaacacagctgcttccagggcaagttggaaaaagagatctggctctgtgataggcaaatatgtggacagcagagggattcttaggagatggccacagagagatagaggcatcccgactcttcagtatcagacccagagagaccttgaagactgcaagcatgaaatgaaaaagatatgcaaagcggaagtgactctggagatgtaaatcagctcatcagtaaaacctttgggcctgatcatcatgaattcttgttctaaatagctgaataatgagatacaatttgggagccaaatctctgcaatagtggttggcctgttggttcctcagaatggaatggattgattgattgattcagcagacgtttactgattacctactgtgtaccagacattcttttgagttctgtaaagcctccaaaaataaattagacatgaggtcctaccattaatctccattattaaatgctcacttaataaata

SEQ ID NO: 113307 - DNA, 1663 bp, Homo sapiens
  Payload ID: 2155
  Gene Symbol: CRACR2B
  Gene Name: calcium release activated channel regulator 2B
  Uniprot ID: Q8N4Y2
  ENST ID: ENST00000450448
  CDS Start-End: 349-1233
gtcttctccactggcccctgagattgccatcacctccagctcctcctctcctgaagttggcagcccctcctgggttccagcctcctgagatgccagacccactggggcagtacccacaggccctgagcctacatcaaccaccccagtgacaccccaagcctgcagcattttccacccccagccccctggtcccaccttgccttccgcccaccttcccacctgctgcagggagggccctcggctgagccttcagacacacttgcaccccatccgctcccctcctgaatttcttctgaccctcccttggcttcacagcacctgaaggccaggctgaggccccctgctctcatggccagccctggaaagcctggggctgatgaggcccaggaggaggagggggaactcgaggggggctctgcagggccgcgggctgcaatactggagcaggctgaggagctgtttctgctgtgtgacaaggaggctaagggcttcatcaccaagcacgacctgcagggtctccagagcgacctgcccctcacgccagagcagctggaggctgtgtttgaaagtctggaccgggctcacactggcttcctcaccgccagggagttctgcctgggcctggggatgtttgtgggggtggcgtcagcccagggagcgaacccctgcaggactcccgaggagacctttgagtcgggcgggctcgacgtgcagggcacggcgggctctctggatgaggaggaggaagaggaggagcgattccacactgtgctggagcagctgggggtggccccggtcctgggcaagcagcgggctgtgaggacgctctgggccaggctgcagcgcgagcgccccgagctgctgggctctttcgaggatgttctgatacgcgcgtcggcctgcctggaggaggcggcccgggagcgcgacggcctggagcaggcgctgcggaggcgcgagagcgagcacgagagggaggtgcgcgctctgtacgaggagacggagcagcttcgggagcagagccggcgcccgccgagtcagaacttcgcccgcggggagcggagaagccgtctggagctggagctgcagagccgcgagcaggacctggaacgcgcgggcctgcggcagcgggagagacgtggtcgccgtctccaggaacatgcagaaagagaaagtcagcctgctacggcaactggagctgctcagggagctgaatacacggctgcgggatgacagggacgcctgcgaggccaggcgggcgggcagcagctgcaggaaggctctgacaacagcccgcctgcctgggcccacctgctgctgctgctgttgctgggctcggccccccagacgcggctctggccaccttcccagtgcccggtgaccagccccgagtgactcacggaccatgagctagaagctgcccttgcaggaggcttgtcatgggtcgggggtgcccactcaggatgcaggctctccccagtgggccccaggctcgcctgactgaagacatgaaggacctagcctaggagtggtcagggtcccgggagtggccagggtcccgtgtgtgccctctgccagtcttcgctctgtccccgttcaatcaaccccatctcagttcagcagaaaaccccctcgtcaaataaaacccactgactgcactgcg

SEQ ID NO: 113308 - DNA, 1792 bp, Homo sapiens
  Payload ID: 2155
  Gene Symbol: CRACR2B
  Gene Name: calcium release activated channel regulator 2B
  Uniprot ID: Q8N4Y2
  ENST ID: ENST00000528542
  CDS Start-End: 483-1367
ggacctcaggtctagccggcaagccggagggcgggcgagacaacaacgtggcctggaggcaatggccctggcctctcgtgtccccttctctcacccgcccagacttgccctctttggaggtcgcccgggctaaggtcttctccactggcccctgagattgccatcacctccagctcctcctctcctgaagttggcagcccctcctgggttccagcctcctgagatgccagacccactggggcagtacccacaggccctgagcctacatcaaccaccccagtgacaccccaagcctgcagcattttccacccccagccccctggtcccaccttgccttccgcccaccttcccacctgctgcagggagggccctcggctgagccttcagacacacttgcaccccatccgctcccctcctgaatttcttctgaccctcccttggcttcacagcacctgaaggccaggctgaggccccctgctctcatggccagccctggaaagcctggggctgatgaggcccaggaggaggagggggaactcgaggggggctctgcagggccgcgggctgcaatactggagcaggctgaggagctgtttctgctgtgtgacaaggaggctaagggcttcatcaccaagcacgacctgcagggtctccagagcgacctgcccctcacgccagagcagctggaggctgtgtttgaaagtctggaccgggctcacactggcttcctcaccgccagggagttctgcctgggcctggggatgtttgtgggggtggcgtcagcccagggagcgaacccctgcaggactcccgaggagacctttgagtcgggcgggctcgacgtgcagggcacggcgggctctctggatgaggaggaggaagaggaggagcgattccacactgtgctggagcagctgggggtggccccggtcctgggcaagcagcgggctgtgaggacgctctgggccaggctgcagcgcgagcgccccgagctgctgggctctttcgaggatgttctgatacgcgcgtcggcctgcctggaggaggcggcccgggagcgcgacggcctggagcaggcgctgcggaggcgcgagagcgagcacgagagggaggtgcgcgctctgtacgaggagacggagcagcttcgggagcagagccggcgcccgccgagtcagaacttcgcccgcggggagcggagaagccgtctggagctggagctgcagagccgcgagcaggacctggaacgcgcgggcctgcggcagcgggagagacgtggtcgccgtctccaggaacatgcagaaagagaaagtcagcctgctacggcaactggagctgctcagggagctgaatacacggctgcgggatgacagggacgcctgcgaggccaggcgggcgggcagcagctgcaggaaggctctgacaacagcccgcctgcctgggcccacctgctgctgctgctgttgctgggctcggccccccagacgcggctctggccaccttcccagtgcccggtgaccagccccgagtgactcacggaccatgagctagaagctgcccttgcaggaggcttgtcatgggtcgggggtgcccactcaggatgcaggctctccccagtgggccccaggctcgcctgactgaagacatgaaggacctagcctaggagtggtcagggtcccgggagtggccagggtcccgtgtgtgccctctgccagtcttcgctctgtccccgttcaatcaaccccatctcagttcagcagaaaaccccctcgtcaaataaaacccactgactgca

SEQ ID NO: 113309 - DNA, 824 bp, Homo sapiens
  Payload ID: 2155
  Gene Symbol: CRACR2B
  Gene Name: calcium release activated channel regulator 2B
  ENST ID: ENST00000527089
  CDS Start-End: 561-824
ggcggggcgcgcccagtgtttccgggaggagcggcccgggcgcgcggcaggtgcggcggcgcaactcgcgggtaggcgaccgctggtcccgccgctgaggcccctccactgccgcccgcccggcaccccctccgggccgccgtggcccgcgccaaacctgagcgtctcggtcgggaactccggttaccccctcggggcgcaaggcggcaggggtcttctccactggcccctgagattgccatcacctccagctcctcctctcctgaagttggcagcccctcctgggttccagcctcctgagatgccagacccactggggcagtacccacaggccctgagcctacatcaaccaccccagtgacaccccaagcctgcagcattttccacccccagccccctggtcccaccttgccttccgcccaccttcccacctgctgcagggagggccctcggctgagccttcagacacacttgcaccccatccgctcccctcctgaatttcttctgaccctcccttggcttcacagcacctgaaggccaggctgaggccccctgctctcatggccagccctggaaagcctggggctgatgaggcccaggaggaggagggggaactcgaggggggctctgcagggccgcgggctgcaatactggagcaggctgaggagctgtttctgctgtgtgacaaggaggctaagggcttcatcaccaagcacgacctgcagggtctccagagcgacctgcccctcacgccagagcagctggaggctgtgtttgaaagtctggaccgggctcacactggcttcctcaccgccagggagttc

SEQ ID NO: 113310 - DNA, 742 bp, Homo sapiens
  Payload ID: 2155
  Gene Symbol: CRACR2B
  Gene Name: calcium release activated channel regulator 2B
  ENST ID: ENST00000533803
  CDS Start-End: 500-742
ataagcccagccttttgtggttcagctgggtcgcacgctggatcccaggccccttccttgaaaagcagaggccttgtaccccccagggttgccgggcgggacagtgattccagcccttcagctttcaggaccccaccttccttatcaccaggtcttctccactggcccctgagattgccatcacctccagctcctcctctcctgaagttggcagcccctcctgggttccagcctcctgagatgccagacccactggggcagtacccacaggccctgagcctacatcaaccaccccagtgacaccccaagcctgcagcattttccacccccagccccctggtcccaccttgccttccgcccaccttcccacctgctgcagggagggccctcggctgagccttcagacacacttgcaccccatccgctcccctcctgaatttcttctgaccctcccttggcttcacagcacctgaaggccaggctgaggccccctgctctcatggccagccctggaaagcctggggctgatgaggcccaggaggaggagggggaactcgaggggggctctgcagggccgcgggctgcaatactggagcaggctgaggagctgtttctgctgtgtgacaaggaggctaagggcttcatcaccaagcacgacctgcagggtctccagagcgacctgcccctcacgccagagcagctggaggctgtgtttgaaagtctggaccgggctcacactggc

SEQ ID NO: 113311 - DNA, 575 bp, Homo sapiens
  Payload ID: 2155
  Gene Symbol: CRACR2B
  Gene Name: calcium release activated channel regulator 2B
  ENST ID: ENST00000528315
  CDS Start-End: 472-575
ctataagcccagccttttgtggttcagctgggtcgcacgctggatcccaggccccttccttgaaaagcagaggccttgtaccccccagggttgccgggcgggacagtgattccagcccttcaggtcttctccactggcccctgagattgccatcacctccagctcctcctctcctgaagttggcagcccctcctgggttccagcctcctgagatgccagacccactggggcagtacccacaggccctgagcctacatcaaccaccccagtgacaccccaagcctgcagcattttccacccccagccccctggtcccaccttgccttccgcccaccttcccacctgctgcagggagggccctcggctgagccttcagacacacttgcaccccatccgctcccctcctgaatttcttctgaccctcccttggcttcacagcacctgaaggccaggctgaggccccctgctctcatggccagccctggaaagcctggggctgatgaggcccaggaggaggagggggaactcgaggggggctctgcagggccgcgggctgcaatactggagcaggctga

SEQ ID NO: 113312 - DNA, 1578 bp, Homo sapiens
  Payload ID: 2155
  Gene Symbol: CRACR2B
  Gene Name: calcium release activated channel regulator 2B
  Uniprot ID: Q8N4Y2
  ENST ID: ENST00000525077
  CDS Start-End: 102-1301
cttcagacacacttgcaccccatccgctcccctcctgaatttcttctgaccctcccttggcttcacagcacctgaaggccaggctgaggccccctgctctcatggccagccctggaaagcctggggctgatgaggcccaggaggaggagggggaactcgaggggggctctgcagggccgcgggctgcaatactggagcaggctgaggagctgtttctgctgtgtgacaaggaggctaagggcttcatcaccaagcacgacctgcagggtctccagagcgacctgcccctcacgccagagcagctggaggctgtgtttgaaagtctggaccgggctcacactggcttcctcaccgccagggagttctgcctgggcctggggatgtttgtgggggtggcgtcagcccagggagcgaacccctgcaggactcccgaggagacctttgagtcgggcgggctcgacgtgcagggcacggcgggctctctggatgaggaggaggaagaggaggagcgattccacactgtgctggagcagctgggggtggccccggtcctgggcaagcagcgggctgtgaggacgctctgggccaggctgcagcgcgagcgccccgagctgctgggctctttcgaggatgttctgatacgcgcgtcggcctgcctggaggaggcggcccgggagcgcgacggcctggagcaggcgctgcggaggcgcgagagcgagcacgagagggaggtgcgcgctctgtacgaggagacggagcagcttcgggagcagagccggcgcccgccgagtcagaacttcgcccgcggggagcggagaagccgtctggagctggagctgcagagccgcgagcaggacctggaacgcgcgggcctgcggcagcgggagttagagcagcagctgcacgcccaggctgcggagcacctggaggcacaggcccagaactcccagctgtggcgggcgcacgaggcgctgcgaacgcagctggagggggcgcaggagcagatccgcaggctggagagcgaagcacgaggccgccaggagcaaacccaacgagacgtggtcgccgtctccaggaacatgcagaaagagaaagtcagcctgctacggcaactggagctgctcagggagctgaatacacggctgcgggatgacagggacgcctgcgaggccaggcgggcgggcagcagctgcaggaaggctctgacaacagcccgcctgcctgggcccacctgctgctgctgctgttgctgggctcggccccccagacgcggctctggccaccttcccagtgcccggtgaccagccccgagtgactcacggaccatgagctagaagctgcccttgcaggaggcttgtcatgggtcgggggtgcccactcaggatgcaggctctccccagtgggccccaggctcgcctgactgaagacatgaaggacctagcctaggagtggtcagggtcccgggagtggccagggtcccgtgtgtgccctctgccagtcttcgctctgtccccgttcaatcaaccccatctcagttcagcagaaaaccccctcgtcaaataaaacccactgactgca

SEQ ID NO: 113313 - DNA, 530 bp, Homo sapiens
  Payload ID: 2155
  Gene Symbol: CRACR2B
  Gene Name: calcium release activated channel regulator 2B
  ENST ID: ENST00000530183
  CDS Start-End: 372-530
aggtgcggcggcgcaactcgcgggtcttctccactggcccctgagattgccatcacctccagctcctcctctcctgaagttggcagcccctcctgggttccagcctcctgagatgccagacccactggggcagtacccacaggccctgagcctacatcaaccaccccagtgacaccccaagcctgcagcattttccacccccagccccctggtcccaccttgccttccgcccaccttcccacctgctgcagggagggccctcggctgagccttcagacacacttgcaccccatccgctcccctcctgaatttcttctgaccctcccttggcttcacagcacctgaaggccaggctgaggccccctgctctcatggccagccctggaaagcctggggctgatgaggcccaggaggaggagggggaactcgaggggggctctgcagggccgcgggctgcaatactggagcaggctgaggagctgtttctgctgtgtgacaaggaggctaagggcttcatcaccaagcacgac

SEQ ID NO: 113314 - DNA, 5209 bp, Homo sapiens
  Payload ID: 2156
  Gene Symbol: CARF
  Gene Name: calcium responsive transcription factor
  Uniprot ID: Q8N187
  ENST ID: ENST00000320443
  CDS Start-End: 399-2348
gtggccgatagtggtcctactgtcgtgggactgctctgcgcgctcccggtggggcgcgcctgcgcattatgctggtctccatggcggggcctcggagccaagacgaggcattcgcttcaagagacaagcagtttagaatcaggcagaactggattgcaaaatttatgggcagaccggtatgtgtgcagagaaaatgctgctgtgaagacccaattaaagctttcacataaatgaagctacagctatcatgatttagtgcccccaaaaggaagaacttcagtggacaagaaaggacatttctgggggtagtagaatgcttgaggcctggaatttaaacctgagccactatctgaagctattaaataatagaagaaaatggaattgaatatgatgtcagcatggaacaatctaatgattcattaagagtcaaccataatgacggtgaagagtcaaaaaccagtgctcaagtatttgagatgatcgttgccagcccaacagaaaatggacaggtacttcgtgtaattccacctacccagacaggaatggcacaagtgattatacctcaggggcaacttgtggatgtgaatagtcctcgggatgtccctgaagagaaacccagtaacagaaacttaccaactgtaagagtggatactctagcagacaataccagcaattacattcttcatcctcaaacatccttcccattgcccaaaaagtcagtgaccggaatgctggaagaaccccttctggggcctcttcagccactttcttctaatacacctatatgggcctgccgtcttaggagctgtgagaaaattggagattcataccgtggctactgtgtaagtgagactgaattagaaagtgtcctaacatttcacaagcagcaaacacagagtgtttgggggacccgtcagtctccaagcccagccaagcctgctacacgcttgatgtggaaatcccagtatgttccatatgatggaatcccatttgttaatgcagggagtagagctgtggtaatggagtgtcagtatgggccaagaagaaaaggtttccagttaaaaaaagtcagtgagcaggaaagcaggtcttgtcagctctacaaagccacttgtccagctcggatttacattaaaaaggtacagaagtttcctgaatatagagttcctacagaccccaaaattgacaagaaaattatcagaatggagcaggagaaagcttttaacatgctaaagaagaacttggtagatgctggtggtgttcttaggtggtatgtacagttacctacacagcaagctcatcagtatcatgaattagagactccctgcctcactttgtcaccttctccttttcctgtgtcttctcttgaagaagaggaaactgcagttagagatgagaattgtgcattaccctcacgtttacatcctcaagtagcacataagattcaagaattagtatcacagggaatagaacaagtgtatgcagtaaggaaacagctaagaaaatttgtggaaagggaactgttcaaacccgatgaggtacctgaaagacataatttatctttttttccaactgtaaatgatataaaaaatcacatccatgaggtacagaaatccttgagaaatggagatacggtatataactcagagattattccagcaacgcttcaatggactacagacagtgggaatattctcaaagagaccatgacagttacatttgcagaaggaaattcaccaggagaatcaattaccaccaaagtggaaacaaatcagaccaggggttctttgtctcctgagccaacccacttgctctcctcactctcctcatttcagcccaaaatatttacacaactacagggtttgcagttacaaccaaggtacacctctcctgatgaatcaccagctgtggtatcagtaaataaccagccgtcctctagtccttcaggacttctggatacaataggaagtgctgtaatgaataataattctctactgcttggtcaaagtcatagccttcaaagagatacatgcttaacccaaaacaatagtactgcctccaccatgggtaaccttccagaaccagatcaaaatctagttgcaatggacgagctggtagaagttggagatgttgaggatacagggaatctggaaggaactgttcatcggattctgttgggagatgtgcagactattccaatacagattatagacaaccactcagctcttattgaagaaaatccagaaagtaccatttctgtgagccaagttaaacaagaacccaaagaaccagcattgtctatggaagcaaaaaaaactgtggactataagaaattatctgctacataaattattgaagcttttcagaatttacaactctggtgacttctgatgtcttagaaaggaaggtgaatatagtcaaagcgtggcattgagataattggactgaagaccagtttgatgagaagcttttatttaaaactgatatatttgttgccagttccatatttttaccttccttaagagatgttttactcttcttattttgtataatttttatgctctttgattatctaataaggccagtatttcaaaagctgttctgaatttatccacagtaatatagtctgaacacaaatagtttacttaacttatccttggaaatattcaattttggttattacaaaacagaaaagaacaacagcaacaaaaacattgtgtgaatgtatgtttgtatgtgtgtatgtatatcatgaattttttttttaagttctgaaaaagaacttgttctctccttaaagttgtgaagaaattgttaattgccagacaggtaagaaaatgtttataatctatctcattaagaaagatgaagtattagattttacatcataacacaaagtccagcagctacatctgtggaaactgtgcagttgcattttagcctcttcccttccaatttttgtacttttaactacaaaccagtagtatactaatggttatctaatagaaatttaaagtgtcttggtaagtactgagaatttttacttgaattaatcagataagcaacagaaatcaacatatgtagcatggatttgtgctatattggaagtaaaacactataggcagaaagatgtagaaattaagagaattgaaaaagaataatagaattccttggtgtttacagataatttggaaaactttttgatgacagcagaggattttttcccccttattttgtaatgaagatccagcactggttaaaaaataatttgatttgtagttacatttttctatgccagagctcttactgaattgatgatattaggatttctagtattttaaggtaagtatttatagtttaaaatttagtttatatttaaaactttaaaacatctgatctgggatttttttgttaagtaagtatattaacttcaaataccaaattactactaagcagtatattgattataagcatctgttgtctaaagattggtactaggctggacatggtggctcacacctgtaatcacaatactttgggaggctgaggtgggtagataacctgaggtcaggagttcgagaccagcctggccaacgtggtgaaaccctgtttctactaaaaatacaaaaattagctgggtgtggtggtgggcacctgtaatcccagctacttgggaggctaaggcaggagaatcgcttgaacaccggaggcggaggttgcaatgagccgagatcgcgccattgcactccagcctgggtgacaagagaaaaactccatctcaaaaaaaaaaaaaagattggtaaactagaaatatcaactataattgtcaggaaattaacctaaaggcttttgtttctccagagaccatttgtgggtatattttatattttaaaaataaagattttaaatggatatcaatgtttaatattcaaaacatgcacaatataatatcaaatttaaccttaatactttacatgaatatgagtcacttttggcttttctaagtccagcctcccattcttaattgacttggtttcaggtacatgacatgtatctaaatataaagtactgttatagtagaggtaggtggaattctaatattccctgctctttagatttatattttatttaatataaagtttattatttataccctttttaatgcaaagctaatatttagttatatgtatgatttttaataaaaattactttactttttcctatgaatttaaaacatttgatgttggcattttatacaggcaggttgccaaatttaattatgttacactaagttaaacacagcacttaattacctcaaatccagatttctcttaatctgtgtgtacataaaaggaataagtccaaattaatttatagtttagtgttgcactataggtaatattcttttgttatttctagtttttatggaatccttttctttcaagattctaaataataaatcgttacgtctcaatagtggtaatagtggtaatggtttattattagctgtttcaccaattgaactacattcttttggagacattcctttcttttttgatgttgatttgcaaaggagaaatgcttgttaatatacaaactctagtcagttacctgtgaggatgagatgtgtcagaggactcagactttggtatagttagaaaaataatatttttctcacttgattctgtgtgaatgtctcttctgatactgttttttaatcagaaagttacagagcaactttcccacaaacaaaccaataaaacaaaaccccacaaaaaccaagagcatgaagaaaagtttaaatccctaattatatactcttttggtttttaggtagaaactggagctatcaatattttcatgtaagtatttcaaggagtagctctttaaaaatggtttctaaattagattttaaaaattcattgtcatctaaatgcatgtttagtcacaatgtatcagtattgtgtttaaaggtgctcagcatcactttttgaaaactatgtttacatatttaaaatgtttaattattttgaaatgtatagggtattaaatacaagcttctaaaattttcagtatctatattggctttctctaacagctctacagcaaagtttgacatgttttttgtgtgtgtcatgtattgtaagttgtaatatctgtaggagtgagttggacattctaaattagcagtaaaaaattcacaattaca

SEQ ID NO: 113315 - DNA, 5938 bp, Homo sapiens
  Payload ID: 2156
  Gene Symbol: CARF
  Gene Name: calcium responsive transcription factor
  Uniprot ID: Q8N187
  ENST ID: ENST00000402905
  CDS Start-End: 322-2499
gacggtggccgatagtggtcctactgtcgtgggactgctctgcgcgctcccggtggggcgcgcctgcgcattatgctggtctccatggcggggcctcggagccaagacgagagaaaatgctgctgtgaagacccaattaaagctttcacataaatgaagctacagctatcatgatttagtgcccccaaaaggaagaacttcagtggacaagaaaggacatttctgggggtagtagaatgcttgaggcctggaatttaaacctgagccactatctgaagctattaaataatagaagaaaatggaattgaatatgatgtcagcatggaacaatctaatgattcattaagagtcaaccataatgacggtgaagagtcaaaaaccagtgctcaagtatttgagcatctaatctgtatggactccagggattcttcctttggacaaaatgattctcctacagttttgcccatcactactcgtgaagcaaataattcactcatatcacagaatataccagggcccctgactcagacacagactctttctgcagagcaattccatctagtggaccaaaatgggcaggctattcaatatgaacttcagtcattgggggaatccaatgcacaaatgatgatcgttgccagcccaacagaaaatggacaggtacttcgtgtaattccacctacccagacaggaatggcacaagtgattatacctcaggggcaacttgtggatgtgaatagtcctcgggatgtccctgaagagaaacccagtaacagaaacttaccaactgtaagagtggatactctagcagacaataccagcaattacattcttcatcctcaaacatccttcccattgcccaaaaagtcagtgaccggaatgctggaagaaccccttctggggcctcttcagccactttcttctaatacacctatatgggcctgccgtcttaggagctgtgagaaaattggagattcataccgtggctactgtgtaagtgagactgaattagaaagtgtcctaacatttcacaagcagcaaacacagagtgtttgggggacccgtcagtctccaagcccagccaagcctgctacacgcttgatgtggaaatcccagtatgttccatatgatggaatcccatttgttaatgcagggagtagagctgtggtaatggagtgtcagtatgggccaagaagaaaaggtttccagttaaaaaaagtcagtgagcaggaaagcaggtcttgtcagctctacaaagccacttgtccagctcggatttacattaaaaaggtacagaagtttcctgaatatagagttcctacagaccccaaaattgacaagaaaattatcagaatggagcaggagaaagcttttaacatgctaaagaagaacttggtagatgctggtggtgttcttaggtggtatgtacagttacctacacagcaagctcatcagtatcatgaattagagactccctgcctcactttgtcaccttctccttttcctgtgtcttctcttgaagaagaggaaactgcagttagagatgagaattgtgcattaccctcacgtttacatcctcaagtagcacataagattcaagaattagtatcacagggaatagaacaagtgtatgcagtaaggaaacagctaagaaaatttgtggaaagggaactgttcaaacccgatgaggtacctgaaagacataatttatctttttttccaactgtaaatgatataaaaaatcacatccatgaggtacagaaatccttgagaaatggagatacggtatataactcagagattattccagcaacgcttcaatggactacagacagtgggaatattctcaaagagaccatgacagttacatttgcagaaggaaattcaccaggagaatcaattaccaccaaagtggaaacaaatcagaccaggggttctttgtctcctgagccaacccacttgctctcctcactctcctcatttcagcccaaaatatttacacaactacagggtttgcagttacaaccaaggtacacctctcctgatgaatcaccagctgtggtatcagtaaataaccagccgtcctctagtccttcaggacttctggatacaataggaagtgctgtaatgaataataattctctactgcttggtcaaagtcatagccttcaaagagatacatgcttaacccaaaacaatagtactgcctccaccatgggtaaccttccagaaccagatcaaaatctagttgcaatggacgagctggtagaagttggagatgttgaggatacagggaatctggaaggaactgttcatcggattctgttgggagatgtgcagactattccaatacagattatagacaaccactcagctcttattgaagaaaatccagaaagtaccatttctgtgagccaagttaaacaagaacccaaagaaccagcattgtctatggaagcaaaaaaaactgtggactataagaaattatctgctacataaattattgaagcttttcagaatttacaactctggtgacttctgatgtcttagaaaggaaggtgaatatagtcaaagcgtggcattgagataattggactgaagaccagtttgatgagaagcttttatttaaaactgatatatttgttgccagttccatatttttaccttccttaagagatgttttactcttcttattttgtataatttttatgctctttgattatctaataaggccagtatttcaaaagctgttctgaatttatccacagtaatatagtctgaacacaaatagtttacttaacttatccttggaaatattcaattttggttattacaaaacagaaaagaacaacagcaacaaaaacattgtgtgaatgtatgtttgtatgtgtgtatgtatatcatgaattttttttttaagttctgaaaaagaacttgttctctccttaaagttgtgaagaaattgttaattgccagacaggtaagaaaatgtttataatctatctcattaagaaagatgaagtattagattttacatcataacacaaagtccagcagctacatctgtggaaactgtgcagttgcattttagcctcttcccttccaatttttgtacttttaactacaaaccagtagtatactaatggttatctaatagaaatttaaagtgtcttggtaagtactgagaatttttacttgaattaatcagataagcaacagaaatcaacatatgtagcatggatttgtgctatattggaagtaaaacactataggcagaaagatgtagaaattaagagaattgaaaaagaataatagaattccttggtgtttacagataatttggaaaactttttgatgacagcagaggattttttcccccttattttgtaatgaagatccagcactggttaaaaaataatttgatttgtagttacatttttctatgccagagctcttactgaattgatgatattaggatttctagtattttaaggtaagtatttatagtttaaaatttagtttatatttaaaactttaaaacatctgatctgggatttttttgttaagtaagtatattaacttcaaataccaaattactactaagcagtatattgattataagcatctgttgtctaaagattggtactaggctggacatggtggctcacacctgtaatcacaatactttgggaggctgaggtgggtagataacctgaggtcaggagttcgagaccagcctggccaacgtggtgaaaccctgtttctactaaaaatacaaaaattagctgggtgtggtggtgggcacctgtaatcccagctacttgggaggctaaggcaggagaatcgcttgaacaccggaggcggaggttgcaatgagccgagatcgcgccattgcactccagcctgggtgacaagagaaaaactccatctcaaaaaaaaaaaaaagattggtaaactagaaatatcaactataattgtcaggaaattaacctaaaggcttttgtttctccagagaccatttgtgggtatattttatattttaaaaataaagattttaaatggatatcaatgtttaatattcaaaacatgcacaatataatatcaaatttaaccttaatactttacatgaatatgagtcacttttggcttttctaagtccagcctcccattcttaattgacttggtttcaggtacatgacatgtatctaaatataaagtactgttatagtagaggtaggtggaattctaatattccctgctctttagatttatattttatttaatataaagtttattatttataccctttttaatgcaaagctaatatttagttatatgtatgatttttaataaaaattactttactttttcctatgaatttaaaacatttgatgttggcattttatacaggcaggttgccaaatttaattatgttacactaagttaaacacagcacttaattacctcaaatccagatttctcttaatctgtgtgtacataaaaggaataagtccaaattaatttatagtttagtgttgcactataggtaatattcttttgttatttctagtttttatggaatccttttctttcaagattctaaataataaatcgttacgtctcaatagtggtaatagtggtaatggtttattattagctgtttcaccaattgaactacattcttttggagacattcctttcttttttgatgttgatttgcaaaggagaaatgcttgttaatatacaaactctagtcagttacctgtgaggatgagatgtgtcagaggactcagactttggtatagttagaaaaataatatttttctcacttgattctgtgtgaatgtctcttctgatactgttttttaatcagaaagttacagagcaactttcccacaaacaaaccaataaaacaaaaccccacaaaaaccaagagcatgaagaaaagtttaaatccctaattatatactcttttggtttttaggtagaaactggagctatcaatattttcatgtaagtatttcaaggagtagctctttaaaaatggtttctaaattagattttaaaaattcattgtcatctaaatgcatgtttagtcacaatgtatcagtattgtgtttaaaggtgctcagcatcactttttgaaaactatgtttacatatttaaaatgtttaattattttgaaatgtatagggtattaaatacaagcttctaaaattttcagtatctatattggctttctctaacagctctacagcaaagtttgacatgttttttgtgtgtgtcatgtattgtaagttgtaatatctgtaggagtgagttggacattctaaattagcagtaaaaaattcacaattacagctcagcttgtttattcattatagtttccacatttccaacttccaagtgaactttatatatactacagtgaattatagataaatacagccatggtggacctttccctcaatagtgattttttgtacaaacagttagtataattaaaaggaaaagcttttatattttatgcaaggtaaatgtttcctaaatgtcacaaaagtgatagaaaacatagcttttgggatctggtcctgcattagagtttctaattctgagacccaccagcttgtgtttcatcttctttatatcctgtcagaatacatacttaatcatgtgggtatgagaaagatgttgtttaacttgtaccaggtttaaaaaaagaggtttaaaaaatgtctgtgcgtatatatatatatatatatatatatatatatatatatatagcaacttgatgtatagtgtccttgttaccatgtatttttttcattaaaaatcctgctttttttttatacttgttagttttctttttatatttttcttagagatagtggcaattttgttcatcttgaagatgctgaataaacacttgaatacccga

SEQ ID NO: 113316 - DNA, 597 bp, Homo sapiens
  Payload ID: 2156
  Gene Symbol: CARF
  Gene Name: calcium responsive transcription factor
  ENST ID: ENST00000443740
  CDS Start-End: 312-597
attatgctggtctccatggcggggcctcggagccaagacgagagaaaatgctgctgtgaagacccaattaaagctttcacataaatgaagctacagctatcatgatttagtgcccccaaaaggaagaacttcagtggacaagaaaggacatttctgggggtagtagaatgcttgaggcctggaatttaaacctgagccactatctgaagaagttttatcatttgatagtctgtgatccatttcaagttgatttgctatctggtgtgagctattaaataatagaagaaaatggaattgaatatgatgtcagcatggaacaatctaatgattcattaagagtcaaccataatgacggtgaagagtcaaaaaccagtgctcaagtatttgagcatctaatctgtatggactccagggattcttcctttggacaaaatgattctcctacagttttgcccatcactactcgtgaagcaaataattcactcatatcacagaatataccagggcccctgactcagacacagactctttctgcagagcaattccatctagtggaccaaaatgggcaggctattcaatatgaacttcagtcattgg

SEQ ID NO: 113317 - DNA, 726 bp, Homo sapiens
  Payload ID: 2156
  Gene Symbol: CARF
  Gene Name: calcium responsive transcription factor
  ENST ID: ENST00000414857
  CDS Start-End: 332-726
gcgcctgcgcattatgctggtctccatggcggggcctcggagccaagacgaggcattcgcttcaagagacaagcagtttagaatcaggcagaactggattgcaaaatttatgggcagaccgagaaaatgctgctgtgaagacccaattaaagctttcacataaatgaagctacagctatcatgatttagtgcccccaaaaggaagaacttcagtggacaagaaaggacatttctgggggtagtagaatgcttgaggcctggaatttaaacctgagccactatctgaagctattaaataatagaagaaaatggaattgaatatgatgtcagcatggaacaatctaatgattcattaagagtcaaccataatgacggtgaagagtcaaaaaccagtgctcaagtatttgagcatctaatctgtatggactccagggattcttcctttggacaaaatgattctcctacagttttgcccatcactactcgtgaagcaaataattcactcatatcacagaatataccagggcccctgactcagacacagactctttctgcagagcaattccatctagtggaccaaaatgggcaggctattcaatatgaacttcagtcattgggggaatccaatgcacaaatgatgatcgttgccagcccaacagaaaatggacaggtacttcgtgtaattccacctacccagacaggaatggcacaagtgattatacctca

SEQ ID NO: 113318 - DNA, 1592 bp, Homo sapiens
  Payload ID: 2156
  Gene Symbol: CARF
  Gene Name: calcium responsive transcription factor
  ENST ID: ENST00000422368
  CDS Start-End: 228-1487
ctgcgcattatgctggtctccatggcggggcctcggagccaagacgagagaaaatgctgctgtgaagacccaattaaagctttcacataaatgaagctacagctatcatgatttagtgcccccaaaaggaagaacttcagtggacaagaaaggacatttctgggggtagtagaatgcttgaggcctggaatttaaacctgagccactatctgaagcatctaatctgtatggactccagggattcttcctttggacaaaatgattctcctacagttttgcccatcactactcgtgaagcaaataattcactcatatcacagaatataccagggcccctgactcagacacagactctttctgcagagcaattccatctagtggaccaaaatgggcaggctattcaatatgaacttcagtcattgggggaatccaatgcacaaatgatgatcgttgccagcccaacagaaaatggacaggtacttcgtgtaattccacctacccagacaggaatggcacaagtgattatacctcaggggcaacttgtggatgtgaatagtcctcgggatgtccctgaagagaaacccagtaacagaaacttaccaactgtaagagtggatactctagcagacaataccagcaattacattcttcatcctcaaacatccttcccattgcccaaaaagtcagtgaccggaatgctggaagaaccccttctggggcctcttcagccactttcttctaatacacctatatgggcctgccgtcttaggagctgtgagaaaattggagattcataccgtggctactgtgtaagtgagactgaattagaaagtgtcctaacatttcacaagcagcaaacacagagtgtttgggggacccgtcagtctccaagcccagccaagcctgctacacgcttgatgtggaaatcccagtatgttccatatgatggaatcccatttgttaatgcagggagtagagctgtggtaatggagtgtcagtatgggccaagaagaaaaggtttccagttaaaaaaagtcagtgagcaggaaagcaggtcttgtcagctctacaaagccacttgtccagctcggatttacattaaaaaggtacagaagtttcctgaatatagagttcctacagaccccaaaattgacaagaaaattatcagaatggagcaggagaaagcttttaacatgctaaagaagaacttggtagatgctggtggtgttcttaggtggtatgtacagttacctacacagcaagctcatcagtatcatgaattagagactccctgcctcactttgtcaccttctccttttcctgtgtcttctcttgaagaagaggaaactgcagttagagatgagaattgtgcattaccctcacgtttacatcctcaagtagcacataagattcaagaattagtatcacagggaatagaacaagtgtatgcagtaaggaaacagctaagcccatcatatttcatataatattaattgatacttttggaagcaatgtaacatgatgtttacgcacataacctgggtataggcccaagctctcttatttactagaaaatttgtggaaagggaact

SEQ ID NO: 113319 - DNA, 537 bp, Homo sapiens
  Payload ID: 2156
  Gene Symbol: CARF
  Gene Name: calcium responsive transcription factor
  ENST ID: ENST00000430899
  CDS Start-End: 474-537
gcgcattatgctggtctccatggcggggcctcggagccaagacgagagaaaatgctgctgtgaagacccaattaaagctttcacataaatgaagctacagctatcatgatttagtgcccccaaaaggaagaacttcagtggacaagaaaggacatttctgggggtagtagaatgcttgaggcctggaatttaaacctgagccactatctgaaggtttaatatatctttgccaagtccaagggtacaaagattttctcctgtgttttcttctagaagttttatcatttgatagtctgtgatccatttcaagttgatttgctatctggtgtgaggctggagtgcagtgctatgatcacagctgactgcagtcttaacctcccaggatcaagtgatcctcccacctcagccatctgattacctgggactgcagctattaaataatagaagaaaatggaattgaatatgatgtcagcatggaacaatctaatgattcattaagagtcaaccataatgacggtgaagagtcaaaaaccagtg

SEQ ID NO: 113320 - DNA, 572 bp, Homo sapiens
  Payload ID: 2156
  Gene Symbol: CARF
  Gene Name: calcium responsive transcription factor
  ENST ID: ENST00000447539
  CDS Start-End: 333-572
ttatgctggtctccatggcggggcctcggagccaagacgaggcattcgcttcaagagacaagcagtttagaatcaggcagaactggattgcaaaatttatgggcagaccggtatgtgtgcagagaaaatgctgctgtgaagacccaattaaagctttcacataaatgaagctacagctatcatgatttagtgcccccaaaaggaagaacttcagtggacaagaaaggacatttctgggggtagtagaatgcttgaggcctggaatttaaacctgagccactatctgaagctattaaataatagaagaaaatggaattgaatatgatgtcagcatggaacaatctaatgattcattaagagtcaaccataatgacggtgaagagtcaaaaaccagtgctcaagtatttgagatgatcgttgccagcccaacagaaaatggacaggtacttcgtgtaattccacctacccagacaggaatggcacaagtgattatacctcaggggcaacttgtggatgtgaatagtcctcgggatgtccctgaagagaaacccagtaacagaaacttaccaact

SEQ ID NO: 113321 - DNA, 594 bp, Homo sapiens
  Payload ID: 2156
  Gene Symbol: CARF
  Gene Name: calcium responsive transcription factor
  ENST ID: ENST00000431787
  CDS Start-End: 317-594
actgctctgcgcgctcccggtggggcgcgcctgcgcattatgctggtctccatggcggggcctcggagccaagacgagagaaaatgctgctgtgaagacccaattaaagctttcacataaatgaagctacagctatcatgatttagtgcccccaaaaggaagaacttcagtggacaagaaaggacatttctgggggtagtagaatgcttgaggcctggaatttaaacctgagccactatctgaagaagttttatcatttgatagtctgtgatccatttcaagttgatttgctatctggtgtgagcatctaatctgtatggactccagggattcttcctttggacaaaatgattctcctacagttttgcccatcactactcgtgaagcaaataattcactcatatcacagaatataccagggcccctgactcagacacagactctttctgcagagcaattccatctagtggaccaaaatgggcaggctattcaatatgaacttcagtcattgggggaatccaatgcacaaatgatgatcgttgccagcccaacagaaaatggacaggtacttcgtgtaattccacctacccagac

SEQ ID NO: 113322 - DNA, 2513 bp, Homo sapiens
  Payload ID: 2156
  Gene Symbol: CARF
  Gene Name: calcium responsive transcription factor
  Uniprot ID: Q8N187
  ENST ID: ENST00000428585
  CDS Start-End: 253-2202
attatgctggtctccatggcggggcctcggagccaagacgagagaaaatgctgctgtgaagacccaattaaagctttcacataaatgaagctacagctatcatgatttagtgcccccaaaaggaagaacttcagtggacaagaaaggacatttctgggggtagtagaatgcttgaggcctggaatttaaacctgagccactatctgaagctattaaataatagaagaaaatggaattgaatatgatgtcagcatggaacaatctaatgattcattaagagtcaaccataatgacggtgaagagtcaaaaaccagtgctcaagtatttgagatgatcgttgccagcccaacagaaaatggacaggtacttcgtgtaattccacctacccagacaggaatggcacaagtgattatacctcaggggcaacttgtggatgtgaatagtcctcgggatgtccctgaagagaaacccagtaacagaaacttaccaactgtaagagtggatactctagcagacaataccagcaattacattcttcatcctcaaacatccttcccattgcccaaaaagtcagtgaccggaatgctggaagaaccccttctggggcctcttcagccactttcttctaatacacctatatgggcctgccgtcttaggagctgtgagaaaattggagattcataccgtggctactgtgtaagtgagactgaattagaaagtgtcctaacatttcacaagcagcaaacacagagtgtttgggggacccgtcagtctccaagcccagccaagcctgctacacgcttgatgtggaaatcccagtatgttccatatgatggaatcccatttgttaatgcagggagtagagctgtggtaatggagtgtcagtatgggccaagaagaaaaggtttccagttaaaaaaagtcagtgagcaggaaagcaggtcttgtcagctctacaaagccacttgtccagctcggatttacattaaaaaggtacagaagtttcctgaatatagagttcctacagaccccaaaattgacaagaaaattatcagaatggagcaggagaaagcttttaacatgctaaagaagaacttggtagatgctggtggtgttcttaggtggtatgtacagttacctacacagcaagctcatcagtatcatgaattagagactccctgcctcactttgtcaccttctccttttcctgtgtcttctcttgaagaagaggaaactgcagttagagatgagaattgtgcattaccctcacgtttacatcctcaagtagcacataagattcaagaattagtatcacagggaatagaacaagtgtatgcagtaaggaaacagctaagaaaatttgtggaaagggaactgttcaaacccgatgaggtacctgaaagacataatttatctttttttccaactgtaaatgatataaaaaatcacatccatgaggtacagaaatccttgagaaatggagatacggtatataactcagagattattccagcaacgcttcaatggactacagacagtgggaatattctcaaagagaccatgacagttacatttgcagaaggaaattcaccaggagaatcaattaccaccaaagtggaaacaaatcagaccaggggttctttgtctcctgagccaacccacttgctctcctcactctcctcatttcagcccaaaatatttacacaactacagggtttgcagttacaaccaaggtacacctctcctgatgaatcaccagctgtggtatcagtaaataaccagccgtcctctagtccttcaggacttctggatacaataggaagtgctgtaatgaataataattctctactgcttggtcaaagtcatagccttcaaagagatacatgcttaacccaaaacaatagtactgcctccaccatgggtaaccttccagaaccagatcaaaatctagttgcaatggacgagctggtagaagttggagatgttgaggatacagggaatctggaaggaactgttcatcggattctgttgggagatgtgcagactattccaatacagattatagacaaccactcagctcttattgaagaaaatccagaaagtaccatttctgtgagccaagttaaacaagaacccaaagaaccagcattgtctatggaagcaaaaaaaactgtggactataagaaattatctgctacataaattattgaagcttttcagaatttacaactctggtgacttctgatgtcttagaaaggaaggtgaatatagtcaaagcgtggcattgagataattggactgaagaccagtttgatgagaagcttttatttaaaactgatatatttgttgccagttccatatttttaccttccttaagagatgttttactcttcttattttgtataatttttatgctctttgattatctaataaggccagtatttcaaaagctgttctgaatttatccacagtaatatagtctgaacacaaatagtttacttaacttatccttg

SEQ ID NO: 113323 - DNA, 572 bp, Homo sapiens
  Payload ID: 2156
  Gene Symbol: CARF
  Gene Name: calcium responsive transcription factor
  ENST ID: ENST00000441569
  CDS Start-End: 355-572
gcgcattatgctggtctccatggcggggcctcggagccaagacgagagaaaatgctgctgtgaagacccaattaaagctttcacataaatgaagctacagctatcatgatttagtgcccccaaaaggaagaacttcagtggacaagaaaggacatttctgggggtagtagaatgcttgaggcctggaatttaaacctgagccactatctgaaggctggagtgcagtgctatgatcacagctgactgcagtcttaacctcccaggatcaagtgatcctcccacctcagccatctgattacctgggactgcagctattaaataatagaagaaaatggaattgaatatgatgtcagcatggaacaatctaatgattcattaagagtcaaccataatgacggtgaagagtcaaaaaccagtgctcaagtatttgagcatctaatctgtatggactccagggattcttcctttggacaaaatgattctcctacagttttgcccatcactactcgtgaagcaaataattcactcatatcacagaatataccagggcccctgactcagacacagactct

SEQ ID NO: 113324 - DNA, 460 bp, Homo sapiens
  Payload ID: 2156
  Gene Symbol: CARF
  Gene Name: calcium responsive transcription factor
  ENST ID: ENST00000445120
  CDS Start-End: 345-460
gcgcattatgctggtctccatggcggggcctcggagccaagacgagagaaaatgctgctgtgaagacccaattaaagctttcacataaatgaagctacagctatcatgatttagtgcccccaaaaggaagaacttcagtggacaagaaaggacatttctgggggtagtagaatgcttgaggcctggaatttaaacctgagccactatctgaaggtttaatatatctttgccaagtccaagggtacaaagattttctcctgtgttttcttctagaagttttatcatttgatagtctgtgatccatttcaagttgatttgctatctggtgtgagcatctaatctgtatggactccagggattcttcctttggacaaaatgattctcctacagttttgcccatcactactcgtgaagcaaataattcactcatatcacagaatataccagggcccctgactca

SEQ ID NO: 113325 - DNA, 943 bp, Homo sapiens
  Payload ID: 2156
  Gene Symbol: CARF
  Gene Name: calcium responsive transcription factor
  ENST ID: ENST00000427712
  CDS Start-End: 384-485
gtctccatggcggggcctcggagccaagacgaggcattcgcttcaagagacaagcagtttagaatcaggcagaactggattgcaaaatttatgggcagaccggtatgtgtgcagagaaaatgctgctgtgaagacccaattaaagctttcacataaatgaagctacagctatcatgatttagtgcccccaaaaggaagaacttcagtggacaagaaaggacatttctgggggtagtagaatgcttgaggcctggaatttaaacctgagccactatctgaagaagttttatcatttgatagtctgtgatccatttcaagttgatttgctatctggtgtgagctattaaataatagaagaaaatggaattgaatatgatgtcagcatggaacaatctaatgattcattaagagtcaaccataatgacggtgaagagtcaaaaaccagtgctcaagtatttgagggattcttcctttggacaaaatgattctcctacagttttgcccatcactactcgtgaagcaaataattcactcatatcacagaatataccagggcccctgactcagacacagactctttctgcagagcaattccatctagtggaccaaaatgggcaggctattcaatatgaacttcagtcattgggggaatccaatgcacaaatgatgatcgttgccagcccaacagaaaatggacaggtacttcgtgtaattccacctacccagacaggaatggcacaagtgattatacctcaggggcaacttgtggatgtgaatagtcctcgggatgtccctgaagagaaacccagtaacagaaacttaccaactgtaagagtggatactctagcagacaataccagcaattacattcttcatcctcaaacatccttcccattgcccaaaaagtcagtgaccggaatgctggaagaaccccttctggggc

SEQ ID NO: 113326 - DNA, 595 bp, Homo sapiens
  Payload ID: 2156
  Gene Symbol: CARF
  Gene Name: calcium responsive transcription factor
  ENST ID: ENST00000432024
  CDS Start-End: 376-595
gcgcattatgctggtctccatggcggggcctcggagccaagacgagagaaaatgctgctgtgaagacccaattaaagctttcacataaatgaagctacagctatcatgatttagtgcccccaaaaggaagaacttcagtggacaagaaaggacatttctgggggtagtagaatgcttgaggcctggaatttaaacctgagccactatctgaaggtttaatatatctttgccaagtccaagggtacaaagattttctcctgtgttttcttctagaagttttatcatttgatagtctgtgatccatttcaagttgatttgctatctggtgtgagctattaaataatagaagaaaatggaattgaatatgatgtcagcatggaacaatctaatgattcattaagagtcaaccataatgacggtgaagagtcaaaaaccagtgctcaagtatttgagcatctaatctgtatggactccagggattcttcctttggacaaaatgattctcctacagttttgcccatcactactcgtgaagcaaataattcactcatatcacagaatataccagggcccctgactcagacacagactcttt

SEQ ID NO: 113327 - DNA, 575 bp, Homo sapiens
  Payload ID: 2156
  Gene Symbol: CARF
  Gene Name: calcium responsive transcription factor
  ENST ID: ENST00000414490
  CDS Start-End: 413-575
ggactgctctgcgcgctcccggtggggcgcgcctgcgcattatgctggtctccatggcggggcctcggagccaagacgagagaaaatgctgctgtgaagacccaattaaagctttcacataaatgaagctacagctatcatgatttagtgcccccaaaaggaagaacttcagtggacaagaaaggacatttctgggggtagtagaatgcttgaggcctggaatttaaacctgagccactatctgaagacggagtcttgccctgttgcccaggctagagtgccaaggcacgatcttggcttactgcaacctccacttcccagattcaagcagttttcgtgccttagtcacttgaggagctctggttacagctattaaataatagaagaaaatggaattgaatatgatgtcagcatggaacaatctaatgattcattaagagtcaaccataatgacggtgaagagtcaaaaaccagtgctcaagtatttgagcatctaatctgtatggactccagggattcttcctttggacaaaatgattctcctacagttttgcccatcactactcgtgaagcaa

SEQ ID NO: 113328 - DNA, 3574 bp, Homo sapiens
  Payload ID: 2156
  Gene Symbol: CARF
  Gene Name: calcium responsive transcription factor
  Uniprot ID: Q8N187
  ENST ID: ENST00000438828
  CDS Start-End: 832-3009
cttttcggggtcccacatggcacggcttccgacccccggcccgggacggggctcgcaggccccagaggggcaggctggagaaggaggaggttaggtgtcttcaggagggttgctgagcccaaggacgcgccatcgccgcggagaaggagccggaccccttgggcggagcgcccaatgtgtggtccctcacgccgtcccgcaccttgctttttagggttctttttccgctttctgagcccttttataccttacgtttagaaggggaaaatcatcctcccacaccttctccccgactttttgccttttttgtcttgaagttacccaaaggcctgtgtattgttctcaatggtcccaagaattactctaatatagttgtttttctgagggaggatggatggagataactatcctgatcccaatgtcactttttaaggcattcgcttcaagagacaagcagtttagaatcaggcagaactggattgcaaaatttatgggcagaccgagaaaatgctgctgtgaagacccaattaaagctttcacataaatgaagctacagctatcatgatttagtgcccccaaaaggaagaacttcagtggacaagaaaggacatttctgggggtagtagaatgcttgaggcctggaatttaaacctgagccactatctgaaggtttaatatatctttgccaagtccaagggtacaaagattttctcctgtgttttcttctagaagttttatcatttgatagtctgtgatccatttcaagttgatttgctatctggtgtgagctattaaataatagaagaaaatggaattgaatatgatgtcagcatggaacaatctaatgattcattaagagtcaaccataatgacggtgaagagtcaaaaaccagtgctcaagtatttgagcatctaatctgtatggactccagggattcttcctttggacaaaatgattctcctacagttttgcccatcactactcgtgaagcaaataattcactcatatcacagaatataccagggcccctgactcagacacagactctttctgcagagcaattccatctagtggaccaaaatgggcaggctattcaatatgaacttcagtcattgggggaatccaatgcacaaatgatgatcgttgccagcccaacagaaaatggacaggtacttcgtgtaattccacctacccagacaggaatggcacaagtgattatacctcaggggcaacttgtggatgtgaatagtcctcgggatgtccctgaagagaaacccagtaacagaaacttaccaactgtaagagtggatactctagcagacaataccagcaattacattcttcatcctcaaacatccttcccattgcccaaaaagtcagtgaccggaatgctggaagaaccccttctggggcctcttcagccactttcttctaatacacctatatgggcctgccgtcttaggagctgtgagaaaattggagattcataccgtggctactgtgtaagtgagactgaattagaaagtgtcctaacatttcacaagcagcaaacacagagtgtttgggggacccgtcagtctccaagcccagccaagcctgctacacgcttgatgtggaaatcccagtatgttccatatgatggaatcccatttgttaatgcagggagtagagctgtggtaatggagtgtcagtatgggccaagaagaaaaggtttccagttaaaaaaagtcagtgagcaggaaagcaggtcttgtcagctctacaaagccacttgtccagctcggatttacattaaaaaggtacagaagtttcctgaatatagagttcctacagaccccaaaattgacaagaaaattatcagaatggagcaggagaaagcttttaacatgctaaagaagaacttggtagatgctggtggtgttcttaggtggtatgtacagttacctacacagcaagctcatcagtatcatgaattagagactccctgcctcactttgtcaccttctccttttcctgtgtcttctcttgaagaagaggaaactgcagttagagatgagaattgtgcattaccctcacgtttacatcctcaagtagcacataagattcaagaattagtatcacagggaatagaacaagtgtatgcagtaaggaaacagctaagaaaatttgtggaaagggaactgttcaaacccgatgaggtacctgaaagacataatttatctttttttccaactgtaaatgatataaaaaatcacatccatgaggtacagaaatccttgagaaatggagatacggtatataactcagagattattccagcaacgcttcaatggactacagacagtgggaatattctcaaagagaccatgacagttacatttgcagaaggaaattcaccaggagaatcaattaccaccaaagtggaaacaaatcagaccaggggttctttgtctcctgagccaacccacttgctctcctcactctcctcatttcagcccaaaatatttacacaactacagggtttgcagttacaaccaaggtacacctctcctgatgaatcaccagctgtggtatcagtaaataaccagccgtcctctagtccttcaggacttctggatacaataggaagtgctgtaatgaataataattctctactgcttggtcaaagtcatagccttcaaagagatacatgcttaacccaaaacaatagtactgcctccaccatgggtaaccttccagaaccagatcaaaatctagttgcaatggacgagctggtagaagttggagatgttgaggatacagggaatctggaaggaactgttcatcggattctgttgggagatgtgcagactattccaatacagattatagacaaccactcagctcttattgaagaaaatccagaaagtaccatttctgtgagccaagttaaacaagaacccaaagaaccagcattgtctatggaagcaaaaaaaactgtggactataagaaattatctgctacataaattattgaagcttttcagaatttacaactctggtgacttctgatgtcttagaaaggaaggtgaatatagtcaaagcgtggcattgagataattggactgaagaccagtttgatgagaagcttttatttaaaactgatatatttgttgccagttccatatttttaccttccttaagagatgttttactcttcttattttgtataatttttatgctctttgattatctaataaggccagtatttcaaaagctgttctgaatttatccacagtaatatagtctgaacacaaatagtttacttaacttatccttggaaatattcaattttggttattacaaaacagaaaagaacaacagcaacaaaaacattgtgtgaatgtatgtttgtatgtgtgtatgtatatcatgaattttttttttaagttctgaaaaagaacttgttctctccttaaagttgtgaagaaattgttaattgccagacaggtaagaaaatgtttataatctatctcattaagaaagatgaagtattagattttacatcataacacaaagtccagcagctacatc

SEQ ID NO: 113329 - DNA, 1136 bp, Homo sapiens
  Payload ID: 2156
  Gene Symbol: CARF
  Gene Name: calcium responsive transcription factor
  ENST ID: ENST00000457031
  CDS Start-End: 219-788
atgctggtctccatggcggggcctcggagccaagacgagagaaaatgctgctgtgaagacccaattaaagctttcacataaatgaagctacagctatcatgatttagtgcccccaaaaggaagaacttcagtggacaagaaaggacatttctgggggtagtagaatgcttgaggcctggaatttaaacctgagccactatctgaagcatctaatctgtatggactccagggattcttcctttggacaaaatgattctcctacagttttgcccatcactactcgtgaagcaaataattcactcatatcacagaatataccagggcccctgactcagacacagactctttctgcagagcaattccatctagtggaccaaaatgggcaggctattcaatatgaacttcagtcattgggggaatccaatgcacaaatgatgatcgttgccagcccaacagaaaatggacaggtacttcgtgtaattccacctacccagacaggaatggcacaagtgattatacctcaggggcaacttgtggatgtgaatagtcctcgggatgtccctgaagagaaacccagtaacagaaacttaccaactgtaagagtggatactctagcagacaataccagcaattacattcttcatcctcaaacatccttcccattgcccaaaaagtcagtgaccggaatgctggaagaaccccttctggggcctcttcagccactttcttctaatacacctatatgggcctgccgtcttaggagctgtgagggagtagagctgtggtaatggagtgtcagtatgggccaagaagaaaaggtttccagttaaaaaaagtcagtgagcaggaaagcaggtcttgtcagctctacaaagccacttgtccagctcggatttacattaaaaaggtacagaagtttcctgaatatagagttcctacagaccccaaaattgacaagaaaattatcagaatggagcaggagaaagcttttaacatgctaaagaagaacttggtagatgctggtggtgttcttaggtggtatgtacagttacctacacagcaagctcatcagtatcatgaattagagactccctgcctcactttgtcaccttctccttttcctgtgtcttctcttg

SEQ ID NO: 113330 - DNA, 1955 bp, Homo sapiens
  Payload ID: 2156
  Gene Symbol: CARF
  Gene Name: calcium responsive transcription factor
  Uniprot ID: Q8N187
  ENST ID: ENST00000434998
  CDS Start-End: 323-946
ctggtctccatggcggggcctcggagccaagacgagagaaaatgctgctgtgaagacccaattaaagctttcacataaatgaagctacagctatcatgatttagtgcccccaaaaggaagaacttcagtggacaagaaaggacatttctgggggtagtagaatgcttgaggcctggaatttaaacctgagccactatctgaaggtttaatatatctttgccaagtccaagggtacaaagattttctcctgtgttttcttctagaagttttatcatttgatagtctgtgatccatttcaagttgatttgctatctggtgtgagatgatcgttgccagcccaacagaaaatggacaggtacttcgtgtaattccacctacccagacaggaatggcacaagtgattatacctcaggggcaacttgtggatgtgaatagtcctcgggatgtccctgaagagaaacccagtaacagaaacttaccaactgtaagagtggatactctagcagacaataccagcaattacattcttcatcctcaaacatccttcccattgcccaaaaagtcagtgaccggaatgctggaagaaccccttctggggcctcttcagccactttcttctaatacacctatatgggcctgccgtcttaggagctgtgagaaaattggagattcataccgtggctactgtgtaagtgagactgaattagaaagtgtcctaacatttcacaagcagcaaacacagagtgtttgggggacccgtcagtctccaagcccagccaagcctgctacacgcttgatgtggaaatcccagtatgttccatatgatggaatcccatttgttaatgcaggtacttttttaaagaattattttaaaaggttcagcagcagccatagtccattgtcaaaatgtgattttcctaaggtgataacatttttattttggtagctgacaattgaatgctaattgattaaaatgcatattaaattgaaaaaacttatagaaaatataatcaattactttataatattgcattttaatatatcaatgaataaataagacttctttcatatattatactgaaaaataaaatatcgaagtttccattaaacctatttaataaaatgttaaaagagcaattttattttaaatatgtacatcagctgtgtttttccccttcagattaaatattttagccttctctcttaatttgtattgtgggagaaatttatgtctattttatgtagcttgtaactctggagttactgtatagaatttgtatacaatctagagttatagaattctgatactaaagttctcaagcattaggtatgttatatacagtattctcagacactgggttagttgtttactaagggagtagagtttcaagcaaatctcttagactagttagagccccaaagaatctaaaactaagcgatttattttaggactatgagggcactaatttagctgaaagagttgcagtttcatcctggacctctgaggttaatgagatatacttaagatgagataaatgtaaccacttctgcctgagtttcatcagtattctataaaagaaatgcagcattaaaaataaatgagctgggttatttatatatttatttatttattttaaacgtggaggctcatgcctctaatctcagcactttgggaggccaaggcgagaggattgcttgagctcacgagtttgagacccacctgggcaaaacagggagacctcatctttacaaaaaataataaattacctggacatggtggcatggggctgtagtcccagctatttgggaagctgaggtggaaggatcacttgacccttggaggtcgaggctgcagtgaaccgtgatcatgccactgaacttcagcctgggtgacagagtaagaccctgtctttaaaaaaaaaaaattaacaaataataaaatgaacttgaaatcc

SEQ ID NO: 113331 - DNA, 2099 bp, Homo sapiens
  Payload ID: 2156
  Gene Symbol: CARF
  Gene Name: calcium responsive transcription factor
  ENST ID: ENST00000414439
  CDS Start-End: 210-2081
attatgctggtctccatggcggggcctcggagccaagacgagagaaaatgctgctgtgaagacccaattaaagctttcacataaatgaagctacagctatcatgatttagtgcccccaaaaggaagaacttcagtggacaagaaaggacatttctgggggtagtagaatgcttgaggcctggaatttaaacctgagccactatctgaagatgatcgttgccagcccaacagaaaatggacaggtacttcgtgtaattccacctacccagacaggaatggcacaagtgattatacctcaggggcaacttgtggatgtgaatagtcctcgggatgtccctgaagagaaacccagtaacagaaacttaccaactgtaagagtggatactctagcagacaataccagcaattacattcttcatcctcaaacatccttcccattgcccaaaaagtcagtgaccggaatgctggaagaaccccttctggggcctcttcagccactttcttctaatacacctatatgggcctgccgtcttaggagctgtgagaaaattggagattcataccgtggctactgtgtaagtgagactgaattagaaagtgtcctaacatttcacaagcagcaaacacagagtgtttgggggacccgtcagtctccaagcccagccaagcctgctacacgcttgatgtggaaatcccagtatgttccatatgatggaatcccatttgttaatgcagggagtagagctgtggtaatggagtgtcagtatgggccaagaagaaaaggtttccagttaaaaaaagtcagtgagcaggaaagcaggtcttgtcagctctacaaagccacttgtccagctcggatttacattaaaaaggtacagaagtttcctgaatatagagttcctacagaccccaaaattgacaagaaaattatcagaatggagcaggagaaagcttttaacatgctaaagaagaacttggtagatgctggtggtgttcttaggtggtatgtacagttacctacacagcaagctcatcagtatcatgaattagagactccctgcctcactttgtcaccttctccttttcctgtgtcttctcttgaagaagaggaaactgcagttagagatgagaattgtgcattaccctcacgtttacatcctcaagtagcacataagattcaagaattagtatcacagggaatagaacaagtgtatgcagtaaggaaacagctaagaaaatttgtggaaagggaactgttcaaacccgatgaggtacctgaaagacataatttatctttttttccaactgtaaatgatataaaaaatcacatccatgaggtacagaaatccttgagaaatggagatacggtatataactcagagattattccagcaacgcttcaatggactacagacagtgggaatattctcaaagagaccatgacagttacatttgcagaaggaaattcaccaggagaatcaattaccaccaaagtggaaacaaatcagaccaggggttctttgtctcctgagccaacccacttgctctcctcactctcctcatttcagcccaaaatatttacacaactacagggtttgcagttacaaccaaggtacacctctcctgatgaatcaccagctgtggtatcagtaaataaccagccgtcctctagtccttcaggacttctggatacaataggaagtgctgtaatgaataataattctctactgcttggtcaaagtcatagccttcaaagagatacatgcttaacccaaaacaatagtactgcctccaccatgggtaaccttccagaaccagatcaaaatctagttgcaatggacgagctggtagaagttggagatgttgaggatacagggaatctggaaggaactgttcatcggattctgttgggagatgtgcagactattccaatacagattatagacaaccactcagctcttattgaagaaaatccagaaagtaccatttctgtgagccaagttaaacaagaacccaaagaaccagcattgtctatggaagcaaaaaaaactgtggactataagaaattatctgctacataaattattgaagcttttcag

SEQ ID NO: 113332 - DNA, 2854 bp, Homo sapiens
  Payload ID: 2156
  Gene Symbol: CARF
  Gene Name: calcium responsive transcription factor
  ENST ID: ENST00000444724
  CDS Start-End: 281-1210
gcgcgctcccggtggggcgcgcctgcgcattatgctggtctccatggcggggcctcggagccaagacgagagaaaatgctgctgtgaagacccaattaaagctttcacataaatgaagctacagctatcatgatttagtgcccccaaaaggaagaacttcagtggacaagaaaggacatttctgggggtagtagaatgcttgaggcctggaatttaaacctgagccactatctgaagctattaaataatagaagaaaatggaattgaatatgatgtcagcatggaacaatctaatgattcattaagagtcaaccataatgacggtgaagagtcaaaaaccagtgctcaagtatttgagcatctaatctgtatggactccagggattcttcctttggacaaaatgattctcctacagttttgcccatcactactcgtgaagcaaataattcactcatatcacagaatataccagggcccctgactcagacacagactctttctgcagagcaattccatctagtggaccaaaatgggcaggctattcaatatgaacttcagtcattgggggaatccaatgcacaaatgatgatcgttgccagcccaacagaaaatggacaggtacttcgtgtaattccacctacccagacaggaatggcacaagtgattatacctcaggggcaacttgtggatgtgaatagtcctcgggatgtccctgaagagaaacccagtaacagaaacttaccaactgtaagagtggatactctagcagacaataccagcaattacattcttcatcctcaaacatccttcccattgcccaaaaagtcagtgaccggaatgctggaagaaccccttctggggcctcttcagccactttcttctaatacacctatatgggcctgccgtcttaggagctgtgagaaaattggagattcataccgtggctactgtgtaagtgagactgaattagaaagtgtcctaacatttcacaagcagcaaacacagagtgtttgggggacccgtcagtctccaagcccagccaagcctgctacacgcttgatgtggaaatcccagtatgttccatatgatggaatcccatttgttaatgcaggtacttttttaaagaattattttaaaaggttcagcagcagccatagtccattgtcaaaatgtgattttcctaaggtgataacatttttattttggtagctgacaattgaatgctaattgattaaaatgcatattaaattgaaaaaacttatagaaaatataatcaattactttataatattgcattttaatatatcaatgaataaataagacttctttcatatattatactgaaaaataaaatatcgaagtttccattaaacctatttaataaaatgttaaaagagcaattttattttaaatatgtacatcagctgtgtttttccccttcagattaaatattttagccttctctcttaatttgtattgtgggagaaatttatgtctattttatgtagcttgtaactctggagttactgtatagaatttgtatacaatctagagttatagaattctgatactaaagttctcaagcattaggtatgttatatacagtattctcagacactgggttagttgtttactaagggagtagagtttcaagcaaatctcttagactagttagagccccaaagaatctaaaactaagcgatttattttaggactatgagggcactaatttagctgaaagagttgcagtttcatcctggacctctgaggttaatgagatatacttaagatgagataaatgtaaccacttctgcctgagtttcatcagtattctataaaagaaatgcagcattaaaaataaatgagctgggttatttatatatttatttatttattttaaacgtggaggctcatgcctctaatctcagcactttgggaggccaaggcgagaggattgcttgagctcacgagtttgagacccacctgggcaaaacagggagacctcatctttacaaaaaataataaattacctggacatggtggcatggggctgtagtcccagctatttgggaagctgaggtggaaggatcacttgacccttggaggtcgaggctgcagtgaaccgtgatcatgccactgaacttcagcctgggtgacagagtaagaccctgtctttaaaaaaaaaaaattaacaaataataaaatgaacttgaaatcctatagtcttcctttttcccatcctagttttaatctccttaaccctccataggtagctactacatgaatttcatgtgtatcgttctagtctgtatttttatactttaccttacatattgtatctacaataatacattttattgttttggatttttaaaaaatgtataaatagtaaaatgtagatattgttttgcaaatattttcattcacccttttttttacatttattggtattgatagttataaatcctagttaatccaatttaatcattgtataatattccagcatgtgaccaaaccacaagtatttttctattgatcatcatttaggttgtttccaacttttcattattacaaagaatgctgtagtcaaacctccacactatatatactttaatgaaaagctgtaattagtttttctagagtatatgccttaaagtagaattgctggttgtgaattatgcccatttcatctttacaagattatcttaaaattgctctcaaggccgggcgcagtggctcacgcctgtaatcccagcactttgggaggccgaggcgggtggatcacgaggtcaggagatcgagaccatcctggctaacacggtgaaaccccatctctactaaaaatacaaaaaa

SEQ ID NO: 113333 - DNA, 1488 bp, Homo sapiens
  Payload ID: 2157
  Gene Symbol: CAMK1
  Gene Name: calcium/calmodulin-dependent protein kinase I
  Uniprot ID: Q14012
  ENST ID: ENST00000256460
  CDS Start-End: 179-1291
ggagagagccgccgagccgagccgagccccagctccagcaagagcgcgggcgggtggcccaggcacgcagcggtgaggaccgcggccacagctcggcgccaaccaccgcgggcctcccagccagccccgcggcggggcagccgcaggagccctggctgtggtcggggggcagtgggccatgctgggggcagtggaaggccccaggtggaagcaggcggaggacattagagacatctacgacttccgagatgttctgggcacgggggccttctcggaggtgatcctggcagaagataagaggacgcagaagctggtggccatcaaatgcattgccaaggaggccctggagggcaaggaaggcagcatggagaatgagattgctgtcctgcacaagatcaagcaccccaacattgtagccctggatgacatctatgagagtgggggccacctctacctcatcatgcagctggtgtcgggtggggagctctttgaccgtattgtggaaaaaggcttctacacggagcgggacgccagccgcctcatcttccaggtgctggatgctgtgaaatacctgcatgacctgggcattgtacaccgggatctcaagccagagaatctgctgtactacagcctggatgaagactccaaaatcatgatctccgactttggcctctccaagatggaggacccgggcagtgtgctctccaccgcctgtggaactccgggatacgtggcccctgaagtcctggcccagaagccctacagcaaggctgtggattgctggtccataggtgtcatcgcctacatcttgctctgcggttaccctcccttctatgacgagaatgatgccaaactctttgaacagattttgaaggccgagtacgagtttgactctccttactgggacgacatctctgactctgccaaagatttcatccggcacttgatggagaaggacccagagaaaagattcacctgtgagcaggccttgcagcacccatggattgcaggagatacagctctagataagaatatccaccagtcggtgagtgagcagatcaagaagaactttgccaagagcaagtggaagcaagccttcaatgccacggctgtggtgcggcacatgaggaaactgcagctgggcaccagccaggaggggcaggggcagacggcgagccatggggagctgctgacaccagtggctggggggccggcagctggctgttgctgtcgagactgctgcgtggagccgggcacagaactgtcccccacactgccccaccagctctagggccctggacctcgggtcatgatcctctgcgtgggagggcttgggggcagcctgctccccttccctccctgaaccgggagtttctctgccctgtcccctcctcacctgcttccctaccactcctcactgcattttccatacaaatgtttctattttattgttccttcttgtaataaagggaagataaaaccatcctt

SEQ ID NO: 113334 - DNA, 1423 bp, Homo sapiens
  Payload ID: 2157
  Gene Symbol: CAMK1
  Gene Name: calcium/calmodulin-dependent protein kinase I
  ENST ID: ENST00000397277
  CDS Start-End: 163-282
ccgagccgagccccagctccagcaagagcgcgggcgggtggcccaggcacgcagcggtgaggaccgcggccacagctcggcgccaaccaccgcgggcctcccagccagccccgcggcggggcagccgcaggagccctggctgtggtcggggggcagtgggccatgctgggggcagtggaaggccccaggtggaagcaggcggaggacattagagacatctacgacttccgagatgttctgggcacgctctccccaggtggtggcaaagatgatcgccattagctccaggcttacatcctaccagctcaacaggagactcattctcaaagtgctagggggccttctcggaggtgatcctggcagaagataagaggacgcagaagctggtggccatcaaatgcattgccaaggaggccctggagggcaaggaaggcagcatggagaatgagattgctgtcctgcacaagatcaagcaccccaacattgtagccctggatgacatctatgagagtgggggccacctctacctcatcatgcagctggtgtcgggtggggagctctttgaccgtattgtggaaaaaggcttctacacggagcgggacgccagccgcctcatcttccaggtgctggatgctgtgaaatacctgcatgacctgggcattgtacaccgggatctcaagccagagaatctgctgtactacagcctggatgaagactccaaaatcatgatctccgactttggcctctccaagatggaggacccgggcagtgtgctctccaccgcctgtggaactccgggatacgtggcccctgaagtcctggcccagaagccctacagcaaggctgtggattgctggtccataggtgtcatcgcctacatcttgctctgcggttaccctcccttctatgacgagaatgatgccaaactctttgaacagattttgaaggccgagtacgagtttgactctccttactgggacgacatctctgactctgccaaagatttcatccggcacttgatggagaaggacccagagaaaagattcacctgtgagcaggccttgcagcacccatgcaagccttcaatgccacggctgtggtgcggcacatgaggaaactgcagctgggcaccagccaggaggggcaggggcagacggcgagccatggggagctgctgacaccagtggctggggggccggcagctggctgttgctgtcgagactgctgcgtggagccgggcacagaactgtcccccacactgccccaccagctctagggccctggacctcgggtcatgatcctctgcgtgggagggcttgggggcagcctgctccccttccctccctgaaccgggagtttctctgccctgtcccctcctcacctgcttccctaccactcctcactgcattttccatacaaatgt

SEQ ID NO: 113335 - DNA, 950 bp, Homo sapiens
  Payload ID: 2157
  Gene Symbol: CAMK1
  Gene Name: calcium/calmodulin-dependent protein kinase I
  ENST ID: ENST00000421120
  CDS Start-End: 1-781
agactccaaaatcatgatctccgactttggcctctccaagatggaggacccgggcagtgtgctctccaccgcctgtggaactccgggatacgtggcccctgaagtcctggcccagaagccctacagcaaggctgtggattgctggtccataggtgtcatcgcctacatcttgctctgcggttaccctcccttctatgacgagaatgatgccaaactctttgaacagattttgaaggccgagtacgagtttgactctccttactgggacgacatctctgactctgccaaagatttcatccggcacttgatggagaaggacccagagaaaagattcacctgtgagcaggccttgcagcacccatggattgcaggagatacagctctagataagaatatccaccagtcggtgagtgagcagatcaagaagaactttgccaagagcaagtggaagcaagccttcaatgccacggctgtggtgcggcacatgaggaaactgcagctgggcaccagccaggaggggcaggggcagacggcgagccatggggagctgctgacaccagtggctgggggtgaggagcgggctctgcagaagggcatgggtggtccacaaaggtgcacccgggctggagtggagggcctgcccctgcggccacctctgttctgtcttcccatgcagggccggcagctggctgttgctgtcgagactgctgcgtggagccgggcacagaactgtcccccacactgccccaccagctctagggccctggacctcgggtcatgatcctctgcgtgggagggcttgggggcagcctgctccccttccctccctgaaccgggagtttctctgccctgtcccctcctcacctgcttccctaccactcctcactgcattttccatacaaatgtttctattttattgttccttcttgtaataaagggaagataaaacc

SEQ ID NO: 113336 - DNA, 560 bp, Homo sapiens
  Payload ID: 2157
  Gene Symbol: CAMK1
  Gene Name: calcium/calmodulin-dependent protein kinase I
  ENST ID: ENST00000411972
  CDS Start-End: 194-560
gagccgcaggcgggcggagagagccgccgagccgagccgagccccagctccagcaagagcgcgggcgggtggcccaggcacgcagcggtgaggaccgcggccacagctcggcgccaaccaccgcgggcctcccagccagccccgcggcggggcagccgcaggagccctggctgtggtcggggggcagtgggccatgctgggggcagtggaaggccccaggtggaagcaggcggaggacattagagacatctacgacttccgagatgttctgggcacgatcaagcaccccaacattgtagccctggatgacatctatgagagtgggggccacctctacctcatcatgcagctggtgtcgggtggggagctctttgaccgtattgtggaaaaaggcttctacacggagcgggacgccagccgcctcatcttccaggtgctggatgctgtgaaatacctgcatgacctgggcattgtacaccgggatctcaagccagagaatctgctgtactacagcctggatgaagactccaaaatcatgatctccgactttggcctctcca

SEQ ID NO: 113337 - DNA, 1578 bp, Homo sapiens
  Payload ID: 2158
  Gene Symbol: CAMK1D
  Gene Name: calcium/calmodulin-dependent protein kinase ID
  Uniprot ID: Q8IU85
  ENST ID: ENST00000378845
  CDS Start-End: 87-1160
cccgccgcctctgcgcccgcgccgcgcccccggcgccccctccccagcgcgcccccggccgctcctccgcgccgcgctcgtcggccatggcccgggagaacggcgagagcagctcctcctggaaaaagcaagctgaagacatcaagaagatcttcgagttcaaagagaccctcggaaccggggccttttccgaagtggttttagctgaagagaaggcaactggcaagctctttgctgtgaagtgtatccctaagaaggcgctgaagggcaaggaaagcagcatagagaatgagatagccgtcctgagaaagattaagcatgaaaatattgttgccctggaagacatttatgaaagcccaaatcacctgtacttggtcatgcagctggtgtccggtggagagctgtttgaccggatagtggagaaggggttttatacagagaaggatgccagcactctgatccgccaagtcttggacgccgtgtactatctccacagaatgggcatcgtccacagagacctcaagcccgaaaatctcttgtactacagtcaagatgaggagtccaaaataatgatcagtgactttggattgtcaaaaatggagggcaaaggagatgtgatgtccactgcctgtggaactccaggctatgtcgctcctgaagtcctcgcccagaaaccttacagcaaagccgttgactgctggtccatcggagtgattgcctacatcttgctctgcggctaccctcctttttatgatgaaaatgactccaagctctttgagcagatcctcaaggcggaatatgagtttgactctccctactgggatgacatctccgactctgcaaaagacttcattcggaacctgatggagaaggacccgaataaaagatacacgtgtgagcaggcagctcggcacccatggatcgctggtgacacagccctcaacaaaaacatccacgagtccgtcagcgcccagatccggaaaaactttgccaagagcaaatggagacaagcatttaatgccacggccgtcgtcagacatatgagaaaactacacctcggcagcagcctggacagttcaaatgcaagtgtttcgagcagcctcagtttggccagccaaaaagactgtgcgtatgtagcaaaaccagaatccctcagctgacactgaagacgagcctggggtggagaggagggagccggcatctgccgagcacctcctgtttgccaggcgctttctatacttaatcccatgtcatgcgaccctaggactttttttaacatgtaatcactgggctgggtgcagtggctcacgcctgtaatcccaacactttgggaggctgaggcaggaggactgtttgagttcaggagttttaagaccagcctgaccaacatggtgaaaccccatctctactaaaatataaaaattagccgggtgtggtggcgagcacctgtaatgtcagctacttgggaggctgaggcaggagaatcacttgaacccaggaagcggaggttgcaatgagctgagatcacaccactgcactccagcctgggtgacagattgagactccctctcaaaaaaa

SEQ ID NO: 113338 - DNA, 1725 bp, Homo sapiens
  Payload ID: 2158
  Gene Symbol: CAMK1D
  Gene Name: calcium/calmodulin-dependent protein kinase ID
  ENST ID: ENST00000615792
  CDS Start-End: 1-876
tactgtctcatgcaaagggtgtccggtggagagctgtttgaccggatagtggagaaggggttttatacagagaaggatgccagcactctgatccgccaagtcttggacgccgtgtactatctccacagaatgggcatcgtccacagagacctcaagcccgaaaatctcttgtactacagtcaagatgaggagtccaaaataatgatcagtgactttggattgtcaaaaatggagggcaaaggagatgtgatgtccactgcctgtggaactccaggctatgtcgctcctgaagtcctcgcccagaaaccttacagcaaagccgttgactgctggtccatcggagtgattgcctacatcttgctctgcggctaccctcctttttatgatgaaaatgactccaagctctttgagcagatcctcaaggcggaatatgagtttgactctccctactgggatgacatctccgactctgcaaaagacttcattcggaacctgatggagaaggacccgaataaaagatacacgtgtgagcaggcagctcggcacccatggatcgctggtgacacagccctcaacaaaaacatccacgagtccgtcagcgcccagatccggaaaaactttgccaagagcaaatggagacaagcatttaatgccacggccgtcgtcagacatatgagaaaactacacctcggcagcagcctggacagttcaaatgcaagtgtttcgagcagcctcagtttggccagccaaaaagactgtctggcaccttccacgctctgtagtttcatttcttcttcgtcgggggtctcaggagttggagccgagcggagacccaggcccaccactgtgacggcagtgcactctggaagcaagtgactggccctggaggtggggcccggggtcggggctggggaaggggagccccagggtcgccagagccgcgagccactccagcgagaccccaccttgcatggtgccccttcctgcataggactggaagaccgaagtttttttatggccatattttctactgcaattctgaagtgttcatttctcacaaactgtactgactcgaggggcgctgatttcataggatctggtgctgtatatacgaatcttgcaaagctctaactgaacggaccttcttattcctctcccctaacaccatcgtttccactcttctcagtgtaggtaaccgtctatggtgtgttttttcattaatgacaaaaaaaaaaaggtttcaactggattatttaaatattggtaaatattgtgcattagggtttgtttttccttttaagaagtatgtcctttgtatctctaagttacatgacctatatcttttcctctttaatagtagttttatgttaacctttaagagatttgtttttcctcaaaggagaatttaaaggtattttttaaaattctaataagaggatcagccgggtgcaatgactcatgcctgtaatcccagcacgttgggaggccaagtcgggcggatcacaaggtcaggagatcaaggccatcctggccaacatggtgaaaccccacgtctactaaaaatacaaaaaattagccgggcgtggtggcacacacctgtagtcccggctactcgggaggctgaggcaggagaattgcttgaacccgggagacggaggttgcagtgagctgagatcgtgccactgcactccagcctgggtgacagagcaagactctgtctcaaaa

SEQ ID NO: 113339 - DNA, 8153 bp, Homo sapiens
  Payload ID: 2158
  Gene Symbol: CAMK1D
  Gene Name: calcium/calmodulin-dependent protein kinase ID
  Uniprot ID: Q8IU85
  ENST ID: ENST00000619168
  CDS Start-End: 338-1495
ggaggaggcgcgaggtgggggggagcgcggcgggcggcagggagggagcgggagggaggcaagaaagtagcagaaagtgaggctggcaggcggcggcaaaggagccggcgcgcggcggcggcaggaagtctgtgcccgagaacagcagaaataagagccagggagggaccgcggccgcggcggcggcggcgagagcgaaagaggaaactgcagaggaggaagctgcgccgcagcccgagccgcccggcatccccgccgcctctgcgcccgcgccgcgcccccggcgccccctccccagcgcgcccccggccgctcctccgcgccgcgctcgtcggccatggcccgggagaacggcgagagcagctcctcctggaaaaagcaagctgaagacatcaagaagatcttcgagttcaaagagaccctcggaaccggggccttttccgaagtggttttagctgaagagaaggcaactggcaagctctttgctgtgaagtgtatccctaagaaggcgctgaagggcaaggaaagcagcatagagaatgagatagccgtcctgagaaagattaagcatgaaaatattgttgccctggaagacatttatgaaagcccaaatcacctgtacttggtcatgcagctggtgtccggtggagagctgtttgaccggatagtggagaaggggttttatacagagaaggatgccagcactctgatccgccaagtcttggacgccgtgtactatctccacagaatgggcatcgtccacagagacctcaagcccgaaaatctcttgtactacagtcaagatgaggagtccaaaataatgatcagtgactttggattgtcaaaaatggagggcaaaggagatgtgatgtccactgcctgtggaactccaggctatgtcgctcctgaagtcctcgcccagaaaccttacagcaaagccgttgactgctggtccatcggagtgattgcctacatcttgctctgcggctaccctcctttttatgatgaaaatgactccaagctctttgagcagatcctcaaggcggaatatgagtttgactctccctactgggatgacatctccgactctgcaaaagacttcattcggaacctgatggagaaggacccgaataaaagatacacgtgtgagcaggcagctcggcacccatggatcgctggtgacacagccctcaacaaaaacatccacgagtccgtcagcgcccagatccggaaaaactttgccaagagcaaatggagacaagcatttaatgccacggccgtcgtcagacatatgagaaaactacacctcggcagcagcctggacagttcaaatgcaagtgtttcgagcagcctcagtttggccagccaaaaagactgtctggcaccttccacgctctgtagtttcatttcttcttcgtcgggggtctcaggagttggagccgagcggagacccaggcccaccactgtgacggcagtgcactctggaagcaagtgactggccctggaggtggggcccggggtcggggctggggaaggggagccccagggtcgccagagccgcgagccactccagcgagaccccaccttgcatggtgccccttcctgcataggactggaagaccgaagtttttttatggccatattttctactgcaattctgaagtgttcatttctcacaaactgtactgactcgaggggcgctgatttcataggatctggtgctgtatatacgaatcttgcaaagctctaactgaacggaccttcttattcctctcccctaacaccatcgtttccactcttctcagtgtaggtaaccgtctatggtgtgttttttcattaatgacaaaaaaaaaaaggtttcaactggattatttaaatattggtaaatattgtgcattagggtttgtttttccttttaagaagtatgtcctttgtatctctaagttacatgacctatatcttttcctctttaatagtagttttatgttaacctttaagagatttgtttttcctcaaaggagaatttaaaggtattttttaaaattctaataagaggatcagccgggtgcaatgactcatgcctgtaatcccagcacgttgggaggccaagtcgggcggatcacaaggtcaggagatcaaggccatcctggccaacatggtgaaaccccacgtctactaaaaatacaaaaaattagccgggcgtggtggcacacacctgtagtcccggctactcgggaggctgaggcaggagaattgcttgaacccgggagacggaggttgcagtgagctgagatcgtgccactgcactccagcctgggtgacagagcaagactctgtctcaaaaaaaaaaaaaaaaattctaacaagaggatcatgaatctgtctccaaggctaagagtgcccttcacctctactccttctgtttctctccccttccccaggaggaggggcccctcagttctgcgaggctctcttctctgcgggggactttggtagagaatctgcacagagcctttgctggcaacccatccagcagaacccacacccaccagagaccctagaggcctcttgccatcagcaaccagaaataagcctgctcccccgagacgcagggctcagcttcacaggccagacttgctgtgagtgagatgcccacactgcagagatgcaggaccctcccttgcaaaaggaaccagctgccatgttgctgaaagtgggcccacacacaaccctcatttctcacgagagctaacagatgaaagctcagctatgcagtgttaaaattcatctctttctctgtggtttttaaaaaaatgcatttctaatcttacacttcacgtggcctccaacacaaagttctttctccacatttttaccctcttctcacatgaatgttttccaagggaaggaagggagggaagcagccttgggaaaggatccatttctggtggtaaggagagggggccctgccaggctaatgggacttcagccaccacagagatgaccaaagaccacctccgccaggcccagccagtgcttgcagccctcccattggtcaggggagtctaaaatcaaagatacatggtggtagggtcaccaaacgtcccatttgcccgagactgaaggatttctcaggctgtggacatttaatgccaaaaccaggaatatccggggcaaagcaggctgtgttgttcgcctttgtggagccaggcagtgtgtggcccagggaaagctgcgtttcatggaggcttccaggaggctgccctgtaaagccaggcaggtggcttcaagtgccattcctgcaagtgcccctgcttcagctctcaggcccatccaatgcctcgagcccacgggggtgtcccggcaggtctgcgtcatcacgacccagtaacgctgctggctgtgtcctcatgccctcttcctctggctggccagtcatgggaagtcctgttggttgagtcatctttgtcacttctacacctttgagtatgtacaggctgaatgttgagtgatgcccccccaccctctcaataaacacacacacacacacacacacacacacacacacacacaatgttattaggcacagcagctccatcctgctccctgagaatggcagtgcaggcacagagaagagcagttgggaagacaggcagctggtctaccctgtccccgcacacttcacaggcactccactgcttggcaggaattctgcatggcatctgccacgcatgctcacagggtgaaaaatcaagctgtcactctgcaaaatctaaaaaccctggaaaggtctataagatgacattagacccagttaagaagcaagtgtcacctgagttggccatgcaatgaatgaatattataagcagtattggagaactaggcggttgcttactaagaagtgtcttggaaacattcgagttcatacagtgcatgacaaagtaatagaaggctgcaagcgctgaaaatgcacccgaatctggtacctaggatgagtacatgaatagtgatgaatagccctttgtgctgtgtgctatatacaaccatttgcattcagaaagcagcatttgaagctgagttccattactggtgattgaagtattttcaggagcagatacatgtggtgcatgttatatgcacttagtttgaaagtatccctcacccaaaaagtgcagaacctctgaaaggtgagccgtggtgcaggtgcccccctcgctgttcgggtcagttcttggccatgcttggcctgtcacacgccgggtctcaacaacatcgtgcgaggagacagtgactggtttcagcccaagagtcaactgttgagcatgacatcaggaagcctgtactgtcctgatcccaccaggcttgggttaatttcctattgcttcagagaaagagaggcgctcttgtgcttttgagagagctctcatgttaaaaagaggttgtctttgcactgcgcttggtatgatttgttttcttataaaacaggaagagaacctagaatgtgcctttcgtgaaggtctgacaaatggggtctcagagtcctaggacccgcaccaaggtcagagtccacctgtagaggctgagcatttctacatgcacccagggtgctgggctgaggctaagggtggacgcgtagaccccatcacaggcttccttcctgagcccaagtcccccatttggtcactatcccttctcagagcaagtggattctcttttcctcacttggagtattcaatgttgaagtagtggcctggagtggcctttccctcagctgcctgtctgggctccctggcttcccggatcttcatctcatacgtgaggcaataggaggagtttctattcattgagacaaacagtgagcgggcaccaacaggccagcagcttggcccttttcacagaggtggccttggagtctggagtctgggcagctgtctgcctctctacggctctgcttcccagcgggcacacgggtccggagcctcagaatgaagtggtgcagaggcgcagggcacacctaggagaagctcaatgaccaccaaagcccttgaggagagacggggtttgctgtgttagagaaatggcaacccccaggaccatgcacggctctggcagtgcacagtggctgattttcaccagttcctcctacccctgcctctgtcggagactagaaaacattctaccccttcaggtcttcttttaaaagaaaagagctatggcaaagcgtgccatacaaagttaaaaaaaggaagagtggctttgcgttcttgaccatggccacaattctggtcacttctagcatctgaccttgagaacggtgtagagtctctgagccaccgctggcctttgagagagtctcactctccagctagctctttgtgtagtgtccagggccccggcagtcaggatagagcgagcaaaagaagatggacagtggacagggcgcagtggctcacgcctgtaatcccagcgctttgggagagcgaggcgggcagatcacaaggtcaagagatcaagaccattctggccaacatggtgaaaccctgtttctactaaaaatacaaaaattagctgggcatggtggtgcgtgcctgtaatcccagctactcgggaggctgaggcaggagaatcgcttgaacccgggaggcagaggttgcagtgagccgagatcgtgccactgcactccagcctgggtgacagagcaagactccgtctcaaaaaagatggccatgctggccaaggctgggctcataggaaatatctgtagtaggatgaaaggaatctggcctagggagccccggactcggtttacctaccccgtactcatcccactcatctgtctaccctagtgtccatcatgccctggatgaatcgtaggtgggagggacagaagccgagaacaccaggcacacggggtggggggaatggggggagcccaggtgatcccctttggaaagtggattgatcctctcccctgtggaatgacagcttaacctgattaacccactggggcttgctattttatgagcatttttaaacagaaaggaaagatgatatcccagtgcaggtagactttatttttgaaagcatcgtggcccctcacctctccctctcccccagaaccttggccagaattgagtcttcgcgttggggaggccacgctggaaccattgctctagggctgaaggtggaagtagggccactgccgcagcttcagccagagccctcgctgcttcgcagaatttaacaagcacacgactgggattcctttggatatgagaaaggaaggcaagtgcgggcaaagggaagctcctcccgtttttcataaacagaagtaagatgtcctctttcccaggtttgcacaatcacttctggcaaattaattgaaggtccttgaattcagccagtgcacgaaacctttgcatgttcttctgaaactgtacttcttccctattctgtctacccacactctgcgaactttgccttttccttaaacacattccagaccaaacactgttcagtttgttaaaaaaaaaaaaaaaaaaaaaagatgtatatacctgtatgtgatccaccacccttttgaggggcacctggtcctcggttggggctgcaggtgtgcctgacatttgcaaaagatattccagtctttcgatgttcagaattgaaaatgtggagatagaaaagctcaaacagactcctaaaaggagggtttctttcctgaagactccaagaaaatgagtgtgcagatgagttagcttgacaacctcaactctggggagcaggcaggcggtctgaggaagataagggcccacgccccactcacctggcacctgttcggtggtcccggggcatcatggtctgcagctctgggcccccagccccactgtgaagtcagtcctgcatgctggccgaggcccggccacctcccgatgcctccagagtcagtgggaaggagtcagcccttcccagacttccccgccacctccagcaggagcagctcagtttgtggctctgggagctccgcttttgcaaacccaaaaaggctgtgcatttggaagccaaacgctcagcatgcggctgccgagtctggttttgtggacaaagcaaactgtggaatggcttctcggtgtctgtataaagggacaaacggttgcattcaccctttgtactataacaccgcttctgcattcgccatatccgttttttaacctttttgtctccggggaacttctcattcgattattatgtcttctgatgatttgccatgttattttaaaggtgattttattttcttatggacaggaaaaaagaaaatgaggaggagttggttttactcttagagataagacttcagcaggggctcagaaaccccaaactctagttaaattgcttctcggaggaaaatcttaatctagacagattcagattcccaggctctcctggaagccctgcacttcagggcacaggggccctgggacgtggttggcagccaggctgcgagagagctaaaaaggaacaagaacatcagctcggatgtttgtctctcagccctgacacctgccactctccttcccggggcacttggccctatcagagggacatgaaatgctgtccgaatggtggcagaaatgcagcgacattgcatgcagcagagtctttgcttcgaaagatggggcgccatgtttcagagaacatttatcttagtcccacgttcaggtgagaagacctcaaaggtaccctctgtccagaataaacattggaacaatctctcaattggcttttgtcactacacataatgtaatctcccttctttcagctcccccaacagtgagcatgcttcccaaaaaattacaacatcaaaaccaggaatgtccccgcatctactattaccaggcttgcaattggttcaattttcccataaaaacatgtttgtccaaaagaagggaaactgtgaatttattccatgcatgtaataaactctgcaagaagtttaacccacataggtttgcggcactgcaaaattgttcatgggtctatgtagcaaatgattctctgccttgacaatcatgtatacatatcaagatttctatcataatgataatgagattgatgacttcctgttttcctccaataaagacaattaatcaccttca

SEQ ID NO: 113340 - DNA, 2612 bp, Homo sapiens
  Payload ID: 2159
  Gene Symbol: CAMK1G
  Gene Name: calcium/calmodulin-dependent protein kinase IG
  Uniprot ID: Q96NX5
  ENST ID: ENST00000009105
  CDS Start-End: 246-1676
acagacctgtaggagctggagtgggagctcaagcaggattcttcccgagtccctgggtaagacaaccctgcttcttttcttggctttagagggtctccttgcttaatgggaagcgtgcagcacctagtgagtggatttgaagagccactttgtaagcaacttgggcatttatttcagccccagttccagtcttccctgactcttttggcatcaaggcatcctcagaagcttcaactctggaggcaatgggtcgaaaggaagaagatgactgcagttcctggaagaaacagaccaccaacatccggaaaaccttcatttttatggaagtgctgggatcaggagctttctcagaagttttcctggtgaagcaaagactgactgggaagctctttgctctgaagtgcatcaagaagtcacctgccttccgggacagcagcctggagaatgagattgctgtgttgaaaaagatcaagcatgaaaacattgtgaccctggaggacatctatgagagcaccacccactactacctggtcatgcagcttgtttctggtggggagctctttgaccggatcctggagcggggtgtctacacagagaaggatgccagtctggtgatccagcaggtcttgtcggcagtgaaatacctacatgagaatggcatcgtccacagagacttaaagcccgaaaacctgctttaccttacccctgaagagaactctaagatcatgatcactgactttggtctgtccaagatggaacagaatggcatcatgtccactgcctgtgggaccccaggctacgtggctccagaagtgctggcccagaaaccctacagcaaggctgtggattgctggtccatcggcgtcatcacctacatattgctctgtggataccccccattctatgaagaaacggagtctaagcttttcgagaagatcaaggagggctactatgagtttgagtctccattctgggatgacatttctgagtcagccaaggactttatttgccacttgcttgagaaggatccgaacgagcggtacacctgtgagaaggccttgagtcatccctggattgacggaaacacagccctccaccgggacatctacccatcagtcagcctccagatccagaagaactttgctaagagcaagtggaggcaagccttcaacgcagcagctgtggtgcaccacatgaggaagctacacatgaacctgcacagcccgggcgtccgcccagaggtggagaacaggccgcctgaaactcaagcctcagaaacctctagacccagctcccctgagatcaccatcaccgaggcacctgtcctggaccacagtgtagcactccctgccctgacccaattaccctgccagcatggccgccggcccactgcccctggtggcaggtccctcaactgcctggtcaatggctccctccacatcagcagcagcctggtgcccatgcatcaggggtccctggccgccgggccctgtggctgctgctccagctgcctgaacattgggagcaaaggaaagtcctcctactgctctgagcccacactcctcaaaaaggccaacaaaaaacagaacttcaagtcggaggtcatggtaccagttaaagccagtggcagctcccactgccgggcagggcagactggagtctgtctcattatgtgattcctggagcctgtgcctatgtcactgcaattttcaggagacatattcaactcctctgctcttccaaacctggtgtctatccggcagagggaggaaggcagagcaagtggagcagggcttagcaggagcagtttctggccagaagcaccagcctgctgccagcggggcagcccctcataggaggcccaggagggagccccaaggcgtagaagccttgttgaagctgtgagcaggagaagcggtgcccaccagcttccaggtctccctgacctgcctgctctatgccccacaccctacgtgccgtggctctgtgcagtgtacgtagatagctctcgcctgggtctgtgctgtttgtcgtgaaaagcttaatgggctggccaggctgtgtcaccttctccaagcaaagccatatggagcatctacccagactcccactctgcacacactcactcccacctctcaagcctccaacctcttggccagattgggctcattaatgtcgttgcctgcccatctgcatgaatgacaggcagctccccatggtggtctgcctgtgagctcttcaagttctaatccttaactccaggattagctcccaagtgcgctgagacccagccagcacacttctggcccttctccctgcctcaatctaaaagcagtgccacaccctccaaagtggaatagaaagaagttcatgagtaagggctgcaaggaattcttatcctggccacatgtcctccgtgcacacacccaatggagttaaccttggaagttgactattttaatgtctgccaggagttctaatcctgcctctgttcccttttctctccttgaaagtccagcacaccattcttgtccttccccagtttcctcgccctccacccctccagcttcatgctcagtgttgtgcttaataaaatggacatatttttctct

SEQ ID NO: 113341 - DNA, 2440 bp, Homo sapiens
  Payload ID: 2159
  Gene Symbol: CAMK1G
  Gene Name: calcium/calmodulin-dependent protein kinase IG
  Uniprot ID: Q96NX5
  ENST ID: ENST00000361322
  CDS Start-End: 74-1504
gagctggagtgggagctcaagcaggattcttcccgagtccctggcatcctcagaagcttcaactctggaggcaatgggtcgaaaggaagaagatgactgcagttcctggaagaaacagaccaccaacatccggaaaaccttcatttttatggaagtgctgggatcaggagctttctcagaagttttcctggtgaagcaaagactgactgggaagctctttgctctgaagtgcatcaagaagtcacctgccttccgggacagcagcctggagaatgagattgctgtgttgaaaaagatcaagcatgaaaacattgtgaccctggaggacatctatgagagcaccacccactactacctggtcatgcagcttgtttctggtggggagctctttgaccggatcctggagcggggtgtctacacagagaaggatgccagtctggtgatccagcaggtcttgtcggcagtgaaatacctacatgagaatggcatcgtccacagagacttaaagcccgaaaacctgctttaccttacccctgaagagaactctaagatcatgatcactgactttggtctgtccaagatggaacagaatggcatcatgtccactgcctgtgggaccccaggctacgtggctccagaagtgctggcccagaaaccctacagcaaggctgtggattgctggtccatcggcgtcatcacctacatattgctctgtggataccccccattctatgaagaaacggagtctaagcttttcgagaagatcaaggagggctactatgagtttgagtctccattctgggatgacatttctgagtcagccaaggactttatttgccacttgcttgagaaggatccgaacgagcggtacacctgtgagaaggccttgagtcatccctggattgacggaaacacagccctccaccgggacatctacccatcagtcagcctccagatccagaagaactttgctaagagcaagtggaggcaagccttcaacgcagcagctgtggtgcaccacatgaggaagctacacatgaacctgcacagcccgggcgtccgcccagaggtggagaacaggccgcctgaaactcaagcctcagaaacctctagacccagctcccctgagatcaccatcaccgaggcacctgtcctggaccacagtgtagcactccctgccctgacccaattaccctgccagcatggccgccggcccactgcccctggtggcaggtccctcaactgcctggtcaatggctccctccacatcagcagcagcctggtgcccatgcatcaggggtccctggccgccgggccctgtggctgctgctccagctgcctgaacattgggagcaaaggaaagtcctcctactgctctgagcccacactcctcaaaaaggccaacaaaaaacagaacttcaagtcggaggtcatggtaccagttaaagccagtggcagctcccactgccgggcagggcagactggagtctgtctcattatgtgattcctggagcctgtgcctatgtcactgcaattttcaggagacatattcaactcctctgctcttccaaacctggtgtctatccggcagagggaggaaggcagagcaagtggagcagggcttagcaggagcagtttctggccagaagcaccagcctgctgccagcggggcagcccctcataggaggcccaggagggagccccaaggcgtagaagccttgttgaagctgtgagcaggagaagcggtgcccaccagcttccaggtctccctgacctgcctgctctatgccccacaccctacgtgccgtggctctgtgcagtgtacgtagatagctctcgcctgggtctgtgctgtttgtcgtgaaaagcttaatgggctggccaggctgtgtcaccttctccaagcaaagccatatggagcatctacccagactcccactctgcacacactcactcccacctctcaagcctccaacctcttggccagattgggctcattaatgtcgttgcctgcccatctgcatgaatgacaggcagctccccatggtggtctgcctgtgagctcttcaagttctaatccttaactccaggattagctcccaagtgcgctgagacccagccagcacacttctggcccttctccctgcctcaatctaaaagcagtgccacaccctccaaagtggaatagaaagaagttcatgagtaagggctgcaaggaattcttatcctggccacatgtcctccgtgcacacacccaatggagttaaccttggaagttgactattttaatgtctgccaggagttctaatcctgcctctgttcccttttctctccttgaaagtccagcacaccattcttgtccttccccagtttcctcgccctccacccctccagcttcatgctcagtgttgtgcttaataaaatggacatatttttctct

SEQ ID NO: 113342 - DNA, 808 bp, Homo sapiens
  Payload ID: 2159
  Gene Symbol: CAMK1G
  Gene Name: calcium/calmodulin-dependent protein kinase IG
  ENST ID: ENST00000423146
  CDS Start-End: 74-808
gagctggagtgggagctcaagcaggattcttcccgagtccctggcatcctcagaagcttcaactctggaggcaatgggtcgaaaggaagaagatgactgcagttcctggaagaaacagaccaccaacatccggaaaaccttcatttttatggaagtgctgggatcaggagctttctcagaagttttcctggtgaagcaaagactgactgggaagctctttgctctgaagtgcatcaagaagtcacctgccttccgggacagcagcctggagaatgagattgctgtgttgaaaaagatcaagcatgaaaacattgtgaccctggaggacatctatgagagcaccacccactactacctggtcatgcagcttgtttctggtggggagctctttgaccggatcctggagcggggtgtctacacagagaaggatgccagtctggtgatccagcaggtcttgtcggcagtgaaatacctacatgagaatggcatcgtccacagagacttaaagcccgaaaacctgctttaccttacccctgaagagaactctaagatcatgatcactgactttggtctgtccaagatggaacagaatggcatcatgtccactgcctgtgggaccccaggctacgtgggctctgtggataccccccattctatgaagaaacggagtctaagcttttcgagaagatcaaggagggctactatgagtttgagtctccattctgggatgacatttctgagtcagccaaggactttatttgccacttgcttgagaaggatccgaacgagcggtacacctgtgagaagg

SEQ ID NO: 113343 - DNA, 5322 bp, Homo sapiens
  Payload ID: 2160
  Gene Symbol: CAMK2A
  Gene Name: calcium/calmodulin-dependent protein kinase II alpha
  Uniprot ID: Q9UQM7
  ENST ID: ENST00000348628
  CDS Start-End: 667-2103
tttccctgtaaaccttagaacccagctgttgccagggcaacggggcaatacctgtctctctagagatgaagttgccagggtaactgcatcctgtcattcgttcctggggaccatccggaatgcggcacccactggctgttaccatggcaactgcctttttgccccacttaatcccatcccgtctgctacaagggccccacagttggaggtgggggaggtgggaagagaaaagatcacttgtggacaaagtttgctctattccacctcctccaggccctccttgggtccatcaccccaggggtgctgggtccatcccacccccaggcccacacaggcttgcagtattgtgtgcggtatggtcagggcgtccgagagcaggtttcgcagtggaaggcaggcaggtgttggggaggcagttaccggggcaacgggaacagggcgttttggaggtggttgccatggggacctggatgctgacgaaggctcgcgaggctgtgagcagccacagtgccctgctcagaagccccgggctcgtcagtcaaaccggttctctgtttgcactcggcagcacgggcaggcaagtggtccctaggttcgggagcagagcagcagcgcctcagtcctggtcccccagtcccaagcctcacctgcctgcccagcgccaggatggccaccatcacctgcacccgcttcacggaagagtaccagctcttcgaggaattgggcaagggagccttctcggtggtgcgaaggtgtgtgaaggtgctggctggccaggagtatgctgccaagatcatcaacacaaagaagctgtcagccagagaccatcagaagctggagcgtgaagcccgcatctgccgcctgctgaagcaccccaacatcgtccgactacatgacagcatctcagaggagggacaccactacctgatcttcgacctggtcactggtggggaactgtttgaagatatcgtggcccgggagtattacagtgaggcggatgccagtcactgtatccagcagatcctggaggctgtgctgcactgccaccagatgggggtggtgcaccgggacctgaagcctgagaatctgttgctggcctccaagctcaagggtgccgcagtgaagctggcagactttggcctggccatagaggtggagggggagcagcaggcatggtttgggtttgcagggactcctggatatctctccccagaagtgctgcggaaggacccgtacgggaagcctgtggacctgtgggcttgtggggtcatcctgtacatcctgctggttgggtaccccccgttctgggatgaggaccagcaccgcctgtaccagcagatcaaagccggcgcctatgatttcccatcgccggaatgggacactgtcaccccggaagccaaggatctgatcaataagatgctgaccattaacccatccaaacgcatcacagctgccgaagcccttaagcacccctggatctcgcaccgctccaccgtggcatcctgcatgcacagacaggagaccgtggactgcctgaagaagttcaatgccaggaggaaactgaagggagccattctcaccacgatgctggccaccaggaacttctccggagggaagagtgggggaaacaagaagagcgatggtgtgaaggaatcctcagagagcaccaacaccaccatcgaggatgaagacaccaaagtgcggaaacaggaaattataaaagtgacagagcagctgattgaagccataagcaatggagattttgagtcctacacgaagatgtgcgaccctggcatgacagccttcgaacctgaggccctggggaacctggttgagggcctggacttccatcgattctattttgaaaacctgtggtcccggaacagcaagcccgtgcacaccaccatcctgaatccccacatccacctgatgggcgacgagtcagcctgcatcgcctacatccgcatcacgcagtacctggacgctggcggcatcccacgcaccgcccagtcggaggagacccgtgtctggcaccgccgggatggcaaatggcagatcgtccacttccacagatctggggcgccctccgtcctgccccactgagggaccaggctggggtcgctgcgttgctgtgccgcagagatccactctgtccgtggagtggagctgctggttctcccaggtggattttgctggaattctcccatgtcatcaccccaccaccgtcacttctgtacctgcatcaagaaaacctgcttgttcacaaaagtcatcgcaacttcagagcgaacggccacatctccccacctctcacccccaccctctcccctgccaggctggggcttcctcaggcatgggtgtccacagcactggccccctctccccagcctcagctgctgtccgcctgatctgtcttgggctgtaggctagaatgcccgggctggtgcccaccaggggctggggagaaggaggggtggcatgatgaggaaggcagcatccgtccgtccctctcccagacctctcctcttccagtgtccccggggaagggcagatgacactcccttccccctaagccaaccgcactgaaggagtggggagaagagcatacgccaggagcctcctgcctcaaagtgctcccctaagtcttcttcctcctgtgctgacctcagggtggtctgacccttccctcggtgtgggggatgtggccctctcaggtgcccctacttgctttctgcttccttctggtgaagtccacctccaacattaacctgcccaccccacccccgtcatccctggagaattccagctttgtcgtatctcagagagggaatctaattgtttttggggggcaaaagaaagcaacgtttaggtatcacttctacttggaccgcatgcctttttatagccaaatttctgtgtatttcgtaaatggatttcgcgttaatggatatttatgtaataactagacttctcagattattgtgagaagggtcaggttggaaggggtgtaggaagaggggtgaggggtagtttttttctgttctagtttttttttttttttttgtcatctctgaggtggaccttgtcacctgtggttattggggccaaggtggactcagctccggggagaagggcctctctgccatttcggtcccaaggtgagctgacacaggcgttccttttgggactgtggaagcatcagatgccagcactgactcaggaacagcaagtcagggcagagaggaggagggaggctgtcaggatggaaatacctggacttttctttgcttccctcgcaaactggggtcttctctaccgaacttcccaggatttcatctcaccatatctgtgtgccgcccccagcaccccccacccacctctggggggcccgtgagcgtgtgtcttcattgcctctctccccttggcgtctgatgaccacagcaaagcactgggaatttctactcttcatgcctcatcctgcagcctcgggttcgcattctctctttcttttcctctttccctctttccctgggattgactctgagtggaataccttggcacatccactaggatctactgtctgcactgttttctttgcatgactttatacgcagtaagtatgttgaaaacaaacaaaaagaagaaaacactcaacaaaaccaatctacatgttttggactaaaaaaaaaaatagaggttgtattctcagtgtccgactcggaattatgttgctgcctctctgtgcttttggcctctgtgtggccgtgttttgccagcatgagatactgtcccctctggaggattttaggggaggaagagccacgtccccagggattggaggaggctccggtaccctcgaccctcctgggtgttggttggagcagaactggtgaggatgtttgatccgagattttctgagctctccccaatcaccagctgtctgctgggttcttttctcaagtcctgctgcccaggcccaggtgagacaggcaacgccaggtctgcaggccaggagagatgctgcccaggcctcctggtttccaagctggtccatcactggcctctgtccttggcagagaccttgctgcccaggcccaggggcaggctcttggcctgccccaggcccagagggcttcccagtaaggcccagtgatcccattatcccaggggcaaaaccacctgtccccttttgagctgccagttccctacagccatccccagtcaagggtgagggtgtggccttcaccaggggctgctgtaattaccgagcaaggtctgagctcttcttcagcctcagttccctcattggttaaaagggttctttgttcccatccagccgatgaaggagcaaacgtctggctatgtgaagcctaatttacctgcaggaactggcagggatagtcactggctggactcctgtttacttctagacctggtcaggctccatcccctcccccacctgcccctgattcccctcgtcggtgcctgtcaactgcttttcagcagtggactgcaggggaaagagcagtgatttggggtgagtaggcttcaattcccagctctgaccagacttgctgtgtgaccttgggcaagttcctttccctctttggagcttggtttccctgccagaggaaactgagctggaggagcctgaggtcctgcctttcattggctgacacacctcctgtccactgtgtcactctccaagtgccagagaagtggaggcagatcgctaccccaggctgagatggcccccactgtgaaggccacgcctgtgggtgggcagccacctggtgccaccacagggcaccagggatgatcctgatgtggcaggcaggggagactcacagaaaaatctgcccagagcctaccctcaccagacaaactctgtgctcctccaaaacatcctttagatgcaaaataataataataataataataaataaataaataaaaatccaaacccaagtcaaaaccttggctccagcatgaaaacacgtttacaggaaagtgttctcctgggtttgtgcccaccatggtgcgaatcctgacccaaggcctcctgtctcccttcaaagggagacccttttgggggatgagtttgccagactccccgtgctggtttctttgttactatttgtttggggttttgttttagttctttttttttttcttttcttttttaaaaatatgtggctgtgaacttgaatgaacactgctcaaactttctgctattggggggggcgggtgggatgggaagaaggggcgtttgttttattcttggtgttttcagtgcaataaatagctacaaacttctgtgca

SEQ ID NO: 113344 - DNA, 1493 bp, Homo sapiens
  Payload ID: 2160
  Gene Symbol: CAMK2A
  Gene Name: calcium/calmodulin-dependent protein kinase II alpha
  Uniprot ID: Q9UQM7
  ENST ID: ENST00000398376
  CDS Start-End: 5-1474
caggatggccaccatcacctgcacccgcttcacggaagagtaccagctcttcgaggaattgggcaagggagccttctcggtggtgcgaaggtgtgtgaaggtgctggctggccaggagtatgctgccaagatcatcaacacaaagaagctgtcagccagagaccatcagaagctggagcgtgaagcccgcatctgccgcctgctgaagcaccccaacatcgtccgactacatgacagcatctcagaggagggacaccactacctgatcttcgacctggtcactggtggggaactgtttgaagatatcgtggcccgggagtattacagtgaggcggatgccagtcactgtatccagcagatcctggaggctgtgctgcactgccaccagatgggggtggtgcaccgggacctgaagcctgagaatctgttgctggcctccaagctcaagggtgccgcagtgaagctggcagactttggcctggccatagaggtggagggggagcagcaggcatggtttgggtttgcagggactcctggatatctctccccagaagtgctgcggaaggacccgtacgggaagcctgtggacctgtgggcttgtggggtcatcctgtacatcctgctggttgggtaccccccgttctgggatgaggaccagcaccgcctgtaccagcagatcaaagccggcgcctatgatttcccatcgccggaatgggacactgtcaccccggaagccaaggatctgatcaataagatgctgaccattaacccatccaaacgcatcacagctgccgaagcccttaagcacccctggatctcgcaccgctccaccgtggcatcctgcatgcacagacaggagaccgtggactgcctgaagaagttcaatgccaggaggaaactgaagggagccattctcaccacgatgctggccaccaggaacttctccggagggaagagtgggggaaacaagaagagcgatggtgtgaagaaaagaaagtccagttccagcgttcagttaatggaatcctcagagagcaccaacaccaccatcgaggatgaagacaccaaagtgcggaaacaggaaattataaaagtgacagagcagctgattgaagccataagcaatggagattttgagtcctacacgaagatgtgcgaccctggcatgacagccttcgaacctgaggccctggggaacctggttgagggcctggacttccatcgattctattttgaaaacctgtggtcccggaacagcaagcccgtgcacaccaccatcctgaatccccacatccacctgatgggcgacgagtcagcctgcatcgcctacatccgcatcacgcagtacctggacgctggcggcatcccacgcaccgcccagtcggaggagacccgtgtctggcaccgccgggatggcaaatggcagatcgtccacttccacagatctggggcgccctccgtcctgccccactgagggaccaggctggggtcgc

SEQ ID NO: 113345 - DNA, 540 bp, Homo sapiens
  Payload ID: 2160
  Gene Symbol: CAMK2A
  Gene Name: calcium/calmodulin-dependent protein kinase II alpha
  ENST ID: ENST00000510347
  CDS Start-End: 269-540
aaaagatcacttgtggacaaagtttgctctattccacctcctccaggccctccttgggtccatcaccccaggggtgctgggtccatcccacccccaggcccacacaggcttgcagtattgtgtgcggtatggtcagggcgtccgagagcaggtttcgcagtggaaggcagcacgggcaggcaagtggtccctaggttcgggagcagagcagcagcgcctcagtcctggtcccccagtcccaagcctcacctgcctgcccagcgccaggatggccaccatcacctgcacccgcttcacggaagagtaccagctcttcgaggaattgggcaagggagccttctcggtggtgcgaaggtgtgtgaaggtgctggctggccaggagtatgctgccaagatcatcaacacaaagaagctgtcagccagagaccatcagaagctggagcgtgaagcccgcatctgccgcctgctgaagcaccccaacatcgtccgactacatgacagcatctcagaggagggacaccactacctgatcttcgacct

SEQ ID NO: 113346 - DNA, 557 bp, Homo sapiens
  Payload ID: 2160
  Gene Symbol: CAMK2A
  Gene Name: calcium/calmodulin-dependent protein kinase II alpha
  ENST ID: ENST00000515758
  CDS Start-End: 485-557
atgtgcaattctctcctgaagtgagagggcccagcgggatctgcttgtagaggtgaagtcggccatttagtctggctagagtatagggcctgaggaacaggcctggaggagtctcggagaagcctcacatttaagaatcatggaaacggaggccagagagggcgagggatgtgcttgagtcactgcaacccaggcctcttcctctttccactgcaccccatggtcttcctggagaactcagaggccctggccagaagaccatcagaagctggagcgtgaagcccgcatctgccgcctgctgaagcaccccaacatcgtccgactacatgacagcatctcagaggagggacaccactacctgatcttcgacctggtcactggtggggaactgtttgaagatatcgtggcccgggagtattacagtgaggcggatgccagtcactgtatccagcagatcctggaggctgtgctgcactgccaccagatgggggtggtgcaccgggacctgaagcctgagaatctgttgctggcctccaagctcaagggtgccgcagtga

SEQ ID NO: 113347 - DNA, 1652 bp, Homo sapiens
  Payload ID: 2161
  Gene Symbol: CAMK2B
  Gene Name: calcium/calmodulin-dependent protein kinase II beta
  Uniprot ID: Q13554
  ENST ID: ENST00000258682
  CDS Start-End: 4-1557
gccatggccaccacggtgacctgcacccgcttcaccgacgagtaccagctctacgaggatattggcaagggggctttctctgtggtccgacgctgtgtcaagctctgcaccggccatgagtatgcagccaagatcatcaacaccaagaagctgtcagccagagatcaccagaagctggagagagaggctcggatctgccgccttctgaagcattccaacatcgtgcgtctccacgacagcatctccgaggagggcttccactacctggtcttcgatctggtcactggtggggagctctttgaagacattgtggcgagagagtactacagcgaggctgatgccagtcactgtatccagcagatcctggaggccgttctccattgtcaccaaatgggggtcgtccacagagacctcaagccggagaacctgcttctggccagcaagtgcaaaggggctgcagtgaagctggcagacttcggcctagctatcgaggtgcagggggaccagcaggcatggtttggtttcgctggcacaccaggctacctgtcccctgaggtccttcgcaaagaggcgtatggcaagcctgtggacatctgggcatgtggggtgatcctgtacatcctgctcgtgggctacccacccttctgggacgaggaccagcacaagctgtaccagcagatcaaggctggtgcctatgacttcccgtcccctgagtgggacaccgtcactcctgaagccaaaaacctcatcaaccagatgctgaccatcaaccctgccaagcgcatcacagcccatgaggccctgaagcacccgtgggtctgccaacgctccacggtagcatccatgatgcacagacaggagactgtggagtgtctgaaaaagttcaatgccaggagaaagctcaagggagccatcctcaccaccatgctggccacacggaatttctcagccaagagtttactcaacaagaaagcagatggagtcaagccccagacgaatagcaccaaaaacagtgcagccgccaccagccccaaagggacgcttcctcctgccgccctggagcctcaaaccaccgtcatccataacccagtggacgggattaaggagtcttctgacagtgccaataccaccatagaggatgaagacgctaaagcccggaagcaggagatcattaagaccacggagcagctcatcgaggccgtcaacaacggtgactttgaggcctacgcgaaaatctgtgacccagggctgacctcgtttgagcctgaagcactgggcaacctggttgaagggatggacttccacagattctacttcgagaacctgctggccaagaacagcaagccgatccacacgaccatcctgaacccacacgtgcacgtcattggagaggatgccgcctgcatcgcttacatccggctcacgcagtacattgacgggcagggccggccccgcaccagccagtctgaggagacccgcgtgtggcaccgccgcgacggcaagtggcagaacgtgcacttccactgctcgggcgcgcctgtggccccgctgcagtgaagagctgcgccctggtttcgccggacagagttggtgtttggagcccgactgccctcgggcacacggcctgcctgtcgcatgtttgtgtctgcctc

SEQ ID NO: 113348 - DNA, 2292 bp, Homo sapiens
  Payload ID: 2161
  Gene Symbol: CAMK2B
  Gene Name: calcium/calmodulin-dependent protein kinase II beta
  Uniprot ID: Q13554
  ENST ID: ENST00000350811
  CDS Start-End: 76-1704
gtgcccgcgagcgggagccggagtcgccgccgcccgagcgcagccgagcgcacgccgagcccgtccgccgccgccatggccaccacggtgacctgcacccgcttcaccgacgagtaccagctctacgaggatattggcaagggggctttctctgtggtccgacgctgtgtcaagctctgcaccggccatgagtatgcagccaagatcatcaacaccaagaagctgtcagccagagatcaccagaagctggagagagaggctcggatctgccgccttctgaagcattccaacatcgtgcgtctccacgacagcatctccgaggagggcttccactacctggtcttcgatctggtcactggtggggagctctttgaagacattgtggcgagagagtactacagcgaggctgatgccagtcactgtatccagcagatcctggaggccgttctccattgtcaccaaatgggggtcgtccacagagacctcaagccggagaacctgcttctggccagcaagtgcaaaggggctgcagtgaagctggcagacttcggcctagctatcgaggtgcagggggaccagcaggcatggtttggtttcgctggcacaccaggctacctgtcccctgaggtccttcgcaaagaggcgtatggcaagcctgtggacatctgggcatgtggggtgatcctgtacatcctgctcgtgggctacccacccttctgggacgaggaccagcacaagctgtaccagcagatcaaggctggtgcctatgacttcccgtcccctgagtgggacaccgtcactcctgaagccaaaaacctcatcaaccagatgctgaccatcaaccctgccaagcgcatcacagcccatgaggccctgaagcacccgtgggtctgccaacgctccacggtagcatccatgatgcacagacaggagactgtggagtgtctgaaaaagttcaatgccaggagaaagctcaagggagccatcctcaccaccatgctggccacacggaatttctcagtgggcagacagaccaccgctccggccacaatgtccaccgcggcctccggcaccaccatggggctggtggaacaagccaagagtttactcaacaagaaagcagatggagtcaagccccagacgaatagcaccaaaaacagtgcagccgccaccagccccaaagggacgcttcctcctgccgccctggagcctcaaaccaccgtcatccataacccagtggacgggattaaggagtcttctgacagtgccaataccaccatagaggatgaagacgctaaagcccggaagcaggagatcattaagaccacggagcagctcatcgaggccgtcaacaacggtgactttgaggcctacgcgaaaatctgtgacccagggctgacctcgtttgagcctgaagcactgggcaacctggttgaagggatggacttccacagattctacttcgagaacctgctggccaagaacagcaagccgatccacacgaccatcctgaacccacacgtgcacgtcattggagaggatgccgcctgcatcgcttacatccggctcacgcagtacattgacgggcagggccggccccgcaccagccagtctgaggagacccgcgtgtggcaccgccgcgacggcaagtggcagaacgtgcacttccactgctcgggcgcgcctgtggccccgctgcagtgaagccaagggaggggcacagaatggggaacaggacacaggatcctaaactccaaggggactgtccaccgatgaacactcagagtggacaccatcttccgtccacgctgtgcccaggacagctgtccccatccatgaacacagggtaaacatctgccgggctccgcaccagtggctccctgggccatgggacagcggcagggctcaccacggacagcacgtggcccagcagccggccaccctggcgtcctggggcctcctcccctcctctccctctcaccttgtcacctccacggagctgcctgtctgggataatttggggattttttttctgggggataattcttttgcatgacccctaaagagcaagccacaccggtctgctagctaggtgtccgcggtgtggtggtggcggccgctggccagcgctgcaaggggtcggctgcccacggtgctggctggcctcccctcctctctctttttgctgagtttcattgtcttttctttctgagccttgtaagtgtacaaaaattattcttattttgttctgtctcgggaaactgcaaataaaagaaaaacaggacaaactgc

SEQ ID NO: 113349 - DNA, 1624 bp, Homo sapiens
  Payload ID: 2161
  Gene Symbol: CAMK2B
  Gene Name: calcium/calmodulin-dependent protein kinase II beta
  Uniprot ID: Q13554
  ENST ID: ENST00000353625
  CDS Start-End: 11-1450
cgccgccgccatggccaccacggtgacctgcacccgcttcaccgacgagtaccagctctacgaggatattggcaagggggctttctctgtggtccgacgctgtgtcaagctctgcaccggccatgagtatgcagccaagatcatcaacaccaagaagctgtcagccagagatcaccagaagctggagagagaggctcggatctgccgccttctgaagcattccaacatcgtgcgtctccacgacagcatctccgaggagggcttccactacctggtcttcgatctggtcactggtggggagctctttgaagacattgtggcgagagagtactacagcgaggctgatgccagtcactgtatccagcagatcctggaggccgttctccattgtcaccaaatgggggtcgtccacagagacctcaagccggagaacctgcttctggccagcaagtgcaaaggggctgcagtgaagctggcagacttcggcctagctatcgaggtgcagggggaccagcaggcatggtttggtttcgctggcacaccaggctacctgtcccctgaggtccttcgcaaagaggcgtatggcaagcctgtggacatctgggcatgtggggtgatcctgtacatcctgctcgtgggctacccacccttctgggacgaggaccagcacaagctgtaccagcagatcaaggctggtgcctatgacttcccgtcccctgagtgggacaccgtcactcctgaagccaaaaacctcatcaaccagatgctgaccatcaaccctgccaagcgcatcacagcccatgaggccctgaagcacccgtgggtctgccaacgctccacggtagcatccatgatgcacagacaggagactgtggagtgtctgaaaaagttcaatgccaggagaaagctcaagggagccatcctcaccaccatgctggccacacggaatttctcagcagccaagagtttactcaacaagaaagcagatggagtcaaggagtcttctgacagtgccaataccaccatagaggatgaagacgctaaagcccggaagcaggagatcattaagaccacggagcagctcatcgaggccgtcaacaacggtgactttgaggcctacgcgaaaatctgtgacccagggctgacctcgtttgagcctgaagcactgggcaacctggttgaagggatggacttccacagattctacttcgagaacctgctggccaagaacagcaagccgatccacacgaccatcctgaacccacacgtgcacgtcattggagaggatgccgcctgcatcgcttacatccggctcacgcagtacattgacgggcagggccggccccgcaccagccagtctgaggagacccgcgtgtggcaccgccgcgacggcaagtggcagaacgtgcacttccactgctcgggcgcgcctgtggccccgctgcagtgaagagctgcgccctggtttcgccggacagagttggtgtttggagcccgactgccctcgggcacacggcctgcctgtcgcatgtttgtgtctgcctcgttccctcccctggtgcctgtgtctgcagaaaaacaagaccagatgtgatttgttaaaaaaaaacaaaaaaaaaaaaaa

SEQ ID NO: 113350 - DNA, 1448 bp, Homo sapiens
  Payload ID: 2161
  Gene Symbol: CAMK2B
  Gene Name: calcium/calmodulin-dependent protein kinase II beta
  Uniprot ID: Q13554
  ENST ID: ENST00000346990
  CDS Start-End: 4-1353
gccatggccaccacggtgacctgcacccgcttcaccgacgagtaccagctctacgaggatattggcaagggggctttctctgtggtccgacgctgtgtcaagctctgcaccggccatgagtatgcagccaagatcatcaacaccaagaagctgtcagccagagatcaccagaagctggagagagaggctcggatctgccgccttctgaagcattccaacatcgtgcgtctccacgacagcatctccgaggagggcttccactacctggtcttcgatctggtcactggtggggagctctttgaagacattgtggcgagagagtactacagcgaggctgatgccagtcactgtatccagcagatcctggaggccgttctccattgtcaccaaatgggggtcgtccacagagacctcaagccggagaacctgcttctggccagcaagtgcaaaggggctgcagtgaagctggcagacttcggcctagctatcgaggtgcagggggaccagcaggcatggtttggtttcgctggcacaccaggctacctgtcccctgaggtccttcgcaaagaggcgtatggcaagcctgtggacatctgggcatgtggggtgatcctgtacatcctgctcgtgggctacccacccttctgggacgaggaccagcacaagctgtaccagcagatcaaggctggtgcctatgacttcccgtcccctgagtgggacaccgtcactcctgaagccaaaaacctcatcaaccagatgctgaccatcaaccctgccaagcgcatcacagcccatgaggccctgaagcacccgtgggtctgccaacgctccacggtagcatccatgatgcacagacaggagactgtggagtgtctgaaaaagttcaatgccaggagaaagctcaagggagccatcctcaccaccatgctggccacacggaatttctcagcccggaagcaggagatcattaagaccacggagcagctcatcgaggccgtcaacaacggtgactttgaggcctacgcgaaaatctgtgacccagggctgacctcgtttgagcctgaagcactgggcaacctggttgaagggatggacttccacagattctacttcgagaacctgctggccaagaacagcaagccgatccacacgaccatcctgaacccacacgtgcacgtcattggagaggatgccgcctgcatcgcttacatccggctcacgcagtacattgacgggcagggccggccccgcaccagccagtctgaggagacccgcgtgtggcaccgccgcgacggcaagtggcagaacgtgcacttccactgctcgggcgcgcctgtggccccgctgcagtgaagagctgcgccctggtttcgccggacagagttggtgtttggagcccgactgccctcgggcacacggcctgcctgtcgcatgtttgtgtctgcctc

SEQ ID NO: 113351 - DNA, 1577 bp, Homo sapiens
  Payload ID: 2161
  Gene Symbol: CAMK2B
  Gene Name: calcium/calmodulin-dependent protein kinase II beta
  Uniprot ID: Q13554
  ENST ID: ENST00000347193
  CDS Start-End: 4-1482
gccatggccaccacggtgacctgcacccgcttcaccgacgagtaccagctctacgaggatattggcaagggggctttctctgtggtccgacgctgtgtcaagctctgcaccggccatgagtatgcagccaagatcatcaacaccaagaagctgtcagccagagatcaccagaagctggagagagaggctcggatctgccgccttctgaagcattccaacatcgtgcgtctccacgacagcatctccgaggagggcttccactacctggtcttcgatctggtcactggtggggagctctttgaagacattgtggcgagagagtactacagcgaggctgatgccagtcactgtatccagcagatcctggaggccgttctccattgtcaccaaatgggggtcgtccacagagacctcaagccggagaacctgcttctggccagcaagtgcaaaggggctgcagtgaagctggcagacttcggcctagctatcgaggtgcagggggaccagcaggcatggtttggtttcgctggcacaccaggctacctgtcccctgaggtccttcgcaaagaggcgtatggcaagcctgtggacatctgggcatgtggggtgatcctgtacatcctgctcgtgggctacccacccttctgggacgaggaccagcacaagctgtaccagcagatcaaggctggtgcctatgacttcccgtcccctgagtgggacaccgtcactcctgaagccaaaaacctcatcaaccagatgctgaccatcaaccctgccaagcgcatcacagcccatgaggccctgaagcacccgtgggtctgccaacgctccacggtagcatccatgatgcacagacaggagactgtggagtgtctgaaaaagttcaatgccaggagaaagctcaagggagccatcctcaccaccatgctggccacacggaatttctcagtgggcagacagaccaccgctccggccacaatgtccaccgcggcctccggcaccaccatggggctggtggaacaagccaagagtttactcaacaagaaagcagatggagtcaaggagcctcaaaccaccgtcatccataacccagtggacgggattaaggagtcttctgacagtgccaataccaccatagaggatgaagacgctaaagcccggaagcaggagatcattaagaccacggagcagctcatcgaggccgtcaacaacggtgactttgaggcctacgcattctacttcgagaacctgctggccaagaacagcaagccgatccacacgaccatcctgaacccacacgtgcacgtcattggagaggatgccgcctgcatcgcttacatccggctcacgcagtacattgacgggcagggccggccccgcaccagccagtctgaggagacccgcgtgtggcaccgccgcgacggcaagtggcagaacgtgcacttccactgctcgggcgcgcctgtggccccgctgcagtgaagagctgcgccctggtttcgccggacagagttggtgtttggagcccgactgccctcgggcacacggcctgcctgtcgcatgtttgtgtctgcctc

SEQ ID NO: 113352 - DNA, 1683 bp, Homo sapiens
  Payload ID: 2161
  Gene Symbol: CAMK2B
  Gene Name: calcium/calmodulin-dependent protein kinase II beta
  ENST ID: ENST00000353185
  CDS Start-End: 65-1153
cgggagccggagtcgccgccgcccgagcgcagccgagcgcacgccgagcccgtccgccgccgccatggccaccacggtgacctgcacccgcttcaccgacgagtaccagctctacgaggatattggcaagggggctttctctgtggtccgacgctgtgtcaagctctgcaccggccatgagtatgcagccaagatcatcaacaccaagaagctgtcagccagagatcaccagaagctggagagagaggctcggatctgccgccttctgaagcattccaacatcgtgcgtctccacgacagcatctccgaggagggcttccactacctggtcttcgatctggtcactggtggggagctctttgaagacattgtggcgagagagtactacagcgaggctgatgccagtcactgtatccagcagatcctggaggccgttctccattgtcaccaaatgggggtcgtccacagagacctcaagccggagaacctgcttctggccagcaagtgcaaaggggctgcagtgaagctggcagacttcggcctagctatcgaggtgcagggggaccagcaggcatggtttggtttcgctggcacaccaggctacctgtcccctgaggtccttcgcaaagaggcgtatggcaagcctgtggacatctgggcatgtggggtgatcctgtacatcctgctcgtgggctacccacccttctgggacgaggaccagcacaagctgtaccagcagatcaaggctggtgcctatgacttcccgtcccctgagtgggacaccgtcactcctgaagccaaaaacctcatcaaccagatgctgaccatcaaccctgccaagcgcatcacagcccatgaggccctgaagcacccgtgggtctgccaacgctccacggtagcatccatgatgcacagacaggagactgtggagtgtctgaaaaagttcaatgccaggagaaagctcaagccaagagtttactcaacaagaaagcagatggagtcaagccccagacgaatagcaccaaaaacagtgcagccgccaccagccccaaagggacgcttcctcctgccgccctggagcctcaaaccaccgtcatccataacccagtggacgggattaaggagtcttctgacagtgccaataccaccatagaggatgaagacgctaaagcccggaagcaggagatcattaagaccacggagcagctcatcgaggccgtcaacaacggtgactttgaggcctacgcgaaaatctgtgacccagggctgacctcgtttgagcctgaagcactgggcaacctggttgaagggatggacttccacagattctacttcgagaacctgctggccaagaacagcaagccgatccacacgaccatcctgaacccacacgtgcacgtcattggagaggatgccgcctgcatcgcttacatccggctcacgcagtacattgacgggcagggccggccccgcaccagccagtctgaggagacccgcgtgtggcaccgccgcgacggcaagtggcagaacgtgcacttccactgctcgggcgcgcctgtggccccgctgcagtgaagagctgcgccctggtttcgccggacagagttggtgtttggagcccgactgccctcgggcacacggcctgcctgtcgcatgtttgtgtctgcctcgttccctcccctg

SEQ ID NO: 113353 - DNA, 1895 bp, Homo sapiens
  Payload ID: 2161
  Gene Symbol: CAMK2B
  Gene Name: calcium/calmodulin-dependent protein kinase II beta
  Uniprot ID: Q13554
  ENST ID: ENST00000358707
  CDS Start-End: 205-1716
gcggcgcgctcctggcgaggacggagcgagcagatctcgcgtgcgctcgccgcccggcgcagcccagcccggcccccgcctggcgccgcgagccgaggtgtctcccgcgcccgcgcccgtgtcgccgccgtgcccgcgagcgggagccggagtcgccgccgcccgagcgcagccgagcgcacgccgagcccgtccgccgccgccatggccaccacggtgacctgcacccgcttcaccgacgagtaccagctctacgaggatattggcaagggggctttctctgtggtccgacgctgtgtcaagctctgcaccggccatgagtatgcagccaagatcatcaacaccaagaagctgtcagccagagatcaccagaagctggagagagaggctcggatctgccgccttctgaagcattccaacatcgtgcgtctccacgacagcatctccgaggagggcttccactacctggtcttcgatctggtcactggtggggagctctttgaagacattgtggcgagagagtactacagcgaggctgatgccagtcactgtatccagcagatcctggaggccgttctccattgtcaccaaatgggggtcgtccacagagacctcaagccggagaacctgcttctggccagcaagtgcaaaggggctgcagtgaagctggcagacttcggcctagctatcgaggtgcagggggaccagcaggcatggtttggtttcgctggcacaccaggctacctgtcccctgaggtccttcgcaaagaggcgtatggcaagcctgtggacatctgggcatgtggggtgatcctgtacatcctgctcgtgggctacccacccttctgggacgaggaccagcacaagctgtaccagcagatcaaggctggtgcctatgacttcccgtcccctgagtgggacaccgtcactcctgaagccaaaaacctcatcaaccagatgctgaccatcaaccctgccaagcgcatcacagcccatgaggccctgaagcacccgtgggtctgccaacgctccacggtagcatccatgatgcacagacaggagactgtggagtgtctgaaaaagttcaatgccaggagaaagctcaagggagccatcctcaccaccatgctggccacacggaatttctcagcagccaagagtttactcaacaagaaagcagatggagtcaagccccagacgaatagcaccaaaaacagtgcagccgccaccagccccaaagggacgcttcctcctgccgccctggagtcttctgacagtgccaataccaccatagaggatgaagacgctaaagcccggaagcaggagatcattaagaccacggagcagctcatcgaggccgtcaacaacggtgactttgaggcctacgcgaaaatctgtgacccagggctgacctcgtttgagcctgaagcactgggcaacctggttgaagggatggacttccacagattctacttcgagaacctgctggccaagaacagcaagccgatccacacgaccatcctgaacccacacgtgcacgtcattggagaggatgccgcctgcatcgcttacatccggctcacgcagtacattgacgggcagggccggccccgcaccagccagtctgaggagacccgcgtgtggcaccgccgcgacggcaagtggcagaacgtgcacttccactgctcgggcgcgcctgtggccccgctgcagtgaagagctgcgccctggtttcgccggacagagttggtgtttggagcccgactgccctcgggcacacggcctgcctgtcgcatgtttgtgtctgcctcgttccctcccctggtgcctgtgtctgcagaaaaacaagaccagatgtgatttgttaaaaaaaaacaaaaaaaaaaaaaaaaaaa

SEQ ID NO: 113354 - DNA, 1557 bp, Homo sapiens
  Payload ID: 2161
  Gene Symbol: CAMK2B
  Gene Name: calcium/calmodulin-dependent protein kinase II beta
  Uniprot ID: Q13554
  ENST ID: ENST00000395747
  CDS Start-End: 1-1557
atggccaccacggtgacctgcacccgcttcaccgacgagtaccagctctacgaggatattggcaagggggctttctctgtggtccgacgctgtgtcaagctctgcaccggccatgagtatgcagccaagatcatcaacaccaagaagctgtcagccagagatcaccagaagctggagagagaggctcggatctgccgccttctgaagcattccaacatcgtgcgtctccacgacagcatctccgaggagggcttccactacctggtcttcgatctggtcactggtggggagctctttgaagacattgtggcgagagagtactacagcgaggctgatgccagtcactgtatccagcagatcctggaggccgttctccattgtcaccaaatgggggtcgtccacagagacctcaagccggagaacctgcttctggccagcaagtgcaaaggggctgcagtgaagctggcagacttcggcctagctatcgaggtgcagggggaccagcaggcatggtttggtttcgctggcacaccaggctacctgtcccctgaggtccttcgcaaagaggcgtatggcaagcctgtggacatctgggcatgtggggtgatcctgtacatcctgctcgtgggctacccacccttctgggacgaggaccagcacaagctgtaccagcagatcaaggctggtgcctatgacttcccgtcccctgagtgggacaccgtcactcctgaagccaaaaacctcatcaaccagatgctgaccatcaaccctgccaagcgcatcacagcccatgaggccctgaagcacccgtgggtctgccaacgctccacggtagcatccatgatgcacagacaggagactgtggagtgtctgaaaaagttcaatgccaggagaaagctcaagggagccatcctcaccaccatgctggccacacggaatttctcagcagccaagagtttactcaacaagaaagcagatggagtcaagccccagacgaatagcaccaaaaacagtgcagccgccaccagccccaaagggacgcttcctcctgccgccctggagcctcaaaccaccgtcatccataacccagtggacgggattaaggagtcttctgacagtgccaataccaccatagaggatgaagacgctaaagcccggaagcaggagatcattaagaccacggagcagctcatcgaggccgtcaacaacggtgactttgaggcctacgcgaaaatctgtgacccagggctgacctcgtttgagcctgaagcactgggcaacctggttgaagggatggacttccacagattctacttcgagaacctgctggccaagaacagcaagccgatccacacgaccatcctgaacccacacgtgcacgtcattggagaggatgccgcctgcatcgcttacatccggctcacgcagtacattgacgggcagggccggccccgcaccagccagtctgaggagacccgcgtgtggcaccgccgcgacggcaagtggcagaacgtgcacttccactgctcgggcgcgcctgtggccccgctgcagtga

SEQ ID NO: 113355 - DNA, 4447 bp, Homo sapiens
  Payload ID: 2161
  Gene Symbol: CAMK2B
  Gene Name: calcium/calmodulin-dependent protein kinase II beta
  Uniprot ID: Q13554
  ENST ID: ENST00000395749
  CDS Start-End: 78-2078
ccgtgcccgcgagcgggagccggagtcgccgccgcccgagcgcagccgagcgcacgccgagcccgtccgccgccgccatggccaccacggtgacctgcacccgcttcaccgacgagtaccagctctacgaggatattggcaagggggctttctctgtggtccgacgctgtgtcaagctctgcaccggccatgagtatgcagccaagatcatcaacaccaagaagctgtcagccagagatcaccagaagctggagagagaggctcggatctgccgccttctgaagcattccaacatcgtgcgtctccacgacagcatctccgaggagggcttccactacctggtcttcgatctggtcactggtggggagctctttgaagacattgtggcgagagagtactacagcgaggctgatgccagtcactgtatccagcagatcctggaggccgttctccattgtcaccaaatgggggtcgtccacagagacctcaagccggagaacctgcttctggccagcaagtgcaaaggggctgcagtgaagctggcagacttcggcctagctatcgaggtgcagggggaccagcaggcatggtttggtttcgctggcacaccaggctacctgtcccctgaggtccttcgcaaagaggcgtatggcaagcctgtggacatctgggcatgtggggtgatcctgtacatcctgctcgtgggctacccacccttctgggacgaggaccagcacaagctgtaccagcagatcaaggctggtgcctatgacttcccgtcccctgagtgggacaccgtcactcctgaagccaaaaacctcatcaaccagatgctgaccatcaaccctgccaagcgcatcacagcccatgaggccctgaagcacccgtgggtctgccaacgctccacggtagcatccatgatgcacagacaggagactgtggagtgtctgaaaaagttcaatgccaggagaaagctcaagggagccatcctcaccaccatgctggccacacggaatttctcagtgggcagacagaccaccgctccggccacaatgtccaccgcggcctccggcaccaccatggggctggtggaacaagccaagagtttactcaacaagaaagcagatggagtcaagccccagacgaatagcaccaaaaacagtgcagccgccaccagccccaaagggacgcttcctcctgccgccctggagcctcaaaccaccgtcatccataacccagtggacgggattaaggagtcttctgacagtgccaataccaccatagaggatgaagacgctaaagcccccagggtccccgacatcctgagctcagtgaggaggggctcgggagccccagaagccgaggggcccctgccctgcccatctccggctccctttagccccctgccagccccatcccccaggatctctgacatcctgaactctgtgagaaggggttcaggaaccccagaagccgagggccccctctcagcggggcccccgccctgcctgtctccggctctcctaggccccctgtcctccccgtcccccaggatctctgacatcctgaactctgtgaggaggggctcagggaccccagaagccgagggcccctcgccagtggggcccccgccctgcccatctccgactatccctggccccctgcccaccccatcccggaagcaggagatcattaagaccacggagcagctcatcgaggccgtcaacaacggtgactttgaggcctacgcgaaaatctgtgacccagggctgacctcgtttgagcctgaagcactgggcaacctggttgaagggatggacttccacagattctacttcgagaacctgctggccaagaacagcaagccgatccacacgaccatcctgaacccacacgtgcacgtcattggagaggatgccgcctgcatcgcttacatccggctcacgcagtacattgacgggcagggccggccccgcaccagccagtctgaggagacccgcgtgtggcaccgccgcgacggcaagtggcagaacgtgcacttccactgctcgggcgcgcctgtggccccgctgcagtgaagagctgcgccctggtttcgccggacagagttggtgtttggagcccgactgccctcgggcacacggcctgcctgtcgcatgtttgtgtctgcctcgttccctcccctggtgcctgtgtctgcagaaaaacaagaccagatgtgatttgttaaaaaaaaacaaaaaaaaaaaaaaaaaaaacaagatgacgacgacaaccacaaaaaaaattgacatcagatgaaatgaaaaaaaaaaaaaacaaaaaaaactaaaggaaggaaaaagctgtaaaaatcactggcattcgtggggccactccccacccaagctccacgtgtgtccgtctgtgctcctggcctctgggggaccagctgggacatgaacttgtctgccaggcccccgtcgcgtgctgaacggtgttagtttgtaggtaacgcacacaccccacacctaaggtgtctgcatcctcctgccaacgcatgggctccacgtggtgtgctcgctggctgtcgtgactgtcagctgtctcttgggaggggctgtgggggcccgctgggctgcctcctttcccgctagttgtgcctgagagttgctgttgttcctgctttcccttcccttcctttcatcccctgaagggctaggtgtgggttttccgtgcccggtatccccacacacccagcacggacaacccttcggcagagcccaggccggcccctcaccccctggagtattgaaactggagtcccgtccccaaggccttcagagatgcccctacacacccagggctccagctctggtccttctgggggagtaaagtgcaaagaggggcacagcttagttttgggcctctcgccgagcaagagacagcactgctggctacagctccaacacagccagctgtggcaagaggactctgcctgggctggcccccctcctgtgtgaggtgtctgtcccttctctgctggccagcagcagatgcactggcagctcccaaccctgtttccgcccctcggccctcccccagcctgttcggcttctctgcagcccgcaagggggagcagacttttgacaaaggactgcgggcctcgctcaagtccctgagcccccagctgaagctgggaggggaggccaggctttgtgtctgggcatattcgtctgctgatggggtttggggaagcctggggcttggggtttggtcgggtggtgcagctagtggcagagcgggatcagaggtggtggctgcccagcttctgggctgagacaagggtctgtgcaggggtttactgaagtgggagtgcctttggaatctgggccgggagcagaagggagcaaaagctacagtgggagccagcctagggcacatgggaggcgtgagggcagtgctgcccgtgcagtgtcaggtgtgccagtgccttggcgggctgcagtgcgtgtgagggcaccttctaggtgggccagggatgcagctatggagataaggcgggctggggacagaaacaggtgggcacagggcccaggacaccagcggatggagggcagggtctagccctgtgctcctgagcgtcggctgcctgggttcgaggcggtgggtccccggccccttgtgatggtgtgtaccatgggggagctcggggacagggcaagcccgagcatggtggggctgcagggtgggtctgaagccaggttgggtgggggtggtcacaagccctgactgcagagggtcaggggctcctgccccagtgcctgcccactttcaattcacattgttttcaacaaggattttctttatcttcccctacaaatcaagccaagggaggggcacagaatggggaacaggacacaggatcctaaactccaaggggactgtccaccgatgaacactcagagtggacaccatcttccgtccacgctgtgcccaggacagctgtccccatccatgaacacagggtaaacatctgccgggctccgcaccagtggctccctgggccatgggacagcggcagggctcaccacggacagcacgtggcccagcagccggccaccctggcgtcctggggcctcctcccctcctctccctctcaccttgtcacctccacggagctgcctgtctgggataatttggggattttttttctgggggataattcttttgcatgacccctaaagagcaagccacaccggtctgctagctaggtgtccgcggtgtggtggtggcggccgctggccagcgctgcaaggggtcggctgcccacggtgctggctggcctcccctcctctctctttttgctgagtttcattgtcttttctttctgagccttgtaagtgtacaaaaattattcttattttgttctgtctcgggaaactgcaaataaaagaaaaacaggaca

SEQ ID NO: 113356 - DNA, 567 bp, Homo sapiens
  Payload ID: 2161
  Gene Symbol: CAMK2B
  Gene Name: calcium/calmodulin-dependent protein kinase II beta
  ENST ID: ENST00000421607
  CDS Start-End: 27-567
gcacgccgagcccgtccgccgccgccatggccaccacggtgacctgcacccgcttcaccgacgagtaccagctctacgaggatattggcaagggggctttctctgtggtccgacgctgtgtcaagctctgcaccggccatgagtatgcagccaagatcatcaacaccaagaagctgtcagccagagatcaccagaagctggagagagaggctcggatctgccgccttctgaagcattccaacatcgtgcgtctccacgacagcatctccgaggagggcttccactacctggtcttcgatctggtcactggtggggagctctttgaagacattgtggcgagagagtactacagcgaggctgatgccagtcactgtatccagcagatcctggaggccgttctccattgtcaccaaatgggggtcgtccacagagacctcaagctgcacggggagcttggggcctccacccactcacgttggcaaaatcaccatgtccagtggcctgtggattggtgctcggtggacacggatgcgtgtgccccagcaggctgggacccccaaggtgacg

SEQ ID NO: 113357 - DNA, 552 bp, Homo sapiens
  Payload ID: 2161
  Gene Symbol: CAMK2B
  Gene Name: calcium/calmodulin-dependent protein kinase II beta
  ENST ID: ENST00000433930
  CDS Start-End: 1-552
aagccaaaaacctcatcaaccagatgctgaccatcaaccctgccaagcgcatcacagcccatgaggccctgaagcacccgtgggtctgccaacgctccacggtagcatccatgatgcacagacaggagactgtggagtgtctgaaaaagttcaatgccaggagaaagctcaagggagccatcctcaccaccatgctggccacacggaatttctcagtgggcagacagaccaccgctccggccacaatgtccaccgcggcctccggcaccaccatggggctggtggaacaagccaagagtttactcaacaagaaagcagatggagtcaagccccagacgaatagcaccaaaaacagtgcagccgccaccagccccaaagggacgcttcctcctgccgccctggagcctcaaaccaccgtcatccataacccagtggacgggattaaggagtcttctgacagtgccaataccaccatagaggatgaagacgctaaagggatggatgacatcccagggctgctgccacccccacctgtggggagacaccagactg

SEQ ID NO: 113358 - DNA, 4142 bp, Homo sapiens
  Payload ID: 2161
  Gene Symbol: CAMK2B
  Gene Name: calcium/calmodulin-dependent protein kinase II beta
  Uniprot ID: Q13554
  ENST ID: ENST00000457475
  CDS Start-End: 211-1767
aggtgtgcggcgcgctcctggcgaggacggagcgagcagatctcgcgtgcgctcgccgcccggcgcagcccagcccggcccccgcctggcgccgcgagccgaggtgtctcccgcgcccgcgcccgtgtcgccgccgtgcccgcgagcgggagccggagtcgccgccgcccgagcgcagccgagcgcacgccgagcccgtccgccgccgccatggccaccacggtgacctgcacccgcttcaccgacgagtaccagctctacgaggatattggcaagggggctttctctgtggtccgacgctgtgtcaagctctgcaccggccatgagtatgcagccaagatcatcaacaccaagaagctgtcagccagagatcaccagaagctggagagagaggctcggatctgccgccttctgaagcattccaacatcgtgcgtctccacgacagcatctccgaggagggcttccactacctggtcttcgatctggtcactggtggggagctctttgaagacattgtggcgagagagtactacagcgaggctgatgccagtcactgtatccagcagatcctggaggccgttctccattgtcaccaaatgggggtcgtccacagagacctcaagccggagaacctgcttctggccagcaagtgcaaaggggctgcagtgaagctggcagacttcggcctagctatcgaggtgcagggggaccagcaggcatggtttggtttcgctggcacaccaggctacctgtcccctgaggtccttcgcaaagaggcgtatggcaagcctgtggacatctgggcatgtggggtgatcctgtacatcctgctcgtgggctacccacccttctgggacgaggaccagcacaagctgtaccagcagatcaaggctggtgcctatgacttcccgtcccctgagtgggacaccgtcactcctgaagccaaaaacctcatcaaccagatgctgaccatcaaccctgccaagcgcatcacagcccatgaggccctgaagcacccgtgggtctgccaacgctccacggtagcatccatgatgcacagacaggagactgtggagtgtctgaaaaagttcaatgccaggagaaagctcaagggagccatcctcaccaccatgctggccacacggaatttctcagcagccaagagtttactcaacaagaaagcagatggagtcaagccccagacgaatagcaccaaaaacagtgcagccgccaccagccccaaagggacgcttcctcctgccgccctggagcctcaaaccaccgtcatccataacccagtggacgggattaaggagtcttctgacagtgccaataccaccatagaggatgaagacgctaaagcccggaagcaggagatcattaagaccacggagcagctcatcgaggccgtcaacaacggtgactttgaggcctacgcgaaaatctgtgacccagggctgacctcgtttgagcctgaagcactgggcaacctggttgaagggatggacttccacagattctacttcgagaacctgctggccaagaacagcaagccgatccacacgaccatcctgaacccacacgtgcacgtcattggagaggatgccgcctgcatcgcttacatccggctcacgcagtacattgacgggcagggccggccccgcaccagccagtctgaggagacccgcgtgtggcaccgccgcgacggcaagtggcagaacgtgcacttccactgctcgggcgcgcctgtggccccgctgcagtgaagagctgcgccctggtttcgccggacagagttggtgtttggagcccgactgccctcgggcacacggcctgcctgtcgcatgtttgtgtctgcctcgttccctcccctggtgcctgtgtctgcagaaaaacaagaccagatgtgatttgttaaaaaaaaacaaaaaaaaaaaaaaaaaaaacaagatgacgacgacaaccacaaaaaaaattgacatcagatgaaatgaaaaaaaaaaaaaacaaaaaaaactaaaggaaggaaaaagctgtaaaaatcactggcattcgtggggccactccccacccaagctccacgtgtgtccgtctgtgctcctggcctctgggggaccagctgggacatgaacttgtctgccaggcccccgtcgcgtgctgaacggtgttagtttgtaggtaacgcacacaccccacacctaaggtgtctgcatcctcctgccaacgcatgggctccacgtggtgtgctcgctggctgtcgtgactgtcagctgtctcttgggaggggctgtgggggcccgctgggctgcctcctttcccgctagttgtgcctgagagttgctgttgttcctgctttcccttcccttcctttcatcccctgaagggctaggtgtgggttttccgtgcccggtatccccacacacccagcacggacaacccttcggcagagcccaggccggcccctcaccccctggagtattgaaactggagtcccgtccccaaggccttcagagatgcccctacacacccagggctccagctctggtccttctgggggagtaaagtgcaaagaggggcacagcttagttttgggcctctcgccgagcaagagacagcactgctggctacagctccaacacagccagctgtggcaagaggactctgcctgggctggcccccctcctgtgtgaggtgtctgtcccttctctgctggccagcagcagatgcactggcagctcccaaccctgtttccgcccctcggccctcccccagcctgttcggcttctctgcagcccgcaagggggagcagacttttgacaaaggactgcgggcctcgctcaagtccctgagcccccagctgaagctgggaggggaggccaggctttgtgtctgggcatattcgtctgctgatggggtttggggaagcctggggcttggggtttggtcgggtggtgcagctagtggcagagcgggatcagaggtggtggctgcccagcttctgggctgagacaagggtctgtgcaggggtttactgaagtgggagtgcctttggaatctgggccgggagcagaagggagcaaaagctacagtgggagccagcctagggcacatgggaggcgtgagggcagtgctgcccgtgcagtgtcaggtgtgccagtgccttggcgggctgcagtgcgtgtgagggcaccttctaggtgggccagggatgcagctatggagataaggcgggctggggacagaaacaggtgggcacagggcccaggacaccagcggatggagggcagggtctagccctgtgctcctgagcgtcggctgcctgggttcgaggcggtgggtccccggccccttgtgatggtgtgtaccatgggggagctcggggacagggcaagcccgagcatggtggggctgcagggtgggtctgaagccaggttgggtgggggtggtcacaagccctgactgcagagggtcaggggctcctgccccagtgcctgcccactttcaattcacattgttttcaacaaggattttctttatcttcccctacaaatcaagccaagggaggggcacagaatggggaacaggacacaggatcctaaactccaaggggactgtccaccgatgaacactcagagtggacaccatcttccgtccacgctgtgcccaggacagctgtccccatccatgaacacagggtaaacatctgccgggctccgcaccagtggctccctgggccatgggacagcggcagggctcaccacggacagcacgtggcccagcagccggccaccctggcgtcctggggcctcctcccctcctctccctctcaccttgtcacctccacggagctgcctgtctgggataatttggggattttttttctgggggataattcttttgcatgacccctaaagagcaagccacaccggtctgctagctaggtgtccgcggtgtggtggtggcggccgctggccagcgctgcaaggggtcggctgcccacggtgctggctggcctcccctcctctctctttttgctgagtttcattgtcttttctttctgagccttgtaagtgtacaaaaattattcttattttgttctgtctcgggaaactgcaaataaaagaaaaacaggacaaactgc

SEQ ID NO: 113359 - DNA, 559 bp, Homo sapiens
  Payload ID: 2161
  Gene Symbol: CAMK2B
  Gene Name: calcium/calmodulin-dependent protein kinase II beta
  ENST ID: ENST00000415369
  CDS Start-End: 40-559
gctgagacctcgagggagagggcgagcccagcccccttcatgcggatccctgagtgggtggctggctccccggtcttcacccctcagatgcaccgatctacccccgtctgtcctcttggcctccagaggtgtcctggccactggaggggcaggggggctttctctgtggtccgacgctgtgtcaagctctgcaccggccatgagtatgcagccaagatcatcaacaccaagaagctgtcagccagagatcaccagaagctggagagagaggctcggatctgccgccttctgaagcattccaacatcgtgcgtctccacgacagcatctccgaggagggcttccactacctggtcttcgatctggtcactggtggggagctctttgaagacattgtggcgagagagtactacagcgaggctgatgccagtcactgtatccagcagatcctggaggccgttctccattgtcaccaaatgggggtcgtccacagagacctcaagccggagaacctgcttctggccagcaagtgcaaaggggctgcagtgaagctggcagact

SEQ ID NO: 113360 - DNA, 2097 bp, Homo sapiens
  Payload ID: 2161
  Gene Symbol: CAMK2B
  Gene Name: calcium/calmodulin-dependent protein kinase II beta
  Uniprot ID: Q13554
  ENST ID: ENST00000440254
  CDS Start-End: 236-1864
gcggcgcccgcgcctccccgcgcgtaggtgtgcggcgcgctcctggcgaggacggagcgagcagatctcgcgtgcgctcgccgcccggcgcagcccagcccggcccccgcctggcgccgcgagccgaggtgtctcccgcgcccgcgcccgtgtcgccgccgtgcccgcgagcgggagccggagtcgccgccgcccgagcgcagccgagcgcacgccgagcccgtccgccgccgccatggccaccacggtgacctgcacccgcttcaccgacgagtaccagctctacgaggatattggcaagggggctttctctgtggtccgacgctgtgtcaagctctgcaccggccatgagtatgcagccaagatcatcaacaccaagaagctgtcagccagagatcaccagaagctggagagagaggctcggatctgccgccttctgaagcattccaacatcgtgcgtctccacgacagcatctccgaggagggcttccactacctggtcttcgatctggtcactggtggggagctctttgaagacattgtggcgagagagtactacagcgaggctgatgccagtcactgtatccagcagatcctggaggccgttctccattgtcaccaaatgggggtcgtccacagagacctcaagccggagaacctgcttctggccagcaagtgcaaaggggctgcagtgaagctggcagacttcggcctagctatcgaggtgcagggggaccagcaggcatggtttggtttcgctggcacaccaggctacctgtcccctgaggtccttcgcaaagaggcgtatggcaagcctgtggacatctgggcatgtggggtgatcctgtacatcctgctcgtgggctacccacccttctgggacgaggaccagcacaagctgtaccagcagatcaaggctggtgcctatgacttcccgtcccctgagtgggacaccgtcactcctgaagccaaaaacctcatcaaccagatgctgaccatcaaccctgccaagcgcatcacagcccatgaggccctgaagcacccgtgggtctgccaacgctccacggtagcatccatgatgcacagacaggagactgtggagtgtctgaaaaagttcaatgccaggagaaagctcaagggagccatcctcaccaccatgctggccacacggaatttctcagtgggcagacagaccaccgctccggccacaatgtccaccgcggcctccggcaccaccatggggctggtggaacaagccaagagtttactcaacaagaaagcagatggagtcaagccccagacgaatagcaccaaaaacagtgcagccgccaccagccccaaagggacgcttcctcctgccgccctggagcctcaaaccaccgtcatccataacccagtggacgggattaaggagtcttctgacagtgccaataccaccatagaggatgaagacgctaaagcccggaagcaggagatcattaagaccacggagcagctcatcgaggccgtcaacaacggtgactttgaggcctacgcgaaaatctgtgacccagggctgacctcgtttgagcctgaagcactgggcaacctggttgaagggatggacttccacagattctacttcgagaacctgctggccaagaacagcaagccgatccacacgaccatcctgaacccacacgtgcacgtcattggagaggatgccgcctgcatcgcttacatccggctcacgcagtacattgacgggcagggccggccccgcaccagccagtctgaggagacccgcgtgtggcaccgccgcgacggcaagtggcagaacgtgcacttccactgctcgggcgcgcctgtggccccgctgcagtgaagagctgcgccctggtttcgccggacagagttggtgtttggagcccgactgccctcgggcacacggcctgcctgtcgcatgtttgtgtctgcctcgttccctcccctggtgcctgtgtctgcagaaaaacaagaccagatgtgatttgttaaaaaaaaacaaaaaaaaaaaaaaaaaaaacaagatgacgacgacaaccacaaaaaaaattgacatcagatgaaatgaaaaaa

SEQ ID NO: 113361 - DNA, 558 bp, Homo sapiens
  Payload ID: 2161
  Gene Symbol: CAMK2B
  Gene Name: calcium/calmodulin-dependent protein kinase II beta
  ENST ID: ENST00000424197
  CDS Start-End: 54-558
gtcgccgccgcccgagcgcagccgagcgcacgccgagcccgtccgccgccgccatggccaccacggtgacctgcacccgcttcaccgacgagtaccagctctacgaggatattggcaagggggctttctctgtggtccgacgctgtgtcaagctctgcaccggccatgagtatgcagccaagatcatcaacaccaagaagctgtcagccagagatcaccagaagctggagagagaggctcggatctgccgccttctgaagcattccaacatcgtgcgtctccacgacagcatctccgaggagggcttccactacctggtcttcgatctggtcactggtggggagctctttgaagacattgtggcgagagagtactacagcgaggctgatgccagggccactcgcactaacccacctgctgtttgccacagtcactgtatccagcagatcctggaggccgttctccattgtcaccaaatgggggtcgtccacagagacctcaagccggagaacctgcttctggccagcaagtgcaaaggggctgcagtgaagctggcag

SEQ ID NO: 113362 - DNA, 867 bp, Homo sapiens
  Payload ID: 2161
  Gene Symbol: CAMK2B
  Gene Name: calcium/calmodulin-dependent protein kinase II beta
  ENST ID: ENST00000425809
  CDS Start-End: 1-555
ctacccgcagtatcacttacagggatggatgacatcccagggctgctgccacccccacctgtggggagacaccagactgggggtggtgtggagatactcttagagaagaggctgctgggccacgggctcggcatggcagggcagtggctagcccggaagcaggagatcattaagaccacggagcagctcatcgaggccgtcaacaacggtgactttgaggcctacgcgaaaatctgtgacccagggctgacctcgtttgagcctgaagcactgggcaacctggttgaagggatggacttccacagattctacttcgagaacctgctggccaagaacagcaagccgatccacacgaccatcctgaacccacacgtgcacgtcattggagaggatgccgcctgcatcgcttacatccggctcacgcagtacattgacgggcagggccggccccgcaccagccagtctgaggagacccgcgtgtggcaccgccgcgacggcaagtggcagaacgtgcacttccactgctcgggcgcgcctgtggccccgctgcagtgaagagctgcgccctggtttcgccggacagagttggtgtttggagcccgactgccctcgggcacacggcctgcctgtcgcatgtttgtgtctgcctcgttccctcccctggtgcctgtgtctgcagaaaaacaagaccagatgtgatttgttaaaaaaaaacaaaaaaaaaaaaaaaaaaaacaagatgacgacgacaaccacaaaaaaaattgacatcagatgaaatgaaaaaaaaaaaaaacaaaaaaaactaaaggaaggaaaaagctgtaaaaatcactggcattcgtggggccactccccacccaagct

SEQ ID NO: 113363 - DNA, 1856 bp, Homo sapiens
  Payload ID: 2161
  Gene Symbol: CAMK2B
  Gene Name: calcium/calmodulin-dependent protein kinase II beta
  ENST ID: ENST00000523845
  CDS Start-End: 55-393
agtcgccgccgcccgagcgcagccgagcgcacgccgagcccgtccgccgccgccatggccaccacggtgacctgcacccgcttcaccgacgagtaccagctctacgaggatattggcaagggggctttctctgtggtccgacgctgtgtcaagctctgcaccggccatgagtatgcagccaagatcatcaacaccaagaagctgtcagccagagatcaccagaagctggagagagaggctcggatctgccgccttctgaagcattccaacatcgtcactgtatccagcagatcctggaggccgttctccattgtcaccaaatgggggtcgtccacagagacctcaagccggagaacctgcttctggccagcaagtgcaaaggggctgcagtgaagctggcagacttcggcctagctatcgaggtgcagggggaccagcaggcatggtttggtttcgctggcacaccaggctacctgtcccctgaggtccttcgcaaagaggcgtatggcaagcctgtggacatctgggcatgtggggtgatcctgtacatcctgctcgtgggctacccacccttctgggacgaggaccagcacaagctgtaccagcagatcaaggctggtgcctatgacttcccgtcccctgagtgggacaccgtcactcctgaagccaaaaacctcatcaaccagatgctgaccatcaaccctgccaagcgcatcacagcccatgaggccctgaagcacccgtgggtctgccaacgctccacggtagcatccatgatgcacagacaggagactgtggagtgtctgaaaaagttcaatgccaggagaaagctcaagggagccatcctcaccaccatgctggccacacggaatttctcagtgggcagacagaccaccgctccggccacaatgtccaccgcggcctccggcaccaccatggggctggtggaacaagccaagagtttactcaacaagaaagcagatggagtcaagccccagacgaatagcaccaaaaacagtgcagccgccaccagccccaaagggacgcttcctcctgccgccctggagcctcaaaccaccgtcatccataacccagtggacgggattaaggagtcttctgacagtgccaataccaccatagaggatgaagacgctaaagcccggaagcaggagatcattaagaccacggagcagctcatcgaggccgtcaacaacggtgactttgaggcctacgcgtgagtccctggggctgggggggggctgtgcaggacaaggatgtgggacccttgggggggcctgctcagagtcaggggtccacggggcccctcctcacttggatttggcccccaggaaaatctgtgacccagggctgacctcgtttgagcctgaagcactgggcaacctggttgaagggatggacttccacagattctacttcgagaacctgctggccaagaacagcaagccgatccacacgaccatcctgaacccacacgtgcacgtcattggagaggatgccgcctgcatcgcttacatccggctcacgcagtacattgacgggcagggccggccccgcaccagccagtctgaggagacccgcgtgtggcaccgccgcgacggcaagtggcagaacgtgcacttccactgctcgggcgcgcctgtggccccgctgcagtgaagccaagggaggggcacagaatggggaacaggacacaggatcctaaactccaaggggactgtccaccgatgaacactcagagtggacaccatcttccgtccacgctgtgcccaggacagctgtccccatccatgaacacagggtaaacatctgccgggctccgcaccagtggctccctg

SEQ ID NO: 113364 - DNA, 5820 bp, Homo sapiens
  Payload ID: 2162
  Gene Symbol: CAMK2D
  Gene Name: calcium/calmodulin-dependent protein kinase II delta
  Uniprot ID: Q13557
  ENST ID: ENST00000296402
  CDS Start-End: 860-2296
aaaggagggagtgcgagagatccacgaagggacaggcttggagtcgctagagggaggtgtgggaccagcgaggagggggcttcgccagggagggggtgctggcaggcggagggagcggcgggaggaggcgccggaggaggagacggaggcctggggacggcagaagaggcttcgcctgagccgagcgctctttctctcgccgcgccgtcttgaagccgcgcgggctcgtgagcagcgcgaggccgccaaggtgcctcgcttcgccggagccgctgccgcccgccggagggaagccggcctcgggcgcgcacgctcgtcggagccccggcgcgccccgcgcctgagcctgctgacagcggccgctgggctcaggctgtccgctctgggctccgcggcctcggccccgctgcactccacctccgccccctcggactccctcccctctgcttctactcctcctgctccagtgcggatcgtttcgcaactgcttgccactcgtcccgtgcctggctgtttttccatttcccggccccctcttcttgagtactttaccccctgcatttggggacagggactggaaaaggggcgggtggagcgtccagtggagaagaaggaagcgaggcccgcaggaggaggaggatcggcggactgtggggaggagaccccacgccaccctttctggtcatctcccctcccgccccgcccctgcgcacactccctcgcgggcgagctactttcggaccaggaaagtaagagcggccctgggtgacagcgccgcggggccagtcccggggttagccgcgcgtctgctcgcttctggtccgtcgcgctcccagccagggcacagcccggaccgaggatggcttcgaccacaacctgcaccaggttcacggacgagtatcagcttttcgaggagcttggaaagggggcattctcagtggtgagaagatgtatgaaaattcctactggacaagaatatgctgccaaaattatcaacaccaaaaagctttctgctagggatcatcagaaactagaaagagaagctagaatctgccgtcttttgaagcaccctaatattgtgcgacttcatgatagcatatcagaagagggctttcactacttggtgtttgatttagttactggaggtgaactgtttgaagacatagtggcaagagaatactacagtgaagctgatgccagtcattgtatacagcagattctagaaagtgttaatcattgtcacctaaatggcatagttcacagggacctgaagcctgagaatttgcttttagctagcaaatccaagggagcagctgtgaaattggcagactttggcttagccatagaagttcaaggggaccagcaggcgtggtttggttttgctggcacacctggatatctttctccagaagttttacgtaaagatccttatggaaagccagtggatatgtgggcatgtggtgtcattctctatattctacttgtggggtatccacccttctgggatgaagaccaacacagactctatcagcagatcaaggctggagcttatgattttccatcaccagaatgggacacggtgactcctgaagccaaagacctcatcaataaaatgcttactatcaaccctgccaaacgcatcacagcctcagaggcactgaagcacccatggatctgtcaacgttctactgttgcttccatgatgcacagacaggagactgtagactgcttgaagaaatttaatgctagaagaaaactaaagggtgccatcttgacaactatgctggctacaaggaatttctcagcagccaagagtttgttgaagaaaccagatggagtaaaggagtcaactgagagttcaaatacaacaattgaggatgaagatgtgaaagcacgaaagcaagagattatcaaagtcactgaacaactgatcgaagctatcaacaatggggactttgaagcctacacaaaaatctgtgacccaggccttactgcttttgaacctgaagctttgggtaatttagtggaagggatggattttcaccgattctactttgaaaatgctttgtccaaaagcaataaaccaatccacactattattctaaaccctcatgtacatctggtaggggatgatgccgcctgcatagcatatattaggctcacacagtacatggatggcagtggaatgccaaagacaatgcagtcagaagagactcgtgtgtggcaccgccgggatggaaagtggcagaatgttcattttcatcgctcggggtcaccaacagtacccatcaagtaaatatttccaggctgtcagcttctttgttaatacacccatgctaaatttcaacagtgccacttctgcattctctgttctcaaggcacctggatggtgaccctgggccgtcctctcctcctcttcatgcatgtttctgagtgcatgaagttgtgaaggtcctacatgtaatgcatatgtgatgcatcatcttatcatatattccttcctatacattgtttacacttcaactacggggatgttccacacaaacttaaattactgttggcaaaacaatagggggagattagacaaaaaaaaaaatccacaatattccaagtacaactcttcatcaagtttctctgttaatgccaagatttaacagacttaagaactattgttctctgaatgacagttgtaagagaaatgtaaattttttagaactctttgctgttaatctgttttggtttgtttggtttttttttttttttttaaggtaaaaaaaaaatacaccttcagtttcctggtgtgatcctggttaaaatggatgatttttcattgaaagttttgctgattaacaattaaagtgggatgatatgtgggcaaaatcacttatgaaagtagaagcaagaatcagttggtttgctaccacataaagccatgctgtttttggtcaaactgtgtaaactggaaaaattcacatcatttctgagtttaatcactttaggatatattcacattgttttggtgaatttgctgaattgaattgtttttctttctcaaatctgtgatctcttttctttatcctgtttctttgttcctttcgtttgctttcttatttttcttttgttccattcttttcttacttttttcccttttccttttttggggaggctggctagtagtgtgtgagaaaagaatagaagtgaaatttgcataatgaatgtaaaagggaaataaaagtcttttgaaggtagctatactagcacttttgatcatcttcagggcccacaaaaatgttgtcaagattttaaaggtttataattctgcttaagctctagtttggacttaggtatcctaactatgttggaggtatttgcattgtttaaagttaggataaaagcaagttcctcctgtgactgcaacgtcttactgattgggacagttgccaggaggataccaacttgatagcagagggggttttatgcaaacgcactcacctccgccttggggaatgaaagggtcacttctgcatcatcactagctagttttctagtgttagagaggcttacaaatgtttgccattctcataagtgttttgaacttgatctttgtgacttgtgcttttttagcttctctcttgaatcagagtatcattgtcttcctccaaggagttagaatttcccagtttaaaacaaaaagggaaatgtcctaggttttctttgtgcttctcatttttcctttgttgattcaattcctgtgatttttgttctcttccctgaagtgctttacagtgcatggaatctccatcattgttattttaacgatagtaattcacagtcctcagaagcctatttttaaagcagaagcaaaaaagaaaaacaaaataacaaaaacaacccttcctcttttctctcatctcacctctctgtgttgattactaatcatcttagatattattgctagtggatgtatggtagatgggttgaagcttttctgataattattacacaatttaaaacaacatatatatttaaaataaatatatacagtaaatatattgagccatgttaacctgccaatgagatctgtgaaaaaataatggcctcatttttctctttttaatttcttttacccttttgtgaagcagctatacgtggcatacatgtatttaaagaaaaaaaaatagatgtagagtgttttttttacacttttaacttagcatgtggtgttgaagtattactgtagatcaagtttgtcttccgcactaagatgtgaggaaattgtgatttgttctctccaccacaaatgaattacacatttattatcttctatcattttgaaacactgcagtttaccatgggacactgtatatatttcttgccataatggtaaaggactgattgatatatttaagagttaataaatttgtgatttctgctgacagtgcgtccatctttatttcttcagaagaggtactgtatgtatgcctgcatagtgctggccagtgtcaagggcagtgtgtcctactctggtctcatttagtacataacaatttgcacttggtgagaatggcaagttaattgttctctgtgagcaaaacaatggtctcttctgggaaaatgttgctgagaacaatatagttaacaactaagactcctaaaagcttctctaaactgtaccctccaatccagccttcacatggctgctttttttttttttttttaatacgaacctgtccttgtaacactttgatgttatcatttctgggatacaggcaagcaccccagctcctgctactccccagcttgaacttgagcatacatggatgctcagcttcttttgatttgctaaaaacatcacacttgctcacatgcctgtttatgctgttcatgttgtttatgtttcttacctagaataaatagtctcttcccctacttcttttcccgacttcttactttttcctaagattcagtgtacagcatcatgctccacagcaaaccttcctaggccctattctgggcttgccttccctctcaaaacctacataatagattgtatttacctctcctgtcaaccacattgttttgaaaatatatttctatttgtgtctcctctactgcagtataatgtctccatgggcaagaactgtgtattcatcattgcattcctaaacccaaaccaaggccaggaatggagatatcattgataaatagttgttgaattgaggccaagcccttttgataacagaagcctcaaggggtacccagatagtccttgttttaatgatgggttctctcaccactgtcttgatgctctgagcaagttacctcttccctctgaccctcagtttccatatttgtaaaatgagaataaacataccaacttaataaagatattgtgaggattaatgggtacagagtgactagaatgatatttgatagaaattaaatggtagcagtataactattctgatcactgacattaatattcctattgttattattctttgctcacgagggtatacaactcttgttttgctgttgggctgccctctttatgtaggtttactgttaatgctgaggatatactcggactcaaatgtctcagcagaaggctgagagacaccaaatgaagtggtcatctagctgaatgtaggaaaaatgaaatgtagtagcaaatcagtatattctaaggaaattttcaaggaatattaatcttcacccaaattttgaatttttatgtaaaaaattataatttaagggtaaacatagatgacacagctttcgagtgatttcattgaataaaattctactgacttctatgaa

SEQ ID NO: 113365 - DNA, 1940 bp, Homo sapiens
  Payload ID: 2162
  Gene Symbol: CAMK2D
  Gene Name: calcium/calmodulin-dependent protein kinase II delta
  Uniprot ID: Q13557
  ENST ID: ENST00000342666
  CDS Start-End: 1-1500
atggcttcgaccacaacctgcaccaggttcacggacgagtatcagcttttcgaggagcttggaaagggggcattctcagtggtgagaagatgtatgaaaattcctactggacaagaatatgctgccaaaattatcaacaccaaaaagctttctgctagggatcatcagaaactagaaagagaagctagaatctgccgtcttttgaagcaccctaatattgtgcgacttcatgatagcatatcagaagagggctttcactacttggtgtttgatttagttactggaggtgaactgtttgaagacatagtggcaagagaatactacagtgaagctgatgccagtcattgtatacagcagattctagaaagtgttaatcattgtcacctaaatggcatagttcacagggacctgaagcctgagaatttgcttttagctagcaaatccaagggagcagctgtgaaattggcagactttggcttagccatagaagttcaaggggaccagcaggcgtggtttggttttgctggcacacctggatatctttctccagaagttttacgtaaagatccttatggaaagccagtggatatgtgggcatgtggtgtcattctctatattctacttgtggggtatccacccttctgggatgaagaccaacacagactctatcagcagatcaaggctggagcttatgattttccatcaccagaatgggacacggtgactcctgaagccaaagacctcatcaataaaatgcttactatcaaccctgccaaacgcatcacagcctcagaggcactgaagcacccatggatctgtcaacgttctactgttgcttccatgatgcacagacaggagactgtagactgcttgaagaaatttaatgctagaagaaaactaaagggtgccatcttgacaactatgctggctacaaggaatttctcagcagccaagagtttgttgaagaaaccagatggagtaaaggagtcaactgagagttcaaatacaacaattgaggatgaagatgtgaaagcacgaaagcaagagattatcaaagtcactgaacaactgatcgaagctatcaacaatggggactttgaagcctacacaaaaatctgtgacccaggccttactgcttttgaacctgaagctttgggtaatttagtggaagggatggattttcaccgattctactttgaaaatgctttgtccaaaagcaataaaccaatccacactattattctaaaccctcatgtacatctggtaggggatgatgccgcctgcatagcatatattaggctcacacagtacatggatggcagtggaatgccaaagacaatgcagtcagaagagactcgtgtgtggcaccgccgggatggaaagtggcagaatgttcattttcatcgctcggggtcaccaacagtacccatcaagccaccctgtattccaaatgggaaagaaaacttctcaggaggcacctctttgtggcaaaacatctaaggcctgaaaaccattcacatatgggtcttctaaatttcaacagtgccacttctgcattctctgttctcaaggcacctggatggtgaccctgggccgtcctctcctcctcttcatgcatgtttctgagtgcatgaagttgtgaaggtcctacatgtaatgcatatgtgatgcatcatcttatcatatattccttcctatacattgtttacacttcaactacggggatgttccacacaaacttaaattactgttggcaaaacaatagggggagattagacaaaaaaaaaaatccacaatattccaagtacaactcttcatcaagtttctctgttaatgccaagatttaacagacttaagaactattgttctctgaatgacagttgtaagagaaatgtaaattttttagaactctttgctgttaatctgttttggtttgtttg

SEQ ID NO: 113366 - DNA, 1642 bp, Homo sapiens
  Payload ID: 2162
  Gene Symbol: CAMK2D
  Gene Name: calcium/calmodulin-dependent protein kinase II delta
  Uniprot ID: Q13557
  ENST ID: ENST00000379773
  CDS Start-End: 63-1499
gccgcgcgtctgctcgcttctggtccgtcgcgctcccagccagggcacagcccggaccgaggatggcttcgaccacaacctgcaccaggttcacggacgagtatcagcttttcgaggagcttggaaagggggcattctcagtggtgagaagatgtatgaaaattcctactggacaagaatatgctgccaaaattatcaacaccaaaaagctttctgctagggatcatcagaaactagaaagagaagctagaatctgccgtcttttgaagcaccctaatattgtgcgacttcatgatagcatatcagaagagggctttcactacttggtgtttgatttagttactggaggtgaactgtttgaagacatagtggcaagagaatactacagtgaagctgatgccagtcattgtatacagcagattctagaaagtgttaatcattgtcacctaaatggcatagttcacagggacctgaagcctgagaatttgcttttagctagcaaatccaagggagcagctgtgaaattggcagactttggcttagccatagaagttcaaggggaccagcaggcgtggtttggttttgctggcacacctggatatctttctccagaagttttacgtaaagatccttatggaaagccagtggatatgtgggcatgtggtgtcattctctatattctacttgtggggtatccacccttctgggatgaagaccaacacagactctatcagcagatcaaggctggagcttatgattttccatcaccagaatgggacacggtgactcctgaagccaaagacctcatcaataaaatgcttactatcaaccctgccaaacgcatcacagcctcagaggcactgaagcacccatggatctgtcaacgttctactgttgcttccatgatgcacagacaggagactgtagactgcttgaagaaatttaatgctagaagaaaactaaagggtgccatcttgacaactatgctggctacaaggaatttctcagcagccaagagtttgttgaagaaaccagatggagtaaaggagtcaactgagagttcaaatacaacaattgaggatgaagatgtgaaagcacgaaagcaagagattatcaaagtcactgaacaactgatcgaagctatcaacaatggggactttgaagcctacacaaaaatctgtgacccaggccttactgcttttgaacctgaagctttgggtaatttagtggaagggatggattttcaccgattctactttgaaaatgctttgtccaaaagcaataaaccaatccacactattattctaaaccctcatgtacatctggtaggggatgatgccgcctgcatagcatatattaggctcacacagtacatggatggcagtggaatgccaaagacaatgcagtcagaagagactcgtgtgtggcaccgccgggatggaaagtggcagaatgttcattttcatcgctcggggtcaccaacagtacccatcaagtaaatatttccaggctgtcagcttctttgttaatacacccatggtcagctccttctacttattccattgttaatagcatggtatatgttatttaacgctagtagttggttacactgatgaaaataaatgccttcacgggaaaggtt

SEQ ID NO: 113367 - DNA, 2696 bp, Homo sapiens
  Payload ID: 2162
  Gene Symbol: CAMK2D
  Gene Name: calcium/calmodulin-dependent protein kinase II delta
  Uniprot ID: Q13557
  ENST ID: ENST00000394522
  CDS Start-End: 496-1974
gggctcaggctgtccgctctgggctccgcggcctcggccccgctgcactccacctccgccccctcggactccctcccctctgcttctactcctcctgctccagtgcggatcgtttcgcaactgcttgccactcgtcccgtgcctggctgtttttccatttcccggccccctcttcttgagtactttaccccctgcatttggggacagggactggaaaaggggcgggtggagcgtccagtggagaagaaggaagcgaggcccgcaggaggaggaggatcggcggactgtggggaggagaccccacgccaccctttctggtcatctcccctcccgccccgcccctgcgcacactccctcgcgggcgagctactttcggaccaggaaagtaagagcggccctgggtgacagcgccgcggggccagtcccggggttagccgcgcgtctgctcgcttctggtccgtcgcgctcccagccagggcacagcccggaccgaggatggcttcgaccacaacctgcaccaggttcacggacgagtatcagcttttcgaggagcttggaaagggggcattctcagtggtgagaagatgtatgaaaattcctactggacaagaatatgctgccaaaattatcaacaccaaaaagctttctgctagggatcatcagaaactagaaagagaagctagaatctgccgtcttttgaagcaccctaatattgtgcgacttcatgatagcatatcagaagagggctttcactacttggtgtttgatttagttactggaggtgaactgtttgaagacatagtggcaagagaatactacagtgaagctgatgccagtcattgtatacagcagattctagaaagtgttaatcattgtcacctaaatggcatagttcacagggacctgaagcctgagaatttgcttttagctagcaaatccaagggagcagctgtgaaattggcagactttggcttagccatagaagttcaaggggaccagcaggcgtggtttggttttgctggcacacctggatatctttctccagaagttttacgtaaagatccttatggaaagccagtggatatgtgggcatgtggtgtcattctctatattctacttgtggggtatccacccttctgggatgaagaccaacacagactctatcagcagatcaaggctggagcttatgattttccatcaccagaatgggacacggtgactcctgaagccaaagacctcatcaataaaatgcttactatcaaccctgccaaacgcatcacagcctcagaggcactgaagcacccatggatctgtcaacgttctactgttgcttccatgatgcacagacaggagactgtagactgcttgaagaaatttaatgctagaagaaaactaaagggtgccatcttgacaactatgctggctacaaggaatttctcagcagccaagagtttgttgaagaaaccagatggagtaaaggagccccaaactactgtaatccacaaccctgatggaaacaaggagtcaactgagagttcaaatacaacaattgaggatgaagatgtgaaagcacgaaagcaagagattatcaaagtcactgaacaactgatcgaagctatcaacaatggggactttgaagcctacacaaaaatctgtgacccaggccttactgcttttgaacctgaagctttgggtaatttagtggaagggatggattttcaccgattctactttgaaaatgctttgtccaaaagcaataaaccaatccacactattattctaaaccctcatgtacatctggtaggggatgatgccgcctgcatagcatatattaggctcacacagtacatggatggcagtggaatgccaaagacaatgcagtcagaagagactcgtgtgtggcaccgccgggatggaaagtggcagaatgttcattttcatcgctcggggtcaccaacagtacccatcaagtaaatatttccaggctgtcagcttctttgttaatacacccatggtcagctccttctacttattccattgttaatagcatggtatatgttatttaacgctagtagttggttacactgatgaaaataaatgccttcacgggaaaggtttatgattctctggaaagatcaatcagatcagccatttgtgggttgaaacttgctatagagcagtatatgataggtttagacaggacgagagactacgtgatcaaaatctcacagggttaaatctagaggacttgtataataaggcaaaatatttgtgacttcatcttctcaattgacagaagaaggggatatcagaggaaaacatagggaggagtttctaaaatggccaatatattatcaggagtttcatttcatagatgatcccctaaagctcagttagagagacagcatttaaaaggccattgtcaggtagtgcaatgtcattctcacctcaccactctacctcagatatcatttgcttttccagtcagcgattaggcacatatttattgtgaatcacctaggtgcttaatctgtgccagattcaacacaaagtacaagatattgctttcaagaaacatgtattctcatttagccaatcattgattctaaagaaaaaaatgatataataaagtttatcatcaacttcagaatacagtagagttaatgaacagtgtagtaaactgtttataacagttt

SEQ ID NO: 113368 - DNA, 5294 bp, Homo sapiens
  Payload ID: 2162
  Gene Symbol: CAMK2D
  Gene Name: calcium/calmodulin-dependent protein kinase II delta
  Uniprot ID: Q13557
  ENST ID: ENST00000394524
  CDS Start-End: 378-1814
aactgcttgccactcgtcccgtgcctggctgtttttccatttcccggccccctcttcttgagtactttaccccctgcatttggggacagggactggaaaaggggcgggtggagcgtccagtggagaagaaggaagcgaggcccgcaggaggaggaggatcggcggactgtggggaggagaccccacgccaccctttctggtcatctcccctcccgccccgcccctgcgcacactccctcgcgggcgagctactttcggaccaggaaagtaagagcggccctgggtgacagcgccgcggggccagtcccggggttagccgcgcgtctgctcgcttctggtccgtcgcgctcccagccagggcacagcccggaccgaggatggcttcgaccacaacctgcaccaggttcacggacgagtatcagcttttcgaggagcttggaaagggggcattctcagtggtgagaagatgtatgaaaattcctactggacaagaatatgctgccaaaattatcaacaccaaaaagctttctgctagggatcatcagaaactagaaagagaagctagaatctgccgtcttttgaagcaccctaatattgtgcgacttcatgatagcatatcagaagagggctttcactacttggtgtttgatttagttactggaggtgaactgtttgaagacatagtggcaagagaatactacagtgaagctgatgccagtcattgtatacagcagattctagaaagtgttaatcattgtcacctaaatggcatagttcacagggacctgaagcctgagaatttgcttttagctagcaaatccaagggagcagctgtgaaattggcagactttggcttagccatagaagttcaaggggaccagcaggcgtggtttggttttgctggcacacctggatatctttctccagaagttttacgtaaagatccttatggaaagccagtggatatgtgggcatgtggtgtcattctctatattctacttgtggggtatccacccttctgggatgaagaccaacacagactctatcagcagatcaaggctggagcttatgattttccatcaccagaatgggacacggtgactcctgaagccaaagacctcatcaataaaatgcttactatcaaccctgccaaacgcatcacagcctcagaggcactgaagcacccatggatctgtcaacgttctactgttgcttccatgatgcacagacaggagactgtagactgcttgaagaaatttaatgctagaagaaaactaaagggtgccatcttgacaactatgctggctacaaggaatttctcagcagccaagagtttgttgaagaaaccagatggagtaaaggagtcaactgagagttcaaatacaacaattgaggatgaagatgtgaaagcacgaaagcaagagattatcaaagtcactgaacaactgatcgaagctatcaacaatggggactttgaagcctacacaaaaatctgtgacccaggccttactgcttttgaacctgaagctttgggtaatttagtggaagggatggattttcaccgattctactttgaaaatgctttgtccaaaagcaataaaccaatccacactattattctaaaccctcatgtacatctggtaggggatgatgccgcctgcatagcatatattaggctcacacagtacatggatggcagtggaatgccaaagacaatgcagtcagaagagactcgtgtgtggcaccgccgggatggaaagtggcagaatgttcattttcatcgctcggggtcaccaacagtacccatcaactaaatttcaacagtgccacttctgcattctctgttctcaaggcacctggatggtgaccctgggccgtcctctcctcctcttcatgcatgtttctgagtgcatgaagttgtgaaggtcctacatgtaatgcatatgtgatgcatcatcttatcatatattccttcctatacattgtttacacttcaactacggggatgttccacacaaacttaaattactgttggcaaaacaatagggggagattagacaaaaaaaaaaatccacaatattccaagtacaactcttcatcaagtttctctgttaatgccaagatttaacagacttaagaactattgttctctgaatgacagttgtaagagaaatgtaaattttttagaactctttgctgttaatctgttttggtttgtttggtttttttttttttttttaaggtaaaaaaaaaatacaccttcagtttcctggtgtgatcctggttaaaatggatgatttttcattgaaagttttgctgattaacaattaaagtgggatgatatgtgggcaaaatcacttatgaaagtagaagcaagaatcagttggtttgctaccacataaagccatgctgtttttggtcaaactgtgtaaactggaaaaattcacatcatttctgagtttaatcactttaggatatattcacattgttttggtgaatttgctgaattgaattgtttttctttctcaaatctgtgatctcttttctttatcctgtttctttgttcctttcgtttgctttcttatttttcttttgttccattcttttcttacttttttcccttttccttttttggggaggctggctagtagtgtgtgagaaaagaatagaagtgaaatttgcataatgaatgtaaaagggaaataaaagtcttttgaaggtagctatactagcacttttgatcatcttcagggcccacaaaaatgttgtcaagattttaaaggtttataattctgcttaagctctagtttggacttaggtatcctaactatgttggaggtatttgcattgtttaaagttaggataaaagcaagttcctcctgtgactgcaacgtcttactgattgggacagttgccaggaggataccaacttgatagcagagggggttttatgcaaacgcactcacctccgccttggggaatgaaagggtcacttctgcatcatcactagctagttttctagtgttagagaggcttacaaatgtttgccattctcataagtgttttgaacttgatctttgtgacttgtgcttttttagcttctctcttgaatcagagtatcattgtcttcctccaaggagttagaatttcccagtttaaaacaaaaagggaaatgtcctaggttttctttgtgcttctcatttttcctttgttgattcaattcctgtgatttttgttctcttccctgaagtgctttacagtgcatggaatctccatcattgttattttaacgatagtaattcacagtcctcagaagcctatttttaaagcagaagcaaaaaagaaaaacaaaataacaaaaacaacccttcctcttttctctcatctcacctctctgtgttgattactaatcatcttagatattattgctagtggatgtatggtagatgggttgaagcttttctgataattattacacaatttaaaacaacatatatatttaaaataaatatatacagtaaatatattgagccatgttaacctgccaatgagatctgtgaaaaaataatggcctcatttttctctttttaatttcttttacccttttgtgaagcagctatacgtggcatacatgtatttaaagaaaaaaaaatagatgtagagtgttttttttacacttttaacttagcatgtggtgttgaagtattactgtagatcaagtttgtcttccgcactaagatgtgaggaaattgtgatttgttctctccaccacaaatgaattacacatttattatcttctatcattttgaaacactgcagtttaccatgggacactgtatatatttcttgccataatggtaaaggactgattgatatatttaagagttaataaatttgtgatttctgctgacagtgcgtccatctttatttcttcagaagaggtactgtatgtatgcctgcatagtgctggccagtgtcaagggcagtgtgtcctactctggtctcatttagtacataacaatttgcacttggtgagaatggcaagttaattgttctctgtgagcaaaacaatggtctcttctgggaaaatgttgctgagaacaatatagttaacaactaagactcctaaaagcttctctaaactgtaccctccaatccagccttcacatggctgctttttttttttttttttaatacgaacctgtccttgtaacactttgatgttatcatttctgggatacaggcaagcaccccagctcctgctactccccagcttgaacttgagcatacatggatgctcagcttcttttgatttgctaaaaacatcacacttgctcacatgcctgtttatgctgttcatgttgtttatgtttcttacctagaataaatagtctcttcccctacttcttttcccgacttcttactttttcctaagattcagtgtacagcatcatgctccacagcaaaccttcctaggccctattctgggcttgccttccctctcaaaacctacataatagattgtatttacctctcctgtcaaccacattgttttgaaaatatatttctatttgtgtctcctctactgcagtataatgtctccatgggcaagaactgtgtattcatcattgcattcctaaacccaaaccaaggccaggaatggagatatcattgataaatagttgttgaattgaggccaagcccttttgataacagaagcctcaaggggtacccagatagtccttgttttaatgatgggttctctcaccactgtcttgatgctctgagcaagttacctcttccctctgaccctcagtttccatatttgtaaaatgagaataaacataccaacttaataaagatattgtgaggattaatgggtacagagtgactagaatgatatttgatagaaattaaatggtagcagtataactattctgatcactgacattaatattcctattgttattattctttgctcacgagggtatacaactcttgttttgctgttgggctgccctctttatgtaggtttactgttaatgctgaggatatactcggactcaaatgtctcagcagaaggctgagagacaccaaatgaagtggtcatctagctgaatgtaggaaaaatgaaatgtagtagcaaatcagtatattctaaggaaattttcaaggaatattaatcttcacccaaattttgaatttttatgtaaaaaattataatttaagggtaaacatagatgacacagctttcgagtgatttcattgaataaaattctactgacttctatgaa

SEQ ID NO: 113369 - DNA, 1470 bp, Homo sapiens
  Payload ID: 2162
  Gene Symbol: CAMK2D
  Gene Name: calcium/calmodulin-dependent protein kinase II delta
  Uniprot ID: Q13557
  ENST ID: ENST00000508738
  CDS Start-End: 1-1470
atggcttcgaccacaacctgcaccaggttcacggacgagtatcagcttttcgaggagcttggaaagggggcattctcagtggtgagaagatgtatgaaaattcctactggacaagaatatgctgccaaaattatcaacaccaaaaagctttctgctagggatcatcagaaactagaaagagaagctagaatctgccgtcttttgaagcaccctaatattgtgcgacttcatgatagcatatcagaagagggctttcactacttggtgtttgatttagttactggaggtgaactgtttgaagacatagtggcaagagaatactacagtgaagctgatgccagtcattgtatacagcagattctagaaagtgttaatcattgtcacctaaatggcatagttcacagggacctgaagcctgagaatttgcttttagctagcaaatccaagggagcagctgtgaaattggcagactttggcttagccatagaagttcaaggggaccagcaggcgtggtttggttttgctggcacacctggatatctttctccagaagttttacgtaaagatccttatggaaagccagtggatatgtgggcatgtggtgtcattctctatattctacttgtggggtatccacccttctgggatgaagaccaacacagactctatcagcagatcaaggctggagcttatgattttccatcaccagaatgggacacggtgactcctgaagccaaagacctcatcaataaaatgcttactatcaaccctgccaaacgcatcacagcctcagaggcactgaagcacccatggatctgtcaacgttctactgttgcttccatgatgcacagacaggagactgtagactgcttgaagaaatttaatgctagaagaaaactaaagggtgccatcttgacaactatgctggctacaaggaatttctcagcagccaagagtttgttgaagaaaccagatggagtaaagaaaaggaagtccagttcgagtgttcagatgatggagtcaactgagagttcaaatacaacaattgaggatgaagatgtgaaagcacgaaagcaagagattatcaaagtcactgaacaactgatcgaagctatcaacaatggggactttgaagcctacacaaaaatctgtgacccaggccttactgcttttgaacctgaagctttgggtaatttagtggaagggatggattttcaccgattctactttgaaaatgctttgtccaaaagcaataaaccaatccacactattattctaaaccctcatgtacatctggtaggggatgatgccgcctgcatagcatatattaggctcacacagtacatggatggcagtggaatgccaaagacaatgcagtcagaagagactcgtgtgtggcaccgccgggatggaaagtggcagaatgttcattttcatcgctcggggtcaccaacagtacccatcaagtaa

SEQ ID NO: 113370 - DNA, 1533 bp, Homo sapiens
  Payload ID: 2162
  Gene Symbol: CAMK2D
  Gene Name: calcium/calmodulin-dependent protein kinase II delta
  Uniprot ID: Q13557
  ENST ID: ENST00000515496
  CDS Start-End: 1-1533
atggcttcgaccacaacctgcaccaggttcacggacgagtatcagcttttcgaggagcttggaaagggggcattctcagtggtgagaagatgtatgaaaattcctactggacaagaatatgctgccaaaattatcaacaccaaaaagctttctgctagggatcatcagaaactagaaagagaagctagaatctgccgtcttttgaagcaccctaatattgtgcgacttcatgatagcatatcagaagagggctttcactacttggtgtttgatttagttactggaggtgaactgtttgaagacatagtggcaagagaatactacagtgaagctgatgccagtcattgtatacagcagattctagaaagtgttaatcattgtcacctaaatggcatagttcacagggacctgaagcctgagaatttgcttttagctagcaaatccaagggagcagctgtgaaattggcagactttggcttagccatagaagttcaaggggaccagcaggcgtggtttggttttgctggcacacctggatatctttctccagaagttttacgtaaagatccttatggaaagccagtggatatgtgggcatgtggtgtcattctctatattctacttgtggggtatccacccttctgggatgaagaccaacacagactctatcagcagatcaaggctggagcttatgattttccatcaccagaatgggacacggtgactcctgaagccaaagacctcatcaataaaatgcttactatcaaccctgccaaacgcatcacagcctcagaggcactgaagcacccatggatctgtcaacgttctactgttgcttccatgatgcacagacaggagactgtagactgcttgaagaaatttaatgctagaagaaaactaaagggtgccatcttgacaactatgctggctacaaggaatttctcagcagccaagagtttgttgaagaaaccagatggagtaaagaaaaggaagtccagttcgagtgttcagatgatggagtcaactgagagttcaaatacaacaattgaggatgaagatgtgaaagcacgaaagcaagagattatcaaagtcactgaacaactgatcgaagctatcaacaatggggactttgaagcctacacaaaaatctgtgacccaggccttactgcttttgaacctgaagctttgggtaatttagtggaagggatggattttcaccgattctactttgaaaatgctttgtccaaaagcaataaaccaatccacactattattctaaaccctcatgtacatctggtaggggatgatgccgcctgcatagcatatattaggctcacacagtacatggatggcagtggaatgccaaagacaatgcagtcagaagagactcgtgtgtggcaccgccgggatggaaagtggcagaatgttcattttcatcgctcggggtcaccaacagtacccatcaagccaccctgtattccaaatgggaaagaaaacttctcaggaggcacctctttgtggcaaaacatctaa

SEQ ID NO: 113371 - DNA, 1497 bp, Homo sapiens
  Payload ID: 2162
  Gene Symbol: CAMK2D
  Gene Name: calcium/calmodulin-dependent protein kinase II delta
  ENST ID: ENST00000514328
  CDS Start-End: 1-1497
atggcttcgaccacaacctgcaccaggttcacggacgagtatcagcttttcgaggagcttggaaagggggcattctcagtggtgagaagatgtatgaaaattcctactggacaagaatatgctgccaaaattatcaacaccaaaaagctttctgctagggatcatcagaaactagaaagagaagctagaatctgccgtcttttgaagcaccctaatattgtgcgacttcatgatagcatatcagaagagggctttcactacttggtgtttgatttagttactggaggtgaactgtttgaagacatagtggcaagagaatactacagtgaagctgatgccagtcattgtatacagcagattctagaaagtgttaatcattgtcacctaaatggcatagttcacagggacctgaagcctgagaatttgcttttagctagcaaatccaagggagcagctgtgaaattggcagactttggcttagccatagaagttcaaggggaccagcaggcgtggtttggttttgctggcacacctggatatctttctccagaagttttacgtaaagatccttatggaaagccagtggatatgtgggcatgtggtgtcattctctatattctacttgtggggtatccacccttctgggatgaagaccaacacagactctatcagcagatcaaggctggagcttatgattttccatcaccagaatgggacacggtgactcctgaagccaaagacctcatcaataaaatgcttactatcaaccctgccaaacgcatcacagcctcagaggcactgaagcacccatggatctgtcaacgttctactgttgcttccatgatgcacagacaggagactgtagactgcttgaagaaatttaatgctagaagaaaactaaagggtgccatcttgacaactatgctggctacaaggaatttctcagccaagagtttgttgaagaaaccagatggagtaaaggagtcaactgagagttcaaatacaacaattgaggatgaagatgtgaaagcacgaaagcaagagattatcaaagtcactgaacaactgatcgaagctatcaacaatggggactttgaagcctacacaaaaatctgtgacccaggccttactgcttttgaacctgaagctttgggtaatttagtggaagggatggattttcaccgattctactttgaaaatgctttgtccaaaagcaataaaccaatccacactattattctaaaccctcatgtacatctggtaggggatgatgccgcctgcatagcatatattaggctcacacagtacatggatggcagtggaatgccaaagacaatgcagtcagaagagactcgtgtgtggcaccgccgggatggaaagtggcagaatgttcattttcatcgctcggggtcaccaacagtacccatcaagccaccctgtattccaaatgggaaagaaaacttctcaggaggcacctctttgtggcaaaacatctaa

SEQ ID NO: 113372 - DNA, 583 bp, Homo sapiens
  Payload ID: 2162
  Gene Symbol: CAMK2D
  Gene Name: calcium/calmodulin-dependent protein kinase II delta
  ENST ID: ENST00000509594
  CDS Start-End: 1-583
attctacttgtggggtatccacccttctgggatgaagaccaacacagactctatcagcagatcaaggctggagcttatgattttccatcaccagaatgggacacggtgactcctgaagccaaagacctcatcaataaaatgcttactatcaaccctgccaaacgcatcacagcctcagaggcactgaagcacccatggatctgtcaacgttctactgttgcttccatgatgcacagacaggagactgtagactgcttgaagaaatttaatgctagaagaaaactaaagggtgccatcttgacaactatgctggctacaaggaatttctcagccaagagtttgttgaagaaaccagatggagtaaagtcaactgagagttcaaatacaacaattgaggatgaagatgtgaaagcacgaaagcaagagattatcaaagtcactgaacaactgatcgaagctatcaacaatggggactttgaagcctacacaaaaatctgtgacccaggccttactgcttttgaacctgaagctttgggtaatttagtggaagggatggattttcaccgattctactttgaaaatg

SEQ ID NO: 113373 - DNA, 1802 bp, Homo sapiens
  Payload ID: 2162
  Gene Symbol: CAMK2D
  Gene Name: calcium/calmodulin-dependent protein kinase II delta
  ENST ID: ENST00000505990
  CDS Start-End: 116-1654
ggaaagtaagagcggccctgggtgacagcgccgcggggccagtcccggggttagccgcgcgtctgctcgcttctggtccgtcgcgctcccagccagggcacagcccggaccgaggatggcttcgaccacaacctgcaccaggttcacggacgagtatcagcttttcgaggagcttggaaagggggcattctcagtggtgagaagatgtatgaaaattcctactggacaagaatatgctgccaaaattatcaacaccaaaaagctttctgctagggatcatcagaaactagaaagagaagctagaatctgccgtcttttgaagcaccctaatattgtgcgacttcatgatagcatatcagaagagggctttcactacttggtgtttgatttagttactggaggtgaactgtttgaagacatagtggcaagagaatactacagtgaagctgatgccagtcattgcattcagcagatcctggaggctgtgctacactgccatcagatgggcgtggtccatcgggacctgaagcctgagaatttgcttttagctagcaaatccaagggagcagctgtgaaattggcagactttggcttagccatagaagttcaaggggaccagcaggcgtggtttggttttgctggcacacctggatatctttctccagaagttttacgtaaagatccttatggaaagccagtggatatgtgggcatgtggtgtcattctctatattctacttgtggggtatccacccttctgggatgaagaccaacacagactctatcagcagatcaaggctggagcttatgattttccatcaccagaatgggacacggtgactcctgaagccaaagacctcatcaataaaatgcttactatcaaccctgccaaacgcatcacagcctcagaggcactgaagcacccatggatctgtcaacgttctactgttgcttccatgatgcacagacaggagactgtagactgcttgaagaaatttaatgctagaagaaaactaaagggtgccatcttgacaactatgctggctacaaggaatttctcagcagccaagagtttgttgaagaaaccagatggagtaaagataaacaacaaagccaacgtggtaaccagccccaaagaaaatattcctaccccagcgctggagccccaaactactgtaatccacaaccctgatggaaacaaggagtcaactgagagttcaaatacaacaattgaggatgaagatgtgaaagcacgaaagcaagagattatcaaagtcactgaacaactgatcgaagctatcaacaatggggactttgaagcctacacaaaaatctgtgacccaggccttactgcttttgaacctgaagctttgggtaatttagtggaagggatggattttcaccgattctactttgaaaatgctttgtccaaaagcaataaaccaatccacactattattctaaaccctcatgtacatctggtaggggatgatgccgcctgcatagcatatattaggctcacacagtacatggatggcagtggaatgccaaagacaatgcagtcagaagagactcgtgtgtggcaccgccgggatggaaagtggcagaatgttcattttcatcgctcggggtcaccaacagtacccatcaagtaaatatttccaggctgtcagcttctttgttaatacacccatggtcagctccttctacttattccattgttaatagcatggtatatgttatttaacgctagtagttggttacactgatgaaaataaatgccttcacgggaaaggtttatga

SEQ ID NO: 113374 - DNA, 2142 bp, Homo sapiens
  Payload ID: 2162
  Gene Symbol: CAMK2D
  Gene Name: calcium/calmodulin-dependent protein kinase II delta
  ENST ID: ENST00000513132
  CDS Start-End: 1-547
aagaaaactaaagggtgccatcttgacaactatgctggctacaaggaatttctcagcagccaagagtttgttgaagaaaccagatggagtaaaggagtcaactgagagttcaaatacaacaattgaggatgaagatgtgaaagcacgaaagcaagagattatcaaagtcactgaacaactgatcgaagctatcaacaatggggactttgaagcctacacaaaaatctgtgacccaggccttactgcttttgaacctgaagctttgggtaatttagtggaagggatggattttcaccgattctactttgaaaatgctttgtccaaaagcaataaaccaatccacactattattctaaaccctcatgtacatctggtaggggatgatgccgcctgcatagcatatattaggctcacacagtacatggatggcagtggaatgccaaagacaatgcagtcagaagagactcgtgtgtggcaccgccgggatggaaagtggcagaatgttcattttcatcgctcggggtcaccaacagtacccatcaagtaaatatttccaggctgtcagcttctttgttaatacacccatgctaaatttcaacagtgccacttctgcattctctgttctcaaggcacctggatggtgaccctgggccgtcctctcctcctcttcatgcatgtttctgagtgcatgaagttgtgaaggtcctacatgtaatgcatatgtgatgcatcatcttatcatatattccttcctatacattgtttacacttcaactacggggatgttccacacaaacttaaattactgttggcaaaacaatagggggagattagacaaaaaaaaaaatccacaatattccaagtacaactcttcatcaagtttctctgttaatgccaagatttaacagacttaagaactattgttctctgaatgacagttgtaagagaaatgtaaattttttagaactctttgctgttaatctgttttggtttgtttggtttttttttttttttttaaggtaaaaaaaaaatacaccttcagtttcctggtgtgatcctggttaaaatggatgatttttcattgaaagttttgctgattaacaattaaagtgggatgatatgtgggcaaaatcacttatgaaagtagaagcaagaatcagttggtttgctaccacataaagccatgctgtttttggtcaaactgtgtaaactggaaaaattcacatcatttctgagtttaatcactttaggatatattcacattgttttggtgaatttgctgaattgaattgtttttctttctcaaatctgtgatctcttttctttatcctgtttctttgttcctttcgtttgctttcttatttttcttttgttccattcttttcttacttttttcccttttccttttttggggaggctggctagtagtgtgtgagaaaagaatagaagtgaaatttgcataatgaatgtaaaagggaaataaaagtcttttgaaggtagctatactagcacttttgatcatcttcagggcccacaaaaatgttgtcaagattttaaaggtttataattctgcttaagctctagtttggacttaggtatcctaactatgttggaggtatttgcattgtttaaagttaggataaaagcaagttcctcctgtgactgcaacgtcttactgattgggacagttgccaggaggataccaacttgatagcagagggggttttatgcaaacgcactcacctccgccttggggaatgaaagggtcacttctgcatcatcactagctagttttctagtgttagagaggcttacaaatgtttgccattctcataagtgttttgaacttgatctttgtgacttgtgcttttttagcttctctcttgaatcagagtatcattgtcttcctccaaggagttagaatttcccagtttaaaacaaaaagggaaatgtcctaggttttctttgtgcttctcatttttcctttgttgattcaattcctgtgatttttgttctcttccctgaagtgctttacagtgcatggaatctccatcattgttattttaacgatagtaattcacagtcctcagaagcctatttttaaagcagaagcaaaaaagaaaaacaaaataacaaaaacaa

SEQ ID NO: 113375 - DNA, 2210 bp, Homo sapiens
  Payload ID: 2162
  Gene Symbol: CAMK2D
  Gene Name: calcium/calmodulin-dependent protein kinase II delta
  ENST ID: ENST00000511664
  CDS Start-End: 151-1752
gcacactccctcgcgggcgagctactttcggaccaggaaagtaagagcggccctgggtgacagcgccgcggggccagtcccggggttagccgcgcgtctgctcgcttctggtccgtcgcgctcccagccagggcacagcccggaccgaggatggcttcgaccacaacctgcaccaggttcacggacgagtatcagcttttcgaggagcttggaaagggggcattctcagtggtgagaagatgtatgaaaattcctactggacaagaatatgctgccaaaattatcaacaccaaaaagctttctgctagggatcatcagaaactagaaagagaagctagaatctgccgtcttttgaagcaccctaatattgtgcgacttcatgatagcatatcagaagagggctttcactacttggtgtttgatttagttactggaggtgaactgtttgaagacatagtggcaagagaatactacagtgaagctgatgccagtcattgcattcagcagatcctggaggctgtgctacactgccatcagatgggcgtggtccatcgggacctgaagcctgagaatttgcttttagctagcaaatccaagggagcagctgtgaaattggcagactttggcttagccatagaagttcaaggggaccagcaggcgtggtttggttttgctggcacacctggatatctttctccagaagttttacgtaaagatccttatggaaagccagtggatatgtgggcatgtggtgtcattctctatattctacttgtggggtatccacccttctgggatgaagaccaacacagactctatcagcagatcaaggctggagcttatgattttccatcaccagaatgggacacggtgactcctgaagccaaagacctcatcaataaaatgcttactatcaaccctgccaaacgcatcacagcctcagaggcactgaagcacccatggatctgtcaacgttctactgttgcttccatgatgcacagacaggagactgtagactgcttgaagaaatttaatgctagaagaaaactaaagggtgccatcttgacaactatgctggctacaaggaatttctcagcagccaagagtttgttgaagaaaccagatggagtaaagataaacaacaaagccaacgtggtaaccagccccaaagaaaatattcctaccccagcgctggagccccaaactactgtaatccacaaccctgatggaaacaaggagtcaactgagagttcaaatacaacaattgaggatgaagatgtgaaagcacgaaagcaagagattatcaaagtcactgaacaactgatcgaagctatcaacaatggggactttgaagcctacacaaaaatctgtgacccaggccttactgcttttgaacctgaagctttgggtaatttagtggaagggatggattttcaccgattctactttgaaaatgctttgtccaaaagcaataaaccaatccacactattattctaaaccctcatgtacatctggtaggggatgatgccgcctgcatagcatatattaggctcacacagtacatggatggcagtggaatgccaaagacaatgcagtcagaagagactcgtgtgtggcaccgccgggatggaaagtggcagaatgttcattttcatcgctcggggtcaccaacagtacccatcaagccaccctgtattccaaatgggaaagaaaacttctcaggaggcacctctttgtggcaaaacatctaaggcctgaaaaccattcacatatgggtcttctaaatttcaacagtgccacttctgcattctctgttctcaaggcacctggatggtgaccctgggccgtcctctcctcctcttcatgcatgtttctgagtgcatgaagttgtgaaggtcctacatgtaatgcatatgtgatgcatcatcttatcatatattccttcctatacattgtttacacttcaactacggggatgttccacacaaacttaaattactgttggcaaaacaatagggggagattagacaaaaaaaaaaatccacaatattccaagtacaactcttcatcaagtttctctgttaatgccaagatttaacagacttaagaactattgttctctgaatgacagttgtaagagaaatgtaaattttttagaactctttgctgttaatctgttttggtttgtttggttttttttttttttttt

SEQ ID NO: 113376 - DNA, 3563 bp, Homo sapiens
  Payload ID: 2163
  Gene Symbol: CAMK2G
  Gene Name: calcium/calmodulin-dependent protein kinase II gamma
  Uniprot ID: Q13555
  ENST ID: ENST00000351293
  CDS Start-End: 59-1546
ggtgactgtgcaccgacgtcggcgcgggctgcaccgccgcgtccgcccgcccgccagcatggccaccaccgccacctgcacccgtttcaccgacgactaccagctcttcgaggagcttggcaagggtgctttctctgtggtccgcaggtgtgtgaagaaaacctccacgcaggagtacgcagcaaaaatcatcaataccaagaagttgtctgcccgggatcaccagaaactagaacgtgaggctcggatatgtcgacttctgaaacatccaaacatcgtgcgcctccatgacagtatttctgaagaagggtttcactacctcgtgtttgaccttgttaccggcggggagctgtttgaagacattgtggccagagagtactacagtgaagcagatgccagccactgtatacatcagattctggagagtgttaaccacatccaccagcatgacatcgtccacagggacctgaagcctgagaacctgctgctggcgagtaaatgcaagggtgccgccgtcaagctggctgattttggcctagccatcgaagtacagggagagcagcaggcttggtttggttttgctggcaccccaggttacttgtcccctgaggtcttgaggaaagatccctatggaaaacctgtggatatctgggcctgcggggtcatcctgtatatcctcctggtgggctatcctcccttctgggatgaggatcagcacaagctgtatcagcagatcaaggctggagcctatgatttcccatcaccagaatgggacacggtaactcctgaagccaagaacttgatcaaccagatgctgaccataaacccagcaaagcgcatcacggctgaccaggctctcaagcacccgtgggtctgtcaacgatccacggtggcatccatgatgcatcgtcaggagactgtggagtgtttgcgcaagttcaatgcccggagaaaactgaagggtgccatcctcacgaccatgcttgtctccaggaacttctcagctgccaaaagcctattgaacaagaagtcggatggcggtgtcaaggagccacaaaccactgtggtacacaacgctacagatgggatcaagggctccacagagagctgcaacaccaccacagaagatgaggacctcaaagtgcgaaaacaggagatcattaagattacagaacagctgattgaagccatcaacaatggggactttgaggcctacacgaagatttgtgatccaggcctcacttcctttgagcctgaggcccttggtaacctcgtggaggggatggatttccataagttttactttgagaatctcctgtccaagaacagcaagcctatccataccaccatcctaaacccacacgtccacgtgattggggaggacgcagcgtgcatcgcctacatccgcctcacccagtacatcgacgggcagggtcggcctcgcaccagccagtcagaagagacccgggtctggcaccgtcgggatggcaagtggctcaatgtccactatcactgctcaggggcccctgccgcaccgctgcagtgagctcagccacaggggctttaggagattccagccggaggtccaaccttcgcagccagtggctctggagggcctgagtgacagcggcagtcctgtttgtttgaggtttaaaacaattcaattacaaaagcggcagcagccaatgcacgcccctgcatgcagccctcccgcccgcccttcgtgtctgtctctgctgtaccgaggtgttttttacatttaagaaaaaaaaaaaagaaaaaaagattgtttaaaaaaaaaaggaatccataccatgatgcgttttaaaaccaccgacagcccttgggttggcaagaaggcaggagtatgtatgaggtccatcctggcatgagcagtggctcacccaccggccttgaagaggtgagcttggcctctctggtccccatggacttagggggaccaggcaagaactctgacagagctttgggggccgtgatgtgattgcagctcctgaggtggcctgcttaccccaggtctaggaatgaacttctttggaacttgcataggcgcctagaatggggctgatgagaacatcgtgaccatcagacctacttgggagagaacgcagagctcccagcctgctgtggaggcagctgagaagtggtggcctcaggactgagagcccggacgttgctgtactgtcttgtttagtgtagaagggaagagaattggtgctgcagaagtgtacccgccatgaagccgatgagaaacctcgtgttagtctgacatgcactcactcatccatttctataggatgcacaatgcatgtgggccctaatattgaggccttatccctgcagctaggagggggaggggttgttgctgctttgcttcgtgttttcttctaacctggcaaggagagagccaggccctggtcagggctcccgtgccgcctttggcggttctgtttctgtgctgatctggaccatctttgtcttgccttttcacggtagtggtccccatgctgaccctcatctgggcctgggccctctgccaagtgcccctgtgggatgggaggagtgaggcagtgggagaagaggtggtggtcgtttctatgcattcaggctgcctttggggctgcctcccttcttattcttccttgctgcacgtccatctcttttcctgtctttgagattgacctgactgctctggcaagaagaagaggtgtccttacagaggcctctttactgaccaactgaagtatagacttactgctggacaatctgcatgggcatcacccctccccgcatgtaacccaaaagaggtgtccagagccaaggcttctaccttcattgtccctctctgtgctcaaggagttccattccaggaggaagagatctataccctaagcagatagcaaagaagataatggaggagcaattggtcatggccttggtttccctcaaaacaacgctgcagatttatctgcacaaacatctccacttttgggggaaaggtgggtagattccagttccctggactaccttcaggaggcacgagagctgggagaagaggcaaagctacaggtttacttgggagccagctgagaagagagcagactcacaggtgctggtgcttggatttagccaggctcctccgagcacctcatgcatgtcccagcccctgggccctagccctttcctgccctgcagtctgcagtgccagcacgcaaatcccttcaccacagggtttcgttttgctggcttgaagacaaatggtcttagaattcattgagacccatagcttcatatggctgctccagccccacttcttagcattcttactcctcttctggggctaatgtcagcatctatagacaatagactattaaaaaatcaccttttaaacaagaaacggaaggcatttgatgcagaatttttgcatgacaacatagaaataatttaaaaatagtgtttgttctgaatgttggtagacccttcatagctttgttacaatgaaaccttgaactgaaaatatttaataaaataacctttaaacagtc

SEQ ID NO: 113377 - DNA, 1820 bp, Homo sapiens
  Payload ID: 2163
  Gene Symbol: CAMK2G
  Gene Name: calcium/calmodulin-dependent protein kinase II gamma
  Uniprot ID: Q13555
  ENST ID: ENST00000305762
  CDS Start-End: 1-1590
atggccaccaccgccacctgcacccgtttcaccgacgactaccagctcttcgaggagcttggcaagggtgctttctctgtggtccgcaggtgtgtgaagaaaacctccacgcaggagtacgcagcaaaaatcatcaataccaagaagttgtctgcccgggatcaccagaaactagaacgtgaggctcggatatgtcgacttctgaaacatccaaacatcgtgcgcctccatgacagtatttctgaagaagggtttcactacctcgtgtttgaccttgttaccggcggggagctgtttgaagacattgtggccagagagtactacagtgaagcagatgccagccactgtatacatcagattctggagagtgttaaccacatccaccagcatgacatcgtccacagggacctgaagcctgagaacctgctgctggcgagtaaatgcaagggtgccgccgtcaagctggctgattttggcctagccatcgaagtacagggagagcagcaggcttggtttggttttgctggcaccccaggttacttgtcccctgaggtcttgaggaaagatccctatggaaaacctgtggatatctgggcctgcggggtcatcctgtatatcctcctggtgggctatcctcccttctgggatgaggatcagcacaagctgtatcagcagatcaaggctggagcctatgatttcccatcaccagaatgggacacggtaactcctgaagccaagaacttgatcaaccagatgctgaccataaacccagcaaagcgcatcacggctgaccaggctctcaagcacccgtgggtctgtcaacgatccacggtggcatccatgatgcatcgtcaggagactgtggagtgtttgcgcaagttcaatgcccggagaaaactgaagggtgccatcctcacgaccatgcttgtctccaggaacttctcagctgccaaaagcctattgaacaagaagtcggatggcggtgtcaagaaaaggaagtcgagttccagcgtgcacctaatgccacagagcaacaacaaaaacagtctcgtaagcccagcccaagagcccgcgcccttgcagacggccatggagccacaaaccactgtggtacacaacgctacagatgggatcaagggctccacagagagctgcaacaccaccacagaagatgaggacctcaaagtgcgaaaacaggagatcattaagattacagaacagctgattgaagccatcaacaatggggactttgaggcctacacgaagatttgtgatccaggcctcacttcctttgagcctgaggcccttggtaacctcgtggaggggatggatttccataagttttactttgagaatctcctgtccaagaacagcaagcctatccataccaccatcctaaacccacacgtccacgtgattggggaggacgcagcgtgcatcgcctacatccgcctcacccagtacatcgacgggcagggtcggcctcgcaccagccagtcagaagagacccgggtctggcaccgtcgggatggcaagtggctcaatgtccactatcactgctcaggggcccctgccgcaccgctgcagtgagctcagccacaggggctttaggagattccagccggaggtccaaccttcgcagccagtggctctggagggcctgagtgacagcggcagtcctgtttgtttgaggtttaaaacaattcaattacaaaagcggcagcagccaatgcacgcccctgcatgcagccctcccgcccgcccttcgtgtctgtctctgctgtaccgaggtgttttttacatttaagaaaaaaaaaaaa

SEQ ID NO: 113378 - DNA, 3720 bp, Homo sapiens
  Payload ID: 2163
  Gene Symbol: CAMK2G
  Gene Name: calcium/calmodulin-dependent protein kinase II gamma
  Uniprot ID: Q13555
  ENST ID: ENST00000322635
  CDS Start-End: 120-1703
agtctcgcggtgctgccgggctcagccccgtctcctcctcttgctccctcggccgggcggcggtgactgtgcaccgacgtcggcgcgggctgcaccgccgcgtccgcccgcccgccagcatggccaccaccgccacctgcacccgtttcaccgacgactaccagctcttcgaggagcttggcaagggtgctttctctgtggtccgcaggtgtgtgaagaaaacctccacgcaggagtacgcagcaaaaatcatcaataccaagaagttgtctgcccgggatcaccagaaactagaacgtgaggctcggatatgtcgacttctgaaacatccaaacatcgtgcgcctccatgacagtatttctgaagaagggtttcactacctcgtgtttgaccttgttaccggcggggagctgtttgaagacattgtggccagagagtactacagtgaagcagatgccagccactgtatacatcagattctggagagtgttaaccacatccaccagcatgacatcgtccacagggacctgaagcctgagaacctgctgctggcgagtaaatgcaagggtgccgccgtcaagctggctgattttggcctagccatcgaagtacagggagagcagcaggcttggtttggttttgctggcaccccaggttacttgtcccctgaggtcttgaggaaagatccctatggaaaacctgtggatatctgggcctgcggggtcatcctgtatatcctcctggtgggctatcctcccttctgggatgaggatcagcacaagctgtatcagcagatcaaggctggagcctatgatttcccatcaccagaatgggacacggtaactcctgaagccaagaacttgatcaaccagatgctgaccataaacccagcaaagcgcatcacggctgaccaggctctcaagcacccgtgggtctgtcaacgatccacggtggcatccatgatgcatcgtcaggagactgtggagtgtttgcgcaagttcaatgcccggagaaaactgaagggtgccatcctcacgaccatgcttgtctccaggaacttctcagttggcaggcagagctccgcccccgcctcgcctgccgcgagcgccgccggcctggccgggcaagctgccaaaagcctattgaacaagaagtcggatggcggtgtcaagaaaaggaagtcgagttccagcgtgcacctaatggagccacaaaccactgtggtacacaacgctacagatgggatcaagggctccacagagagctgcaacaccaccacagaagatgaggacctcaaagtgcgaaaacaggagatcattaagattacagaacagctgattgaagccatcaacaatggggactttgaggcctacacgaagatttgtgatccaggcctcacttcctttgagcctgaggcccttggtaacctcgtggaggggatggatttccataagttttactttgagaatctcctgtccaagaacagcaagcctatccataccaccatcctaaacccacacgtccacgtgattggggaggacgcagcgtgcatcgcctacatccgcctcacccagtacatcgacgggcagggtcggcctcgcaccagccagtcagaagagacccgggtctggcaccgtcgggatggcaagtggctcaatgtccactatcactgctcaggggcccctgccgcaccgctgcagtgagctcagccacaggggctttaggagattccagccggaggtccaaccttcgcagccagtggctctggagggcctgagtgacagcggcagtcctgtttgtttgaggtttaaaacaattcaattacaaaagcggcagcagccaatgcacgcccctgcatgcagccctcccgcccgcccttcgtgtctgtctctgctgtaccgaggtgttttttacatttaagaaaaaaaaaaaagaaaaaaagattgtttaaaaaaaaaaggaatccataccatgatgcgttttaaaaccaccgacagcccttgggttggcaagaaggcaggagtatgtatgaggtccatcctggcatgagcagtggctcacccaccggccttgaagaggtgagcttggcctctctggtccccatggacttagggggaccaggcaagaactctgacagagctttgggggccgtgatgtgattgcagctcctgaggtggcctgcttaccccaggtctaggaatgaacttctttggaacttgcataggcgcctagaatggggctgatgagaacatcgtgaccatcagacctacttgggagagaacgcagagctcccagcctgctgtggaggcagctgagaagtggtggcctcaggactgagagcccggacgttgctgtactgtcttgtttagtgtagaagggaagagaattggtgctgcagaagtgtacccgccatgaagccgatgagaaacctcgtgttagtctgacatgcactcactcatccatttctataggatgcacaatgcatgtgggccctaatattgaggccttatccctgcagctaggagggggaggggttgttgctgctttgcttcgtgttttcttctaacctggcaaggagagagccaggccctggtcagggctcccgtgccgcctttggcggttctgtttctgtgctgatctggaccatctttgtcttgccttttcacggtagtggtccccatgctgaccctcatctgggcctgggccctctgccaagtgcccctgtgggatgggaggagtgaggcagtgggagaagaggtggtggtcgtttctatgcattcaggctgcctttggggctgcctcccttcttattcttccttgctgcacgtccatctcttttcctgtctttgagattgacctgactgctctggcaagaagaagaggtgtccttacagaggcctctttactgaccaactgaagtatagacttactgctggacaatctgcatgggcatcacccctccccgcatgtaacccaaaagaggtgtccagagccaaggcttctaccttcattgtccctctctgtgctcaaggagttccattccaggaggaagagatctataccctaagcagatagcaaagaagataatggaggagcaattggtcatggccttggtttccctcaaaacaacgctgcagatttatctgcacaaacatctccacttttgggggaaaggtgggtagattccagttccctggactaccttcaggaggcacgagagctgggagaagaggcaaagctacaggtttacttgggagccagctgagaagagagcagactcacaggtgctggtgcttggatttagccaggctcctccgagcacctcatgcatgtcccagcccctgggccctagccctttcctgccctgcagtctgcagtgccagcacgcaaatcccttcaccacagggtttcgttttgctggcttgaagacaaatggtcttagaattcattgagacccatagcttcatatggctgctccagccccacttcttagcattcttactcctcttctggggctaatgtcagcatctatagacaatagactattaaaaaatcaccttttaaacaagaaacggaaggcatttgatgcagaatttttgcatgacaacatagaaataatttaaaaatagtgtttgttctgaatgttggtagacccttcatagctttgttacaatgaaaccttgaactgaaaatatttaataaaataacctttaaacagtc

SEQ ID NO: 113379 - DNA, 3818 bp, Homo sapiens
  Payload ID: 2163
  Gene Symbol: CAMK2G
  Gene Name: calcium/calmodulin-dependent protein kinase II gamma
  Uniprot ID: Q13555
  ENST ID: ENST00000322680
  CDS Start-End: 131-1801
ctccccggtaaagtctcgcggtgctgccgggctcagccccgtctcctcctcttgctccctcggccgggcggcggtgactgtgcaccgacgtcggcgcgggctgcaccgccgcgtccgcccgcccgccagcatggccaccaccgccacctgcacccgtttcaccgacgactaccagctcttcgaggagcttggcaagggtgctttctctgtggtccgcaggtgtgtgaagaaaacctccacgcaggagtacgcagcaaaaatcatcaataccaagaagttgtctgcccgggatcaccagaaactagaacgtgaggctcggatatgtcgacttctgaaacatccaaacatcgtgcgcctccatgacagtatttctgaagaagggtttcactacctcgtgtttgaccttgttaccggcggggagctgtttgaagacattgtggccagagagtactacagtgaagcagatgccagccactgtatacatcagattctggagagtgttaaccacatccaccagcatgacatcgtccacagggacctgaagcctgagaacctgctgctggcgagtaaatgcaagggtgccgccgtcaagctggctgattttggcctagccatcgaagtacagggagagcagcaggcttggtttggttttgctggcaccccaggttacttgtcccctgaggtcttgaggaaagatccctatggaaaacctgtggatatctgggcctgcggggtcatcctgtatatcctcctggtgggctatcctcccttctgggatgaggatcagcacaagctgtatcagcagatcaaggctggagcctatgatttcccatcaccagaatgggacacggtaactcctgaagccaagaacttgatcaaccagatgctgaccataaacccagcaaagcgcatcacggctgaccaggctctcaagcacccgtgggtctgtcaacgatccacggtggcatccatgatgcatcgtcaggagactgtggagtgtttgcgcaagttcaatgcccggagaaaactgaagggtgccatcctcacgaccatgcttgtctccaggaacttctcagctgccaaaagcctattgaacaagaagtcggatggcggtgtcaagccacagagcaacaacaaaaacagtctcgtaagcccagcccaagagcccgcgcccttgcagacggccatggagccacaaaccactgtggtacacaacgctacagatgggatcaagggctccacagagagctgcaacaccaccacagaagatgaggacctcaaagctgccccgctccgcactgggaatggcagctcggtgcctgaaggacggagctcccgggacagaacagccccctctgcaggcatgcagccccagccttctctctgctcctcagccatgcgaaaacaggagatcattaagattacagaacagctgattgaagccatcaacaatggggactttgaggcctacacgaagatttgtgatccaggcctcacttcctttgagcctgaggcccttggtaacctcgtggaggggatggatttccataagttttactttgagaatctcctgtccaagaacagcaagcctatccataccaccatcctaaacccacacgtccacgtgattggggaggacgcagcgtgcatcgcctacatccgcctcacccagtacatcgacgggcagggtcggcctcgcaccagccagtcagaagagacccgggtctggcaccgtcgggatggcaagtggctcaatgtccactatcactgctcaggggcccctgccgcaccgctgcagtgagctcagccacaggggctttaggagattccagccggaggtccaaccttcgcagccagtggctctggagggcctgagtgacagcggcagtcctgtttgtttgaggtttaaaacaattcaattacaaaagcggcagcagccaatgcacgcccctgcatgcagccctcccgcccgcccttcgtgtctgtctctgctgtaccgaggtgttttttacatttaagaaaaaaaaaaaagaaaaaaagattgtttaaaaaaaaaaggaatccataccatgatgcgttttaaaaccaccgacagcccttgggttggcaagaaggcaggagtatgtatgaggtccatcctggcatgagcagtggctcacccaccggccttgaagaggtgagcttggcctctctggtccccatggacttagggggaccaggcaagaactctgacagagctttgggggccgtgatgtgattgcagctcctgaggtggcctgcttaccccaggtctaggaatgaacttctttggaacttgcataggcgcctagaatggggctgatgagaacatcgtgaccatcagacctacttgggagagaacgcagagctcccagcctgctgtggaggcagctgagaagtggtggcctcaggactgagagcccggacgttgctgtactgtcttgtttagtgtagaagggaagagaattggtgctgcagaagtgtacccgccatgaagccgatgagaaacctcgtgttagtctgacatgcactcactcatccatttctataggatgcacaatgcatgtgggccctaatattgaggccttatccctgcagctaggagggggaggggttgttgctgctttgcttcgtgttttcttctaacctggcaaggagagagccaggccctggtcagggctcccgtgccgcctttggcggttctgtttctgtgctgatctggaccatctttgtcttgccttttcacggtagtggtccccatgctgaccctcatctgggcctgggccctctgccaagtgcccctgtgggatgggaggagtgaggcagtgggagaagaggtggtggtcgtttctatgcattcaggctgcctttggggctgcctcccttcttattcttccttgctgcacgtccatctcttttcctgtctttgagattgacctgactgctctggcaagaagaagaggtgtccttacagaggcctctttactgaccaactgaagtatagacttactgctggacaatctgcatgggcatcacccctccccgcatgtaacccaaaagaggtgtccagagccaaggcttctaccttcattgtccctctctgtgctcaaggagttccattccaggaggaagagatctataccctaagcagatagcaaagaagataatggaggagcaattggtcatggccttggtttccctcaaaacaacgctgcagatttatctgcacaaacatctccacttttgggggaaaggtgggtagattccagttccctggactaccttcaggaggcacgagagctgggagaagaggcaaagctacaggtttacttgggagccagctgagaagagagcagactcacaggtgctggtgcttggatttagccaggctcctccgagcacctcatgcatgtcccagcccctgggccctagccctttcctgccctgcagtctgcagtgccagcacgcaaatcccttcaccacagggtttcgttttgctggcttgaagacaaatggtcttagaattcattgagacccatagcttcatatggctgctccagccccacttcttagcattcttactcctcttctggggctaatgtcagcatctatagacaatagactattaaaaaatcaccttttaaacaagaaacggaaggcatttgatgcagaatttttgcatgacaacatagaaataatttaaaaatagtgtttgttctgaatgttggtagacccttcatagctttgttacaatgaaaccttgaactgaaaatatttaataaaataacctttaaacagtc

SEQ ID NO: 113380 - DNA, 1822 bp, Homo sapiens
  Payload ID: 2163
  Gene Symbol: CAMK2G
  Gene Name: calcium/calmodulin-dependent protein kinase II gamma
  ENST ID: ENST00000372765
  CDS Start-End: 42-1592
gtcggcgcgggctgcaccgccgcgtccgcccgcccgccagcatggccaccaccgccacctgcacccgtttcaccgacgactaccagctcttcgaggagcttggcaagggtgctttctctgtggtccgcaggtgtgtgaagaaaacctccacgcaggagtacgcagcaaaaatcatcaataccaagaagttgtctgcccgggatcaccagaaactagaacgtgaggctcggatatgtcgacttctgaaacatccaaacatcgtgcgcctccatgacagtatttctgaagaagggtttcactacctcgtgtttgaccttgttaccggcggggagctgtttgaagacattgtggccagagagtactacagtgaagcagatgccagccactgtatacatcagattctggagagtgttaaccacatccaccagcatgacatcgtccacagggacctgaagcctgagaacctgctgctggcgagtaaatgcaagggtgccgccgtcaagctggctgattttggcctagccatcgaagtacagggagagcagcaggcttggtttggttttgctggcaccccaggttacttgtcccctgaggtcttgaggaaagatccctatggaaaacctgtggatatctgggcctgcggggtcatcctgtatatcctcctggtgggctatcctcccttctgggatgaggatcagcacaagctgtatcagcagatcaaggctggagcctatgatttcccatcaccagaatgggacacggtaactcctgaagccaagaacttgatcaaccagatgctgaccataaacccagcaaagcgcatcacggctgaccaggctctcaagcacccgtgggtctgtcaacgatccacggtggcatccatgatgcatcgtcaggagactgtggagtgtttgcgcaagttcaatgcccggagaaaactgaagggtgccatcctcacgaccatgcttgtctccaggaacttctcagttggcaggcagagctccgcccccgcctcgcctgccgcgagcgccgccggcctggccgggcaagctgccaaaagcctattgaacaagaagtcggatggcggtgtcaaggagccacaaaccactgtggtacacaacgctacagatgggatcaagggctccacagagagctgcaacaccaccacagaagatgaggacctcaaagtgcgaaaacaggagatcattaagattacagaacagctgattgaagccatcaacaatggggactttgaggcctacacgaagatttgtgatccaggcctcacttcctttgagcctgaggcccttggtaacctcgtggaggggatggatttccataagttttactttgagaatctcctgtccaagaacagcaagcctatccataccaccatcctaaacccacacgtccacgtgattggggaggacgcagcgtgcatcgcctacatccgcctcacccagtacatcgacgggcagggtcggcctcgcaccagccagtcagaagagacccgggtctggcaccgtcgggatggcaagtggctcaatgtccactatcactgctcaggggcccctgccgcaccgctgcagtgagctcagccacaggggctttaggagattccagccggaggtccaaccttcgcagccagtggctctggagggcctgagtgacagcggcagtcctgtttgtttgaggtttaaaacaattcaattacaaaagcggcagcagccaatgcacgcccctgcatgcagccctcccgcccgcccttcgtgtctgtctctgctgtaccgaggtgttttttacatttaagaaaaaaaaaaaa

SEQ ID NO: 113381 - DNA, 3767 bp, Homo sapiens
  Payload ID: 2163
  Gene Symbol: CAMK2G
  Gene Name: calcium/calmodulin-dependent protein kinase II gamma
  ENST ID: ENST00000394762
  CDS Start-End: 131-1750
ctccccggtaaagtctcgcggtgctgccgggctcagccccgtctcctcctcttgctccctcggccgggcggcggtgactgtgcaccgacgtcggcgcgggctgcaccgccgcgtccgcccgcccgccagcatggccaccaccgccacctgcacccgtttcaccgacgactaccagctcttcgaggagcttggcaagggtgctttctctgtggtccgcaggtgtgtgaagaaaacctccacgcaggagtacgcagcaaaaatcatcaataccaagaagttgtctgcccgggatcaccagaaactagaacgtgaggctcggatatgtcgacttctgaaacatccaaacatcgtgcgcctccatgacagtatttctgaagaagggtttcactacctcgtgtttgaccttgttaccggcggggagctgtttgaagacattgtggccagagagtactacagtgaagcagatgccagccactgtatacatcagattctggagagtgttaaccacatccaccagcatgacatcgtccacagggacctgaagcctgagaacctgctgctggcgagtaaatgcaagggtgccgccgtcaagctggctgattttggcctagccatcgaagtacagggagagcagcaggcttggtttggttttgctggcaccccaggttacttgtcccctgaggtcttgaggaaagatccctatggaaaacctgtggatatctgggcctgcggggtcatcctgtatatcctcctggtgggctatcctcccttctgggatgaggatcagcacaagctgtatcagcagatcaaggctggagcctatgatttcccatcaccagaatgggacacggtaactcctgaagccaagaacttgatcaaccagatgctgaccataaacccagcaaagcgcatcacggctgaccaggctctcaagcacccgtgggtctgtcaacgatccacggtggcatccatgatgcatcgtcaggagactgtggagtgtttgcgcaagttcaatgcccggagaaaactgaagggtgccatcctcacgaccatgcttgtctccaggaacttctcagttggcaggcagagctccgcccccgcctcgcctgccgcgagcgccgccggcctggccgggcaagctgccaaaagcctattgaacaagaagtcggatggcggtgtcaagccacagagcaacaacaaaaacagtctcgtaagcccagcccaagagcccgcgcccttgcagacggccatggagccacaaaccactgtggtacacaacgctacagatgggatcaagggctccacagagagctgcaacaccaccacagaagatgaggacctcaaagtgcgaaaacaggagatcattaagattacagaacagctgattgaagccatcaacaatggggactttgaggcctacacgaagatttgtgatccaggcctcacttcctttgagcctgaggcccttggtaacctcgtggaggggatggatttccataagttttactttgagaatctcctgtccaagaacagcaagcctatccataccaccatcctaaacccacacgtccacgtgattggggaggacgcagcgtgcatcgcctacatccgcctcacccagtacatcgacgggcagggtcggcctcgcaccagccagtcagaagagacccgggtctggcaccgtcgggatggcaagtggctcaatgtccactatcactgctcaggggcccctgccgcaccgctgcagtgagctcagccacaggggctttaggagattccagccggaggtccaaccttcgcagccagtggctctggagggcctgagtgacagcggcagtcctgtttgtttgaggtttaaaacaattcaattacaaaagcggcagcagccaatgcacgcccctgcatgcagccctcccgcccgcccttcgtgtctgtctctgctgtaccgaggtgttttttacatttaagaaaaaaaaaaaagaaaaaaagattgtttaaaaaaaaaaggaatccataccatgatgcgttttaaaaccaccgacagcccttgggttggcaagaaggcaggagtatgtatgaggtccatcctggcatgagcagtggctcacccaccggccttgaagaggtgagcttggcctctctggtccccatggacttagggggaccaggcaagaactctgacagagctttgggggccgtgatgtgattgcagctcctgaggtggcctgcttaccccaggtctaggaatgaacttctttggaacttgcataggcgcctagaatggggctgatgagaacatcgtgaccatcagacctacttgggagagaacgcagagctcccagcctgctgtggaggcagctgagaagtggtggcctcaggactgagagcccggacgttgctgtactgtcttgtttagtgtagaagggaagagaattggtgctgcagaagtgtacccgccatgaagccgatgagaaacctcgtgttagtctgacatgcactcactcatccatttctataggatgcacaatgcatgtgggccctaatattgaggccttatccctgcagctaggagggggaggggttgttgctgctttgcttcgtgttttcttctaacctggcaaggagagagccaggccctggtcagggctcccgtgccgcctttggcggttctgtttctgtgctgatctggaccatctttgtcttgccttttcacggtagtggtccccatgctgaccctcatctgggcctgggccctctgccaagtgcccctgtgggatgggaggagtgaggcagtgggagaagaggtggtggtcgtttctatgcattcaggctgcctttggggctgcctcccttcttattcttccttgctgcacgtccatctcttttcctgtctttgagattgacctgactgctctggcaagaagaagaggtgtccttacagaggcctctttactgaccaactgaagtatagacttactgctggacaatctgcatgggcatcacccctccccgcatgtaacccaaaagaggtgtccagagccaaggcttctaccttcattgtccctctctgtgctcaaggagttccattccaggaggaagagatctataccctaagcagatagcaaagaagataatggaggagcaattggtcatggccttggtttccctcaaaacaacgctgcagatttatctgcacaaacatctccacttttgggggaaaggtgggtagattccagttccctggactaccttcaggaggcacgagagctgggagaagaggcaaagctacaggtttacttgggagccagctgagaagagagcagactcacaggtgctggtgcttggatttagccaggctcctccgagcacctcatgcatgtcccagcccctgggccctagccctttcctgccctgcagtctgcagtgccagcacgcaaatcccttcaccacagggtttcgttttgctggcttgaagacaaatggtcttagaattcattgagacccatagcttcatatggctgctccagccccacttcttagcattcttactcctcttctggggctaatgtcagcatctatagacaatagactattaaaaaatcaccttttaaacaagaaacggaaggcatttgatgcagaatttttgcatgacaacatagaaataatttaaaaatagtgtttgttctgaatgttggtagacccttcatagctttgttacaatgaaaccttgaactgaaaatatttaataaaataacctttaaacagtc

SEQ ID NO: 113382 - DNA, 1618 bp, Homo sapiens
  Payload ID: 2163
  Gene Symbol: CAMK2G
  Gene Name: calcium/calmodulin-dependent protein kinase II gamma
  ENST ID: ENST00000433289
  CDS Start-End: 1-1362
cgacttctgaaacatccaaacatcgtgcgcctccatgacagtatttctgaagaagggtttcactacctcgtgtttgaccttgttaccggcggggagctgtttgaagacattgtggccagagagtactacagtgaagcagatgccagccactgtatacatcagattctggagagtgttaaccacatccaccagcatgacatcgtccacagggacctgaagcctgagaacctgctgctggcgagtaaatgcaagggtgccgccgtcaagctggctgattttggcctagccatcgaagtacagggagagcagcaggcttggtttggttttgctggcaccccaggttacttgtcccctgaggtcttgaggaaagatccctatggaaaacctgtggatatctgggcctgcggggtcatcctgtatatcctcctggtgggctatcctcccttctgggatgaggatcagcacaagctgtatcagcagatcaaggctggagcctatgatttcccatcaccagaatgggacacggtaactcctgaagccaagaacttgatcaaccagatgctgaccataaacccagcaaagcgcatcacggctgaccaggctctcaagcacccgtgggtctgtcaacgatccacggtggcatccatgatgcatcgtcaggagactgtggagtgtttgcgcaagttcaatgcccggagaaaactgaagggtgccatcctcacgaccatgcttgtctccaggaacttctcagctgccaaaagcctattgaacaagaagtcggatggcggtgtcaagccacagagcaacaacaaaaacagtctcgtaagcccagcccaagagcccgcgcccttgcagacggccatggagccacaaaccactgtggtacacaacgctacagatgggatcaagggctccacagagagctgcaacaccaccacagaagatgaggacctcaaagtgcgaaaacaggagatcattaagattacagaacagctgattgaagccatcaacaatggggactttgaggcctacacgaagatttgtgatccaggcctcacttcctttgagcctgaggcccttggtaacctcgtggaggggatggatttccataagttttactttgagaatctcctgtccaagaacagcaagcctatccataccaccatcctaaacccacacgtccacgtgattggggaggacgcagcgtgcatcgcctacatccgcctcacccagtacatcgacgggcagggtcggcctcgcaccagccagtcagaagagacccgggtctggcaccgtcgggatggcaagtggctcaatgtccactatcactgctcaggggcccctgccgcaccgctgcagtgagctcagccacaggggctttaggagattccagccggaggtccaaccttcgcagccagtggctctggagggcctgagtgacagcggcagtcctgtttgtttgaggtttaaaacaattcaattacaaaagcggcagcagccaatgcacgcccctgcatgcagccctcccgcccgcccttcgtgtctgtctctgctgtaccgaggtgttttttacatttaagaaaaaaaaaaaagaaaaaaagattgtttaaaaaaaaaa

SEQ ID NO: 113383 - DNA, 1224 bp, Homo sapiens
  Payload ID: 2163
  Gene Symbol: CAMK2G
  Gene Name: calcium/calmodulin-dependent protein kinase II gamma
  ENST ID: ENST00000441192
  CDS Start-End: 1-1006
gtatcagcagatcaaggctggagcctatgatttcccatcaccagaatgggacacggtaactcctgaagccaagaacttgatcaaccagatgctgaccataaacccagcaaagcgcatcacggctgaccaggctctcaagcacccgtgggtctgtcaacgatccacggtggcatccatgatgcatcgtcaggagactgtggagtgtttgcgcaagttcaatgcccggagaaaactgaagggtgccatcctcacgaccatgcttgtctccaggaacttctcagctgccaaaagcctattgaacaagaagtcggatggcggtgtcaagccacagagcaacaacaaaaacagtctcgtaagcccagcccaagagcccgcgcccttgcagacggccatggagccacaaaccactgtggtacacaacgctacagatgggatcaagggctccacagagagctgcaacaccaccacagaagatgaggacctcaaagctgccccgctccgcactgggaatggcagctcggtgcctgaaggacggagctcccgggacagaacagccccctctgcaggcatgcagccccagccttctctctgctcctcagccatgcgaaaacaggagatcattaagattacagaacagctgattgaagccatcaacaatggggactttgaggcctacacgaagatttgtgatccaggcctcacttcctttgagcctgaggcccttggtaacctcgtggaggggatggatttccataagttttactttgagaatctcctgtccaagaacagcaagcctatccataccaccatcctaaacccacacgtccacgtgattggggaggacgcagcgtgcatcgcctacatccgcctcacccagtacatcgacgggcagggtcggcctcgcaccagccagtcagaagagacccgggtctggcaccgtcgggatggcaagtggctcaatgtccactatcactgctcaggggcccctgccgcaccgctgcagtgagctcagccacaggggctttaggagattccagccggaggtccaaccttcgcagccagtggctctggagggcctgagtgacagcggcagtcctgtttgtttgaggtttaaaacaattcaattacaaaagcggcagcagccaatgcacgcccctgcatgcagccctcccgcccgcccttcgtgtctgtctctgctgtaccgaggtgttttttacatttaag

SEQ ID NO: 113384 - DNA, 3824 bp, Homo sapiens
  Payload ID: 2163
  Gene Symbol: CAMK2G
  Gene Name: calcium/calmodulin-dependent protein kinase II gamma
  ENST ID: ENST00000423381
  CDS Start-End: 131-1807
ctccccggtaaagtctcgcggtgctgccgggctcagccccgtctcctcctcttgctccctcggccgggcggcggtgactgtgcaccgacgtcggcgcgggctgcaccgccgcgtccgcccgcccgccagcatggccaccaccgccacctgcacccgtttcaccgacgactaccagctcttcgaggagcttggcaagggtgctttctctgtggtccgcaggtgtgtgaagaaaacctccacgcaggagtacgcagcaaaaatcatcaataccaagaagttgtctgcccgggatcaccagaaactagaacgtgaggctcggatatgtcgacttctgaaacatccaaacatcgtgcgcctccatgacagtatttctgaagaagggtttcactacctcgtgtttgaccttgttaccggcggggagctgtttgaagacattgtggccagagagtactacagtgaagcagatgccagccactgtatacatcagattctggagagtgttaaccacatccaccagcatgacatcgtccacagggacctgaagcctgagaacctgctgctggcgagtaaatgcaagggtgccgccgtcaagctggctgattttggcctagccatcgaagtacagggagagcagcaggcttggtttggttttgctggcaccccaggttacttgtcccctgaggtcttgaggaaagatccctatggaaaacctgtggatatctgggcctgcggggtcatcctgtatatcctcctggtgggctatcctcccttctgggatgaggatcagcacaagctgtatcagcagatcaaggctggagcctatgatttcccatcaccagaatgggacacggtaactcctgaagccaagaacttgatcaaccagatgctgaccataaacccagcaaagcgcatcacggctgaccaggctctcaagcacccgtgggtctgtcaacgatccacggtggcatccatgatgcatcgtcaggagactgtggagtgtttgcgcaagttcaatgcccggagaaaactgaagggtgccatcctcacgaccatgcttgtctccaggaacttctcagctgccaaaagcctattgaacaagaagtcggatggcggtgtcaagaaaaggaagtcgagttccagcgtgcacctaatgccacagagcaacaacaaaaacagtctcgtaagcccagcccaagagcccgcgcccttgcagacggccatggagccacaaaccactgtggtacacaacgctacagatgggatcaagggctccacagagagctgcaacaccaccacagaagatgaggacctcaaaggtagggtgcctgaaggacggagctcccgggacagaacagccccctctgcaggcatgcagccccagccttctctctgctcctcagccatgcgaaaacaggagatcattaagattacagaacagctgattgaagccatcaacaatggggactttgaggcctacacgaagatttgtgatccaggcctcacttcctttgagcctgaggcccttggtaacctcgtggaggggatggatttccataagttttactttgagaatctcctgtccaagaacagcaagcctatccataccaccatcctaaacccacacgtccacgtgattggggaggacgcagcgtgcatcgcctacatccgcctcacccagtacatcgacgggcagggtcggcctcgcaccagccagtcagaagagacccgggtctggcaccgtcgggatggcaagtggctcaatgtccactatcactgctcaggggcccctgccgcaccgctgcagtgagctcagccacaggggctttaggagattccagccggaggtccaaccttcgcagccagtggctctggagggcctgagtgacagcggcagtcctgtttgtttgaggtttaaaacaattcaattacaaaagcggcagcagccaatgcacgcccctgcatgcagccctcccgcccgcccttcgtgtctgtctctgctgtaccgaggtgttttttacatttaagaaaaaaaaaaaagaaaaaaagattgtttaaaaaaaaaaggaatccataccatgatgcgttttaaaaccaccgacagcccttgggttggcaagaaggcaggagtatgtatgaggtccatcctggcatgagcagtggctcacccaccggccttgaagaggtgagcttggcctctctggtccccatggacttagggggaccaggcaagaactctgacagagctttgggggccgtgatgtgattgcagctcctgaggtggcctgcttaccccaggtctaggaatgaacttctttggaacttgcataggcgcctagaatggggctgatgagaacatcgtgaccatcagacctacttgggagagaacgcagagctcccagcctgctgtggaggcagctgagaagtggtggcctcaggactgagagcccggacgttgctgtactgtcttgtttagtgtagaagggaagagaattggtgctgcagaagtgtacccgccatgaagccgatgagaaacctcgtgttagtctgacatgcactcactcatccatttctataggatgcacaatgcatgtgggccctaatattgaggccttatccctgcagctaggagggggaggggttgttgctgctttgcttcgtgttttcttctaacctggcaaggagagagccaggccctggtcagggctcccgtgccgcctttggcggttctgtttctgtgctgatctggaccatctttgtcttgccttttcacggtagtggtccccatgctgaccctcatctgggcctgggccctctgccaagtgcccctgtgggatgggaggagtgaggcagtgggagaagaggtggtggtcgtttctatgcattcaggctgcctttggggctgcctcccttcttattcttccttgctgcacgtccatctcttttcctgtctttgagattgacctgactgctctggcaagaagaagaggtgtccttacagaggcctctttactgaccaactgaagtatagacttactgctggacaatctgcatgggcatcacccctccccgcatgtaacccaaaagaggtgtccagagccaaggcttctaccttcattgtccctctctgtgctcaaggagttccattccaggaggaagagatctataccctaagcagatagcaaagaagataatggaggagcaattggtcatggccttggtttccctcaaaacaacgctgcagatttatctgcacaaacatctccacttttgggggaaaggtgggtagattccagttccctggactaccttcaggaggcacgagagctgggagaagaggcaaagctacaggtttacttgggagccagctgagaagagagcagactcacaggtgctggtgcttggatttagccaggctcctccgagcacctcatgcatgtcccagcccctgggccctagccctttcctgccctgcagtctgcagtgccagcacgcaaatcccttcaccacagggtttcgttttgctggcttgaagacaaatggtcttagaattcattgagacccatagcttcatatggctgctccagccccacttcttagcattcttactcctcttctggggctaatgtcagcatctatagacaatagactattaaaaaatcaccttttaaacaagaaacggaaggcatttgatgcagaatttttgcatgacaacatagaaataatttaaaaatagtgtttgttctgaatgttggtagacccttcatagctttgttacaatgaaaccttgaactgaaaatatttaataaaataacctttaaacagtc

SEQ ID NO: 113385 - DNA, 2336 bp, Homo sapiens
  Payload ID: 2164
  Gene Symbol: CAMK2N1
  Gene Name: calcium/calmodulin-dependent protein kinase II inhibitor 1
  Uniprot ID: Q7Z7J9
  ENST ID: ENST00000375078
  CDS Start-End: 842-1078
cgcggccggcatttctcctcgcagctcgctgcctcctctatccctgcctccctctcccccctctgtttttctcccttccttccctctccgaccctcttcctctccctcccgatcctttccctcctcctctcatctttcccctgtctctccgttctagctcgtcccccaccccaccttttcttctttctcctcctctccttcctctccccctctcctctgtctccttccaccgtctcccctgcctccctgtctttcagtccctgtttttcagccccgtctccctctcggtttctctcccccaccctccctccgggtttcctccccggtgccctccctcctctctccctcccctccccctccgcccctcgcagccccgccgctcgcagctcccagtctgcctccccgaaccggcgccgccgcccgcactcgccgcaggaccggcccgcccggctcccggggtgcgccctcctcggtcccgcgccctccgggctcgcagggacgtctcctccctcccggctcgcggccccgcccggcccggcccccgcccagagccccagcgcgccgaggatgtgagtcctgctcgcctctggcggagcagcagccactcgcgcgcggagccggagcgcagcgcagcgcagccgcgggcgctctccgggccgctcgcgcgagtgccgcgctcttgccctagcggcgtcccccggcctctcgccggcgccaccgccgcagcagcccgcgggccgtccccggccggccgcccccggccccagcgccgctgaccctgtccgccgcgggcggggacgcgggcggaggaggcgccgcggcggagcccccggacgcgaccatgtcggaggtgctgccctacggcgacgagaagctgagcccctacggcgacggcggcgacgtgggccagatcttctcctgccgcctgcaggacaccaacaacttcttcggcgccgggcagaacaagcggccgcccaagctgggccagatcggccggagcaagcgggttgttattgaagatgataggattgatgacgtgctgaaaaatatgaccgacaaggcacctcctggtgtctaactcccccaaagacaatgagttaagggagagaataagaacggcggtaacagttattggcaaaaagcatgaaaagagaaagcactttgaaatttattactagcttgctacccacgatgaaatcaacaacctgtatctggtatcaggccgggagacagatgaggcgagaggaggaggaggaggaggagaaggctctgggctcctctgcaaaaataaaaataaaaaaataaataaaattttaaaaataataaaaattcactatatacacatataaagaaataaaaagaagtctcagttgcagctatttgtcaaaattaatatccatttctttttatatacggtgaatattgcgcaattatagatctggattttgaaccacttaatgaagcggcaacaccaggtgttttgaggtgttggcattcttcgctgatttggctgttcccaatgtttacattatttaatcttgcaaaaatggttctgtgcacttggatgtgaaatgctgtccagttttattttttttatgttgttatccttggatgtacaaaaaattcagaaaatgatctctgtagatattctgttttattttggtcatctttagaagttatcaggaatgtgtttaaaacaagaagagaacttttctaaggaatgatacatagaaaagattttattttaaaatgagttgtaaagcttgtgtttctttgttgctgcaagctatctgcccaagttaatgcaaatggacacattttttatgtcagaaaaacacacacacacacacacacacacacacacacacacgaaaaacaaagaaaaaaatgcttgagctttttctaacttccccttgcagtctgttgtgtgagcagcctgtttatttctctaatattatgtcagtttattctctttaatggactgtaaaaaaatgtaatcacaagagtgccaaatatcttgaaatgccaaaaggcattttagtttcttttctctgtgctctgagtccacgtacaggaatgcttggagtgtcttttctgttatttatagggattctcttaaggcacaccagctgcctgttttgcatggtatttgcaaaaatgcctcttgcgtgaggaaatcttttaccattttttgtttgcaactttggacctcaagaggtttcccttcccttccccgttccctcttttcttaattcaatattctgtatgttgcaccttgaaccagcacacagggctatttctccaatgtacaataaaagaattgttcctgtgtctca

SEQ ID NO: 113386 - DNA, 1362 bp, Homo sapiens
  Payload ID: 2165
  Gene Symbol: CAMK2N2
  Gene Name: calcium/calmodulin-dependent protein kinase II inhibitor 2
  Uniprot ID: Q96S95
  ENST ID: ENST00000296238
  CDS Start-End: 179-418
cggcccgggaggcggaggcgcgggggaggaggccccgcttggctcctcagccccggatgctgcatgacttcatccttccgccggctcccctgctgaggtagggccggtccggcagcaagcccgccgcccgcgccccgccgcagtcccgctcccgccccgcgcccaccccgcgcccgccatgtccgagatcctgccctacagcgaagacaagatgggccgcttcggcgcagaccccgagggctccgacctctccttcagctgccgcctgcaggacaccaactccttcttcgcgggcaaccaggccaagcgaccccccaagctgggccagatcggccgagccaagcgagtggtgatcgaggatgaccggatagacgacgtgctgaaggggatgggggagaagccgccgtccggagtgtagacgcgccggctcgggcggcgggctccgggcccagcctcgcagcggccaggagcgcgggccggcgatgcggctgccggcgcccccccgccccggcccaggcgcccgcgggcgggggctgcagggccgtgccgccgccgccgccaggcactccggagctgtccgcttcagcaccacggcggccgcggtagcggcggcgcggacccgcccggaacccgccgccgcgctcatgcactttaaaacctcgggccgcagccccaccccgcacaccggaacggacacggagacccgcggcccccagcccccggcccgccccctcccgcacggctcccctgccccgcccccctccggccagtctggtctgcagaccgggcggccgccggtgtcggaccgcgcgcggccagggatgtttggctgcgtacttgcatgagctttccacccacttgagcccagtcctccgggccgttcctcgcccccacccctgtctggcgtgaccccagcctcagcctctttctaagggacttcctcagcacatttgtatttttatatccgactctttgtttactggctctgctcatggttcctgccctcccctcagtctcggccacgctcttctgcgcctggcagataggatgggtgttgaggctgggatgagacaagcccccgacacggttaccaaccacatggccagtctgcccaggcctgaccccaggaggctttctggcagaccccttctccccaaggtatcatcaccttccaagggcccagatccgattttaccttggacccctgcgtcttgcccctgggaacccaaatggggactgctctgaacctttggatgacatctgtggccccggagatgttctcaacccaggggtgcccttcgtaaatgttcctccatcctcactgtaccaggagtgtgtgaataaacacagaccccctctgtg

SEQ ID NO: 113387 - DNA, 12240 bp, Homo sapiens
  Payload ID: 2166
  Gene Symbol: CAMK4
  Gene Name: calcium/calmodulin-dependent protein kinase IV
  Uniprot ID: Q16566
  ENST ID: ENST00000282356
  CDS Start-End: 399-1820
aagctccagcatccggagccgccctagccggcaccgcggcagccacagcctgggagagagaaaggaaagagggagggcggcgggaaaggctcggcgcgggaggagggcgggtgaggagggaaggagcgagggggagggagcctctctcctcagcggtgcagctagtctccctccagcgggcggcgactccgggttccccctcgcgccctctcgcagaggctcgcccccttccccgcccaccgtccctgcgagcgcgggcggcggcggtgggcgtgtgcgcgcgtgaaggacgccgcctctctctcgctcctgcgttcgcaggcggcggctggcggccggcttctcgctcgggcagcggcggcggcggcggcggcggcttccggagtcccgctgcgaagatgctcaaagtcacggtgccctcctgctccgcctcgtcctgctcttcggtcaccgccagtgcggccccggggaccgcgagcctcgtcccggattactggatcgacggctccaacagggatgcgctgagcgatttcttcgaggtggagtcggagctgggacggggtgctacatccattgtgtacagatgcaaacagaaggggacccagaagccttatgctctcaaagtgttaaagaaaacagtggacaaaaaaatcgtaagaactgagataggagttcttcttcgcctctcacatccaaacattataaaacttaaagagatatttgaaacccctacagaaatcagtctggtcctagaactcgtcacaggaggagaactgtttgataggattgtggaaaagggatattacagtgagcgagatgctgcagatgccgttaaacaaatcctggaggcagttgcttatctacatgaaaatgggattgtccatcgtgatctcaaaccagagaatcttctttatgcaactccagccccagatgcaccactcaaaatcgctgattttggactctctaaaattgtggaacatcaagtgctcatgaagacagtatgtggaaccccagggtactgcgcacctgaaattcttagaggttgtgcctatggacctgaggtggacatgtggtctgtaggaataatcacctacatcttactttgtggatttgaaccattctatgatgaaagaggcgatcagttcatgttcaggagaattctgaattgtgaatattactttatctccccctggtgggatgaagtatctctaaatgccaaggacttggtcagaaaattaattgttttggatccaaagaaacggctgactacatttcaagctctccagcatccgtgggtcacaggtaaagcagccaattttgtacacatggataccgctcaaaagaagctccaagaattcaatgcccggcgtaagcttaaggcagcggtgaaggctgtggtggcctcttcgcgcctgggaagtgccagcagcagccatggcagcatccaggagagccacaaggctagccgagacccttctccaatccaagatggcaacgaggacatgaaagctattccagaaggagagaaaattcaaggcgatggggcccaagccgcagttaagggggcacaggctgagctgatgaaggtgcaagccttagagaaagttaaaggtgcagatataaatgctgaagaggcccccaaaatggtgcccaaggcagtggaggatgggataaaggtggctgacctggaactagaggagggcctagcagaggagaagctgaagactgtggaggaggcagcagctcccagagaagggcaaggaagctctgctgtgggttttgaagttccacagcaagatgtgatcctgccagagtactaaacagcttccttcagatctggaagccaaacaccggcattttatgtactttgtccttcagcaagaaaggtgtggaagcatgatatgtactatagtgattctgtttttgaggtgcaaaaaacatacatatataccagttggtaattctaacttcaatgcatgtgactgctttatgaaaataatagtgtcttctatggcatgtaatggatacctaataccgatgagttaaatcttgcaagttaacacaacgtaacacttaaaagcatacattttcagcaaccagtggcacatatttgaagtgaatagtagcaaattgtttttgctttgaaaatctagccatcctacatcctttggatttcttcacaaggcagtaattcctttgaactactgcttagctaatactaggtagtgctaaaagacatgttcccataacttttacaacattttactttttatcattgatgtgttcaaactgtttacaaggagatgcttatagatgatagttgtacatatgtgcaaaaaaaaatccacttgcaatggtaagaaattgaagtatccttaaaggccatgaagccatatgtccctaaagcctgtgtggagaatgctttattttattcttatttatatacactatattaataataaccaaaatgttctaagattctgccattttacaaccctggaggaagtaatttacaaactcacgctgagttccattctttccttcacctgctctccaataagatgactttctgatagacaaagcttagggtgtaataaacagggaagaaaagaaggtaagactgtacttaaactgatgaagataagattgattccttttcattttccagataaaattgtatttactcatgaatttatacaactttacagataagaacattttaatggataaactctataattaccaagttgcaaatatttagaaaattctatttcacaggttagtgccaaaatgtcttcatagagtaggaataatattccattttaagattattcattattgactttaatagagtaagaaaacattattgtttatcaaagctctttttttatccaattgatggttatctacacatatcacttataaactaaagttatttatgaaaagctagtatgtctttttctcgtatttggaatgaaagtacccacattttacaatgtagtgttgagaatgtggctgccaataaatttagcacaatgcaatttatttaccttaaaaaacaaacaaaaacaaaaataaagaaaaatactgatttcaaatcagactcttaaaaagctggaacattagacctgatattttattatgatttttcccagaataagtttaatttctctttgactttcatagaaacactttccccttatagaaattgcactatctccaatttatttctagtttgagttgaaatgaatattttatcagattaattatgtgtcacatttttggtgggttttctcaattttaaaaaagaattcattttaaaaaataattattttcagagaccaaataaagacaataaaaatgactatcacataaaaatccttgttaaaaaagagatcttaaattatgttggctctccctcaaaactattaaattagaaaacgaaactaaagctccagtttgtagaggctgttggacctcagtagacattcttcttttcaatcacaaatctctctctactactgttctcatgggaagaaaacaaggtaggacttcttatctttcatagtttaagaatctgacaggtcactgatatggagcccctgaagaagcacatcatctgggctcagaagattattttttgttttgttttatttgtactatctagtagagagcacttttcttattccctctttccttccttcctcatttaattattccctctcagaattcccatgttgtccattataaggggctcgctatttttaacctttaagaatgtcttctttgttaagcattaagatttccatttaagaggatcaatttcctgttgtactttttaccatgagactgaaacacacacacacacacacacacacacacacacacacacacacgtgttggaagagcaaagagagggaagggggtctttttagaaagtggcacttggcgcttagctgaaagatcagaacacatcattcctccctgcccacccccatattgttccaagggcagttgttacattatttcaacactagagtagggcggactgcattgtttggccctgagaactatagaaacaacgttgcaaataccatgcccaatgtgtattttagaatttactcatttaaatgagtgcatattaccattcctccatgtgagtactcgagttgataattccctctatctttttaaacccataaactacatttttaaaaaaatcaatgggagttttaaattttgactcatgttaaagataagattctgataatgactatatagtgactaatttcattgtttcagtaggaaacaaatcaaactttcaaaaatgttggtcatttcagtcaaattattcaaagatttcatatacatacatcctaagttaggataattatgttaacatttttgaaagaacagccaatgtttatattgcttgttaaaatggaatgtattgtctatctcaaagattacttagctaaataatagtagacaaatggagatttaatttcacaaaatacttcataacatcactcctaattggcaatatagtcacaaagcaaaagaattcaaatttcagcaaacaataaattacattttacattttagagctaacacttatcacattacattatgggtttttattttgagataagttcagctacatagcataaactaggtttttttttataaccatgaaggacagtcttgaattatttcccccattaacaaagtctaattggaatccagtattttttctcaaactgtaatttcacttgtcccaggacacataaataggtaaaaattagaataatatcgtggtagaagttaattgtccagaacaagtgcattatataaatataatgcaagcacatgtcatttaagattttctattagtcacattttaagaaaaatagatgaaagtatagtatttttaatccaattcatccaaattattctatcgatatatagtcaatattaaaatttaatgtgatattttgaattctttatttttatactgttttcaaaatcaagagtgtatgttaggcctttgggacatcaagtgctcaatagtcacatgtggctagtggctaccatattagacagcactagtctagagtactttttattttaagcaaagtgacacttgaagttctatgcttagatttaagtggcctcagttttcacattgaggagctggtgggaggccacaaagaaagtgtttcagaaatgttacacactgagtaaaagcttattgaccactcctgcccattcatttacttcagaggagaaatgattcctaacatgacttcaaagaacgggcattactaaattatctactgaccaatccctctgattcctgatgggccctggagtcttgactacagcctagagtctcctgagtactgccatgatgccaatagcattcttgcttaccaaaatctactctcagccaactatgtgtcttcattcaggaagaactgcacatagaatctgattttgaggcctggattaagcttcatgccatccttgtatcacaggcaatatgtctttctggaaatctaatgaaccataccaaatctgcatgatgaagattgtgtaatgatggtgatatcatgccagttatcctcaaagtgggaatatgaccattagctggcattttttaagatttccttagaagggtttaatcaacactgccattacacatggatttaacaaaagacttttgaaaattttttacatactgattttagaataatcctcaaggttctatagtcatttttagtggaagacttaaaaagaaaggaacaatttttactgtgacttcaatttcatagtattttaaacatattttgtaattcagaatgtttagcaatccctatgtcctgtttcacatgcatggtaactgatggtgggttgcctacaggctgaagatttggagagagccattttgtttcataaatcagtttttattgcacagaagcagctggttgtatttcaagttggaaaaagaaaagtaaatgccagaaaaggcaaaggataaacttagtaagccatttattttgttttagaattgtttttgcaaagcaaatttttttaaaaaaaggtcaacaaagtgaatcagcactagcattttcttgatggttgactcaatgtataattaacaaatatacatagcagagtcaattaatcatagtgccattatgtcacttatttgtcattgcaaagtattcagtcatgttgtctagatttactttagatggtgcaaaatttccagatagtaacctatgtaaaaggatttgtaatttccttgtaattcctgcctattagtccatattctgatttccttatgttcatcactgatatgttcctgatcagggtcattgctagtagttgagcatttactggttgaacattgtttaatggttagatgttatgtgtgtctgcatttaaaaaaattgtgtacatgttatttcactattggtattacaatattcataaccacatgataaacagaaatgtacccaataatttcctataaaatttttcaaagtccttttattcccctgacacactcagggtgaatttttgtctccttggcaaataagaaaaaaaaggagagagaccactggagagatatcagcaaaccacccacagtaaccaagttcagtatttcctctttctatattttgaccaatatattaagagcaaattttgtcattattactccttgtggctattacctgagatcagataatataatctcagctcataaagcttggccatgtctatacttatcttggagagcaataacaaacttgattaatttgtttggttatttaaaattccaactttcataaatgctctgtgatgtactcaagacgattgggttgtgtgatactaacttccttcaagaactcagtctgttccctgttgtctggttcagaggtccaccagggcaaaatagaagccttgccgagaaagtgaactgtcttactccttcaaaggaatcagatgttgctctagagaagactccaggcatctacctggttgagctcaaatgaggcaagtgggagaaaacctcttctcatcctctgattgaaagtgatacaatttgaatattggtatattgtcattggtcagtaatggaaaaatgagattccaccagtgggttactcttttcttgtcttggtttgctatgccttatcccagatcagtgttttgttccatccctatggtcatctctaaagccctgacaggagcatcccagactggagaaatgcagcgtatctgtggcccagaattttgtttgatactctaaacagcaatgcaaagactgcaaaatcacactattctaaacagttgttttcagctcattttgaagattgacctggaaaacatatagatacagaatatatacatttaatcgttgcttgtgattcattgtgtcaaaataacatttaattttcactctgattaatctttattttccatttaaaagattatttcaggctacttaaatacaagaccttgcattctaatttttgaaagcggttgttttccctgagctctctctcaactttgacagtttgtgaatgataaaaagttactaggtttgtcctttccttgatagatgtagagcagttcatctgttttgtaaaggtacagttaagcataactataggctgggcgtgatagttcatgcctgtaatcccaacactttgggaggccgaggttggcagatcacctgaggtcaggagtttgagaccagcctggccaacgtggtgaaacccctaatacaaaaattagctgggcatggtggcacgctcctgtaatctcagctactcaggaggctgaggcaggagaatctcttgaacccgggaggcagaggttgcagtgagccaagatcatgccactgcactccagcctggacaacaagagcgaaactccgtcaaaaaaaaatatatatatatgaccataaattgaaaactatcatctcatactgcctccttttaacctgacctattttatatacctacaatacagttaatatgcagcagcgtagagaacaaatagcatattcataatttgtaattttgtttttctttttacggcacccttaagtctcagtaatattttaaaagtcctctataagccaaaagaacgttgtaacatatccatttattaaggagttaggcctaaacatagtaatagtagtccattccatgtccaacagatgttgctgtgtttctttcaacatttttcaatgtcttgtgagtttagtgagtgggtacagctgagttggggtttaggtgatttcttatgcccaatgaactaaaggtatcagtaaaagattattagtaaacaaattagttatttatgctcttacttgaatgtcagtcattcattttatctctcgtctttgagatacacacattaaaacttatgtgcatatttttttaaagagtaatttccacataattccccaagaactgaactcaaatctccaaaaatttttcagaactcaagcaaccaatgattcacagagcaaatctaccaaagccccatttttattggaacacaggcatgctcatttatgtacatattgtttgtggctgcttttatgttgtcaaggcagagttgagtactttcaacagagaccatatggactgcaaagcctaaaatgtgtatctggacccttacagtaaaacaatgaccctgggttttcatggcaccccaatgcctttttggtgacttgcaggaatacagattcctatattccagtttgtttttttttttttctccttagcttaaggttcgtattcccatttgcttctgagaaagttaggaaaattttgttttatgttgcagatgctctcacaacaataattgtgctggagatagatacaacttagtgaaattttcctacagaactaaaaacgcaaaattgcatcactcctgaagaaaagaaatttagagtatgaattgagttggttgagagtagaattaaaaagatttctagcactttgagcatgttttagaaatttgatccttacatttaaaattatgtaaatgacatctttcactggcatttgctcacatttaagtcaatctacagctgttacttactaagctaagaaataagaagatccctatggttctgaatctctcataatattctgaagtaatttatatcaattgaattttcattaatcattttaggaaatattatgttttattttgtggcattatatgacaatgactttctcaacaatagctcagggaatacgcaaacagccagctcttttatgtaagaaagccattttctaatccccacgctttcctgagtgttacgtattttatttctttgaaaagagagggccttgagtaaatgctttcgtttgctttccttacatatttagaaatccaagaagggcccttgtcttagtctatttctgtcacagagaaattgttcattccaaaatatccaccttaagggaagctagtgaccgagatatggagaaaaacataggcattcatgacctttgtgtttccgtttgactttcaacatctgtaaccaaaaggtcacaaatgaaatatttagtagaaagtgcaatatcaatttattaggagtacctaaaattataactctaaataatatacagcaatattattgctctattattacagcaatcaataatataatatagccactaggatacactcgctgtagaactcagaacaaaagatatcaatcttctgccagtccgcatcattatgtgtagcagagactttactggaatgagtgaggggaaagataacaaaatgtagattaggattccacattctcccctgcccatcttcttgattgctcagtttgaagacgatcattgatggacaaatactttagaaatgaatgaagtcaatagctaatgtttctcccagaaactaaacaacatagtttaggggatattaggcctacattctaatcacattgtaaggaagtgattttctaattttgaagcttcccaggagcagccccctccaggaacaattttccctgtgaactttcactgagaaactattatatgccatggaggagtcaaagatgaattaaatccaatgctatcctccaggagtgagctttgtagttggagagaaaagccaaccttatagatacaacctgtacatatataacctatgctgcatttaggcagatgataagccctaggaatggaaagagggaaaagctcccttttgccaggaatgatgaaggaaagctttatggaaacacaggctgtatgtgaaagatgggtgaatctttgcaggtagggaagaagtagggggcatgtctggctgagaaccggcctgatcatagagtggaaaaatgaaaggcagaggtgaaggaagaatactaaatgtgaaaggctgaaatacacagggaagtgttgccagtgtgcaacagaatctcatctcgtgcaaaattgaattagacttccttactccttccttactctgggtaggtccatgtgcagcctttcctcagagcatctagcctgacatacttggctcatctgctgtgcttctaagccaaataaaaatcatcaaacacatcgaagatatttttgggagtcaccaggttaaagcaaagcctcagtcactgaaagcaaaaactgaattggccaggtctccactgacaaaacagagtaaatgatagtatgacagataatttcaagttttccaagactccaatttctgaaaaatgtctcatgactccaaaaaatcacgtacttcctaaaatgttgccagtggaggaccgaatcaaggttattgctgacctcattttttcaaccttttcagttatttgacctgaataggcaatcccccaggatttctgattgaattctacctgaaagtttagattttaaaagacaacctgtaggaagctaagtctcaggcaacaaaatttaaaaccatcagaacttgtttctccaaacatcaacctgctcctgtcaagtcctttttcatctctcccttttgtccctttacatactgttttgtaagttccttttgatatcatttattgcaggcagtatttttacatccatcttcaagaaacttgggagacatttagacatttagtatgtgtacttttagttgtcttgcctctttatttcagataatgcctgtgattagtgaatggcggcattattcctgaagacaaatgaaggaagatagggagcaagattgactgtcatttgaatgatggaagagaagtagaattactgtgaggttacaaaaatcgtaagttagcagacattgagaaaggaaaacttcctacttgggcttttcaggcttatgtgacattatctggatgtgttttctagtctttcctaaaggagaaatttttattcctgggttgctgaaagctttctggactaaaaggatataagcagctcaatagcagcatagaggattagattaatggaacagcactgcatacaggaaagctacatctccaatagtttaggctgcaagtcagtagccaaacacaagagcatgtaagatttggaggacaaagtataaatattttaagtttacacaaccaagattataggctaccttcccaacttctaatttgaagagcactgaaaatggagctgtgaacacttcatttttaaaacctgacaatatggtgctattgactacttaatacaaagatatattacaatatttttaggtaaatgtattaagtctggcctgggcataaatgtacatacagaaaatgtttgtagagaattcatcaaaatcatgcccatttgctgttgtagagctacagtattcttcaatggtggtgactgaccagtgagtttctacttcttacagatgggacacaacagtcatgggctgtctcagctgcccaaagcctgaggcagaccacatgagagctgtggcttcttcttggattcaggttggataacccaattcagtaattaaatatgtaaattttggggggggttggggggtgttttctaggaacttgaagagtacgtgacattataaaaaatgggtgttggaagactaattgtagaaatttgacctgagggccaatgttacttggtgtaagttcactcagacagacatgtcagaacatgcccaaagaagcctatatcttgctgctgggaaatgtaaagcagttggcatgtagaatacgataataaatcatttaagaaaccaccaaaa

SEQ ID NO: 113388 - DNA, 852 bp, Homo sapiens
  Payload ID: 2166
  Gene Symbol: CAMK4
  Gene Name: calcium/calmodulin-dependent protein kinase IV
  ENST ID: ENST00000514007
  CDS Start-End: 76-405
ggcggctggcggccggcttctcgctcgggcagcggcggcggcggcggcggcggcttccggagtcccgctgcgaagatgctcaaagtcacggtgccctcctgctccgcctcgtcctgctcttcggtcaccgccagtgcggccccggggaccgcgagcctcgtcccggattactggatcgacggctccaacagggatgcgctgagcgatttcttcgaggtggagtcggagctgggacggggtgctacatccattgtgtacagatgcaaacagaaggggacccagaagccttatgctctcaaagtgttaaagaaaacagtggacaaaaaaatcgtaagaactgagataggagttcttcttcgcctctcacatccaaacattgattgtggaaaagggatattacagtgagcgagatgctgcagatgccgttaaacaaatcctggaggcagttgcttatctacatgaaaatgggattgtccatcgtgatctcaaaccagagaatcttctttatgcaactccagccccagatgcaccactcaaaatcgctgattttggactctctaaaattgtggaacatcaagtgctcatgaagacagtatgtggaaccccagggtactgcgcacctgaaattcttagaggttgtgcctatggacctgaggtggacatgtggtctgtaggaataatcacctacatcttactttgtggatttgaaccattctatgatgaaagaggcgatcagttcatgttcaggagaattctgaattgtgaatattactttatctccccctggtgggatgaagtatctctaaatgccaaggacttggtcagaaaattaattgttttggatccaaagaa

SEQ ID NO: 113389 - DNA, 1640 bp, Homo sapiens
  Payload ID: 2166
  Gene Symbol: CAMK4
  Gene Name: calcium/calmodulin-dependent protein kinase IV
  Uniprot ID: Q16566
  ENST ID: ENST00000512453
  CDS Start-End: 100-1521
cccggacccaggtgctgccagggcggcggctggcggccggcttctcgctcgggcagcggcggcggcggcggcggcggcttccggagtcccgctgcgaagatgctcaaagtcacggtgccctcctgctccgcctcgtcctgctcttcggtcaccgccagtgcggccccggggaccgcgagcctcgtcccggattactggatcgacggctccaacagggatgcgctgagcgatttcttcgaggtggagtcggagctgggacggggtgctacatccattgtgtacagatgcaaacagaaggggacccagaagccttatgctctcaaagtgttaaagaaaacagtggacaaaaaaatcgtaagaactgagataggagttcttcttcgcctctcacatccaaacattataaaacttaaagagatatttgaaacccctacagaaatcagtctggtcctagaactcgtcacaggaggagaactgtttgataggattgtggaaaagggatattacagtgagcgagatgctgcagatgccgttaaacaaatcctggaggcagttgcttatctacatgaaaatgggattgtccatcgtgatctcaaaccagagaatcttctttatgcaactccagccccagatgcaccactcaaaatcgctgattttggactctctaaaattgtggaacatcaagtgctcatgaagacagtatgtggaaccccagggtactgcgcacctgaaattcttagaggttgtgcctatggacctgaggtggacatgtggtctgtaggaataatcacctacatcttactttgtggatttgaaccattctatgatgaaagaggcgatcagttcatgttcaggagaattctgaattgtgaatattactttatctccccctggtgggatgaagtatctctaaatgccaaggacttggtcagaaaattaattgttttggatccaaagaaacggctgactacatttcaagctctccagcatccgtgggtcacaggtaaagcagccaattttgtacacatggataccgctcaaaagaagctccaagaattcaatgcccggcgtaagcttaaggcagcggtgaaggctgtggtggcctcttcgcgcctgggaagtgccagcagcagccatggcagcatccaggagagccacaaggctagccgagacccttctccaatccaagatggcaacgaggacatgaaagctattccagaaggagagaaaattcaaggcgatggggcccaagccgcagttaagggggcacaggctgagctgatgaaggtgcaagccttagagaaagttaaaggtgcagatataaatgctgaagaggcccccaaaatggtgcccaaggcagtggaggatgggataaaggtggctgacctggaactagaggagggcctagcagaggagaagctgaagactgtggaggaggcagcagctcccagagaagggcaaggaagctctgctgtgggttttgaagttccacagcaagatgtgatcctgccagagtactaaacagcttccttcagatctggaagccaaacaccggcattttatgtactttgtccttcagcaagaaaggtgtggaagcatgatatgtactatagtgattctgtttttgaggtgcaaaaaac

SEQ ID NO: 113390 - DNA, 571 bp, Homo sapiens
  Payload ID: 2166
  Gene Symbol: CAMK4
  Gene Name: calcium/calmodulin-dependent protein kinase IV
  ENST ID: ENST00000504544
  CDS Start-End: 103-369
ctctctctcgctcctgcgttcgcaggcggcggctggcggccggcttctcgctcgggcagcggcggcggcggcggcggcggcttccggagtcccgctgcgaagatgctcaaagtcacggtgccctcctgctccgcctcgtcctgctcttcggtcaccgccagtgcggccccggggaccgcgagcctcgtcccggattactggatcgacggctccaacagggatgcgctgagcgatttcttcgaggtggagtcggagctgggacggggtgctacatccattgtgtacagatgcaaacagaaggggacccagaagccttatgctctcaaagtgttaaagaaaacagattgtggaaaagggatattacagtgagcgagatgctgcagatgccgttaaacaaatcctggaggcagttgcttatctacatgaaaatgggattgtccatcgtgatctcaaaccagagaatcttctttatgcaactccagccccagatgcaccactcaaaatcgctgattttggactctctaaaattgtggaacatcaagtgctcatgaagacagtatgtggaacccca

SEQ ID NO: 113391 - DNA, 1678 bp, Homo sapiens
  Payload ID: 2166
  Gene Symbol: CAMK4
  Gene Name: calcium/calmodulin-dependent protein kinase IV
  ENST ID: ENST00000515231
  CDS Start-End: 103-369
ctctctctcgctcctgcgttcgcaggcggcggctggcggccggcttctcgctcgggcagcggcggcggcggcggcggcggcttccggagtcccgctgcgaagatgctcaaagtcacggtgccctcctgctccgcctcgtcctgctcttcggtcaccgccagtgcggccccggggaccgcgagcctcgtcccggattactggatcgacggctccaacagggatgcgctgagcgatttcttcgaggtggagtcggagctgggacggggtgctacatccattgtgtacagatgcaaacagaaggggacccagaagccttatgctctcaaagtgttaaagaaaacagattgtggaaaagggatattacagtgagcgagatgctgcagatgccgttaaacaaatcctggaggcagttgcttatctacatgaaaatgggattgtccatcgtgatctcaaaccagagaatcttctttatgcaactccagccccagatgcaccactcaaaatcgctgattttggactctctaaaattgtggaacatcaagtgctcatgaagacagtatgtggaaccccagggtactgcgcacctgaaattcttagaggttgtgcctatggacctgaggtggacatgtggtctgtaggaataatcacctacatcttactttgtggatttgaaccattctatgatgaaagaggcgatcagttcatgttcaggagaattctgaattgtgaatattactttatctccccctggtgggatgaagtatctctaaatgccaaggacttggtcagaaaattaattgttttggatccaaagaaacggctgactacatttcaagctctccagcatccgtgggtcacaggtaaagcagccaattttgtacacatggataccgctcaaaagaagctccaagaattcaatgcccggcgtaagcttaaggcagcggtgaaggctgtggtggcctcttcgcgcctgggaagtgccagcagcagccatggcagcatccaggagagccacaaggctagccgagacccttctccaatccaagatggcaacgaggacatgaaagctattccagaaggagagaaaattcaaggcgatggggcccaagccgcagttaagggggcacaggctgagctgatgaaggtgcaagccttagagaaagttaaaggtgcagatataaatgctgaagaggcccccaaaatggtgcccaaggcagtggaggatgggataaaggtggctgacctggaactagaggagggcctagcagaggagaagctgaagactgtggaggaggcagcagctcccagagaagggcaaggaagctctgctgtgggttttgaagttccacagcaagatgtgatcctgccagagtactaaacagcttccttcagatctggaagccaaacaccggcattttatgtactttgtccttcagcaagaaaggtgtggaagcatgatatgtactatagtgattctgtttttgaggtgcaaaaaacatacatatataccagttggtaattctaacttcaatgcatgtgactgctttatgaaaataatagtgtcttctatggcatgtaatggatacctaataccgatgagttaaatcttgcaagttaacacaacgtaacacttaaaagcatacattttcagcaaccagtggcacatatttgaagtgaa

SEQ ID NO: 113392 - DNA, 557 bp, Homo sapiens
  Payload ID: 2166
  Gene Symbol: CAMK4
  Gene Name: calcium/calmodulin-dependent protein kinase IV
  ENST ID: ENST00000508074
  CDS Start-End: 132-557
agtgccaccagcagcgacgacagcatttattccaactgaagacttcactcaaaggcggcggctggcggccggcttctcgctcgggcagcggcggcggcggcggcggcggcttccggagtcccgctgcgaagatgctcaaagtcacggtgccctcctgctccgcctcgtcctgctcttcggtcaccgccagtgcggccccggggaccgcgagcctcgtcccggattactggatcgacggctccaacagggatgcgctgagcgatttcttcgaggtggagtcggagctgggacggggtgctacatccattgtgtacagatgcaaacagaaggggacccagaagccttatgctctcaaagtgttaaagaaaacagtggacaaaaaaatcgtaagaactgagataggagttcttcttcgcctctcacatccaaacattataaaacttaaagagatatttgaaacccctacagaaatcagtctggtcctagaactcgtcacaggaggagaactgtttgataggattgtggaaaagggatattacagtgagcgagatgctgca

SEQ ID NO: 113393 - DNA, 2459 bp, Homo sapiens
  Payload ID: 2167
  Gene Symbol: CAMKK1
  Gene Name: calcium/calmodulin-dependent protein kinase kinase 1, alpha
  Uniprot ID: Q8N5S9
  ENST ID: ENST00000158166
  CDS Start-End: 150-1712
tctgggccccagcgaggcggtggggcggggcggggcggggcggggcgcgcagcaggagcgagtggggccgcccgccgggccgcggacactgtcgcccggcgcccaggttcccaacaaggctacgcagaagaacccccttgactgaagcaatggaggggggtccagctgtctgctgccaggatcctcgggcagagctggtagaacgggtggcagccatcgatgtgactcacttggaggaggcagatggtggcccagagcctactagaaacggtgtggaccccccaccacgggccagagctgcctctgtgatccctggcagtacttcaagactgctcccagcccggcctagcctctcagccaggaagctttccctacaggagcggccagcaggaagctatctggaggcgcaggctgggccttatgccacggggcctgccagccacatctccccccgggcctggcggaggcccaccatcgagtcccaccacgtggccatctcagatgcagaggactgcgtgcagctgaaccagtacaagctgcagagtgagattggcaagggtgcctacggtgtggtgaggctggcctacaacgaaagtgaagacagacactatgcaatgaaagtcctttccaaaaagaagttactgaagcagtatggctttccacgtcgccctcccccgagagggtcccaggctgcccagggaggaccagccaagcagctgctgcccctggagcgggtgtaccaggagattgccatcctgaagaagctggaccacgtgaatgtggtcaaactgatcgaggtcctggatgacccagctgaggacaacctctatttggccctgcagaaccaggcccagaatatccagttagattcaacaaatatcgccaagccccactccctgcttccctctgagcagcaagacagtggatccacgtgggctgcgcgctcagtgtttgacctcctgagaaaggggcccgtcatggaagtgccctgtgacaagcccttctcggaggagcaagctcgcctctacctgcgggacgtcatcctgggcctcgagtacttgcactgccagaagatcgtccacagggacatcaagccatccaacctgctcctgggggatgatgggcacgtgaagatcgccgactttggcgtcagcaaccagtttgaggggaacgacgctcagctgtccagcacggcgggaaccccagcattcatggcccccgaggccatttctgattccggccagagcttcagtgggaaggccttggatgtatgggccactggcgtcacgttgtactgctttgtctatgggaagtgcccattcatcgacgatttcatcctggccctccacaggaagatcaagaatgagcccgtggtgtttcctgaggagccagaaatcagcgaggagctcaaggacctgatcctgaagatgttagacaagaatcccgagacgagaattggggtgccagacatcaagttgcacccttgggtgaccaagaacggggaggagccccttccttcggaggaggagcactgcagcgtggtggaggtgacagaggaggaggttaagaactcagtcaggctcatccccagctggaccacggtgatcctggtgaagtccatgctgaggaagcgttcctttgggaacccgtttgagccccaagcacggagggaagagcgatccatgtctgctccaggaaacctactggtgtaagtactggtgggccagggactgccgggcactccctggagttgggtggggaggtctgaggcccatcctcccactctcactgtcgttgggccaaggccagagcctggggacttggccaggtctcggtgttggccccatttgcatctctgtccccaaggttagtcggggctagaagggaccttttgggcccagctcttgcttcattcctggggccagcatccctcacacacacacttccagggatgaggagctcacgcagcccctccatgggacaggaagacccttcttccatgcagcttgatgtcactctctcactgggtccagcccctctggggcttcaaatctgtggccccctcagcccttggcagcctggcagaggtttgcagacaggctgatgttggcttcctgtaggaggctggcgggctgtagaggaggggtgctggcccctctgcctggccctggggactgttggctgctctcccaagtggcccaggctgcctgcagccattgctggggctctgtgcccagtcagcactttgtgagtgcttgttcagtgagtaagcagggacaggctggccggtggaccacgggagaggaacccgcattggccgagggctccctatggtgagccacgcctgtgggttcaccacctcctaggagggtccagaaaagcagctccccaagcctgtgcgcctcgtcctcagcagatccaccttcttcactataataaaagccagtctgggatgctaa

SEQ ID NO: 113394 - DNA, 3563 bp, Homo sapiens
  Payload ID: 2167
  Gene Symbol: CAMKK1
  Gene Name: calcium/calmodulin-dependent protein kinase kinase 1, alpha
  Uniprot ID: Q8N5S9
  ENST ID: ENST00000348335
  CDS Start-End: 150-1667
tctgggccccagcgaggcggtggggcggggcggggcggggcggggcgcgcagcaggagcgagtggggccgcccgccgggccgcggacactgtcgcccggcgcccaggttcccaacaaggctacgcagaagaacccccttgactgaagcaatggaggggggtccagctgtctgctgccaggatcctcgggcagagctggtagaacgggtggcagccatcgatgtgactcacttggaggaggcagatggtggcccagagcctactagaaacggtgtggaccccccaccacgggccagagctgcctctgtgatccctggcagtacttcaagactgctcccagcccggcctagcctctcagccaggaagctttccctacaggagcggccagcaggaagctatctggaggcgcaggctgggccttatgccacggggcctgccagccacatctccccccgggcctggcggaggcccaccatcgagtcccaccacgtggccatctcagatgcagaggactgcgtgcagctgaaccagtacaagctgcagagtgagattggcaagggtgcctacggtgtggtgaggctggcctacaacgaaagtgaagacagacactatgcaatgaaagtcctttccaaaaagaagttactgaagcagtatggctttccacgtcgccctcccccgagagggtcccaggctgcccagggaggaccagccaagcagctgctgcccctggagcgggtgtaccaggagattgccatcctgaagaagctggaccacgtgaatgtggtcaaactgatcgaggtcctggatgacccagctgaggacaacctctatttggtgtttgacctcctgagaaaggggcccgtcatggaagtgccctgtgacaagcccttctcggaggagcaagctcgcctctacctgcgggacgtcatcctgggcctcgagtacttgcactgccagaagatcgtccacagggacatcaagccatccaacctgctcctgggggatgatgggcacgtgaagatcgccgactttggcgtcagcaaccagtttgaggggaacgacgctcagctgtccagcacggcgggaaccccagcattcatggcccccgaggccatttctgattccggccagagcttcagtgggaaggccttggatgtatgggccactggcgtcacgttgtactgctttgtctatgggaagtgcccattcatcgacgatttcatcctggccctccacaggaagatcaagaatgagcccgtggtgtttcctgaggagccagaaatcagcgaggagctcaaggacctgatcctgaagatgttagacaagaatcccgagacgagaattggggtgccagacatcaagttgcacccttgggtgaccaagaacggggaggagccccttccttcggaggaggagcactgcagcgtggtggaggtgacagaggaggaggttaagaactcagtcaggctcatccccagctggaccacggtgatcctggtgaagtccatgctgaggaagcgttcctttgggaacccgtttgagccccaagcacggagggaagagcgatccatgtctgctccaggaaacctactggtgaaagaagggtttggtgaagggggcaagagcccagagctccccggcgtccaggaagacgaggctgcatcctgagcccctgcatgcacccagggccacccggcagcacactcatcccgcgcctccagaggcccacccctcatgcaacagccgcccccgcaggcagggggctggggactgcagccccactcccgcccctcccccatcgtgctgcatgacctccacgcacgcacgtccagggacagactggaatgtatgtcatttggggtcttgggggcagggctcccacgaggccatcctcctcttcttggacctccttggcctgacccattctgtggggaaaccgggtgcccatggagcctcagaaatgccacccggctggttggcatggcctggggcaggaggcagaggcaggagaccaagatggcaggtggaggccaggcttaccacaacggaagagacctcccgctggggccgggcaggcctggctcagctgccacaggcatatggtggagaggggggtaccctgcccaccttggggtggtggcaccagagctcttgtctattcagacgctggtatgggggctcggacccctcactggggacagggccagtgttggagaattctgattccttttttgttgtcttttacttttgtttttaacctgggggttcggggagaggccctgcttgggaacatctcacgagctttcctacatcttccgtggttcccagcacagcccaagattatttggcagccaagtggatggaactaactttcctggactgtgtttcgcattcggcgttatctggaaagtggactgaacggaatcaagctctgagcagaggcctgaagcggaagcaccacatcgtccctgcccatctcactctctcccttgatgatgcccctagagctgaggctggagaagacaccagggctgactttgaccgagggccatggacgcgacaggcctgtggccctgcgcatgctgaaataactggaacccagcctctcctcctacaccggcctacccatctgggcccaagagctgcactcacactcctacaacgaaggacaaactgtccaggtcggagggatcacgagacacagaacctggaggggtgtgcacgctggcaggtggcctctgcggcaattgcctcaccctgaggacatcagcagtcagcctgctcagagcgggggtgctggagcgcgtgcagacacagctcttccggagcagccttcaccttctctctgggatcagtgtccggctggccgacgtggcatttgctgaccgaatgctcatagaggttgacccccacagggtcacgcaggactcggacactgccctggaaacatggatggacaagggcttttggccacaggtgtgggtgtcctgttggaggagggcttgtttggagaagggaggctggctgggggagaaacccggatcccgctgcatctccgcgcctgtgggtgcatgtcgcgtgctcatctgttgcacacagctcactcgtatgtcctgcactggtacatgcatctgtaatacagtttctacgtctatttaaggctaggagccgaatgtgccccattgtcagtgggtccacgtttctccccggctcctctgggctaaggcagtgtggcccgaagcttaaaaagttactcggtactgtttttaagaacacttttatagagttagtggaaggcaagttaagagccaatcactgatccccaagtgtttcttgagcatctggtctggggggaccactttgatcggacccacccttggaaagctcaggggtaggcccaggtgggatgctcaccctgtcactgagggttttggttggcatcgttgtttttgaatgtagcacaagcgatgagcaaactctataagagtgttttaaaaattaacttcccaggaagtgagttaaaaacaataaaagccctttcttgagttaaaaagaaaaaaaaaa

SEQ ID NO: 113395 - DNA, 3508 bp, Homo sapiens
  Payload ID: 2167
  Gene Symbol: CAMKK1
  Gene Name: calcium/calmodulin-dependent protein kinase kinase 1, alpha
  ENST ID: ENST00000381769
  CDS Start-End: 14-1612
agcagaacagagtatgcaatttgggaagctgtggtgtggctgcagtggagagttcccaacaaggctacgcagaagaacccccttgactgaagcaatggaggggggtccagctgtctgctgccaggatcctcgggcagagctggtagaacgggtggcagccatcgatgtgactcacttggaggaggcagatggtggcccagagcctactagaaacggtgtggaccccccaccacgggccagagctgcctctgtgatccctggcagtacttcaagactgctcccagcccggcctagcctctcagccaggaagctttccctacaggagcggccagcaggaagctatctggaggcgcaggctgggccttatgccacggggcctgccagccacatctccccccgggcctggcggaggcccaccatcgagtcccaccacgtggccatctcagatgcagaggactgcgtgcagctgaaccagtacaagctgcagagtgagattggcaagggtgcctacggtgtggtgaggctggcctacaacgaaagtgaagacagacactatgcaatgaaagtcctttccaaaaagaagttactgaagcagtatggctttccacgtcgccctcccccgagagggtcccaggctgcccagggaggaccagccaagcagctgctgcccctggagcgggtgtaccaggagattgccatcctgaagaagctggaccacgtgaatgtggtcaaactgatcgaggtcctggatgacccagctgaggacaacctctatttggtgtttgacctcctgagaaaggggcccgtcatggaagtgccctgtgacaagcccttctcggaggagcaagctcgcctctacctgcgggacgtcatcctgggcctcgagtacttgcactgccagaagatcgtccacagggacatcaagccatccaacctgctcctgggggatgatgggcacgtgaagatcgccgactttggcgtcagcaaccagtttgaggggaacgacgctcagctgtccagcacggcgggaaccccagcattcatggcccccgaggccatttctgattccggccagagcttcagtgggaaggccttggatgtatgggccactggcgtcacgttgtactgctttgtctatgggaagtgcccattcatcgacgatttcatcctggccctccacaggaagatcaagaatgagcccgtggtgtttcctgaggagccagaaatcagcgaggagctcaaggacctgatcctgaagatgttagacaagaatcccgagacgagaattggggtgccagacatcaagttgcacccttgggtgaccaagaacggggaggagccccttccttcggaggaggagcactgcagcgtggtggaggtgacagaggaggaggttaagaactcagtcaggctcatccccagctggaccacggtgatcctggtgaagtccatgctgaggaagcgttcctttgggaacccgtttgagccccaagcacggagggaagagcgatccatgtctgctccaggaaacctactggtgaaagaagggtttggtgaagggggcaagagcccagagctccccggcgtccaggaagacgaggctgcatcctgagcccctgcatgcacccagggccacccggcagcacactcatcccgcgcctccagaggcccacccctcatgcaacagccgcccccgcaggcagggggctggggactgcagccccactcccgcccctcccccatcgtgctgcatgacctccacgcacgcacgtccagggacagactggaatgtatgtcatttggggtcttgggggcagggctcccacgaggccatcctcctcttcttggacctccttggcctgacccattctgtggggaaaccgggtgcccatggagcctcagaaatgccacccggctggttggcatggcctggggcaggaggcagaggcaggagaccaagatggcaggtggaggccaggcttaccacaacggaagagacctcccgctggggccgggcaggcctggctcagctgccacaggcatatggtggagaggggggtaccctgcccaccttggggtggtggcaccagagctcttgtctattcagacgctggtatgggggctcggacccctcactggggacagggccagtgttggagaattctgattccttttttgttgtcttttacttttgtttttaacctgggggttcggggagaggccctgcttgggaacatctcacgagctttcctacatcttccgtggttcccagcacagcccaagattatttggcagccaagtggatggaactaactttcctggactgtgtttcgcattcggcgttatctggaaagtggactgaacggaatcaagctctgagcagaggcctgaagcggaagcaccacatcgtccctgcccatctcactctctcccttgatgatgcccctagagctgaggctggagaagacaccagggctgactttgaccgagggccatggacgcgacaggcctgtggccctgcgcatgctgaaataactggaacccagcctctcctcctacaccggcctacccatctgggcccaagagctgcactcacactcctacaacgaaggacaaactgtccaggtcggagggatcacgagacacagaacctggaggggtgtgcacgctggcaggtggcctctgcggcaattgcctcaccctgaggacatcagcagtcagcctgctcagagcgggggtgctggagcgcgtgcagacacagctcttccggagcagccttcaccttctctctgggatcagtgtccggctggccgacgtggcatttgctgaccgaatgctcatagaggttgacccccacagggtcacgcaggactcggacactgccctggaaacatggatggacaagggcttttggccacaggtgtgggtgtcctgttggaggagggcttgtttggagaagggaggctggctgggggagaaacccggatcccgctgcatctccgcgcctgtgggtgcatgtcgcgtgctcatctgttgcacacagctcactcgtatgtcctgcactggtacatgcatctgtaatacagtttctacgtctatttaaggctaggagccgaatgtgccccattgtcagtgggtccacgtttctccccggctcctctgggctaaggcagtgtggcccgaagcttaaaaagttactcggtactgtttttaagaacacttttatagagttagtggaaggcaagttaagagccaatcactgatccccaagtgtttcttgagcatctggtctggggggaccactttgatcggacccacccttggaaagctcaggggtaggcccaggtgggatgctcaccctgtcactgagggttttggttggcatcgttgtttttgaatgtagcacaagcgatgagcaaactctataagagtgttttaaaaattaacttcccaggaagtgagttaaaaacaataaaagccctttcttgagttaaaaagaaaaaaaaaa

SEQ ID NO: 113396 - DNA, 5598 bp, Homo sapiens
  Payload ID: 2168
  Gene Symbol: CAMKK2
  Gene Name: calcium/calmodulin-dependent protein kinase kinase 2, beta
  Uniprot ID: Q96RR4
  ENST ID: ENST00000324774
  CDS Start-End: 830-2596
gagcctggggaggtcgagggtgcagcgagccgtgatcgtgctactgcactccagcctgggcaacacagagagaccctgtctcaaaacaaacaaacaaacaaacaaacaaacaaacaaaaaaaacaaagaaaaaaaaatgggagtgggccgggcgcggtgactcacacctgtaatcccagcactttcggaggccaaggcgggtggatcacgaggtcaggaattcaagattagcctggacaacatggtgaaaccccatctctacgaaaaatacaaaaattagccaagtatggtggccggcgcctgtaatcccagctactcgggagactgaggcagagaactgcttgaacctgggaggcagaggttgcagtgatccgagatcgcgtcactgcactccagcgtgggcgacagagcgagactccgtttcagaaaagaaaaaaaaaaaaaaaaaaaagggagtcggggtggagctctcattggctcgttgcatgtgagtgtccctacggcctagaaatacaagagaagcacatcggaacgggctggaaatccacccagttaactagagggctttgaaccttttattaacttggaggttgactctcctgtcaactcgattcccttttggctgtttggcagggtcagtgagacatcccctgggtcgctcgaccccgtaggacggttcagggagccctccaggtcttcgtttctcctcttccccgcacagtgctgttatccagctgggggatccaacgcacacttaaggctccagcaaagtggctccgctgccggatgggagtgccccagtgtgctggatgaagctggcgcatgcaccatgtcatcatgtgtctctagccagcccagcagcaaccgggccgccccccaggatgagctggggggcaggggcagcagcagcagcgaaagccagaagccctgtgaggccctgcggggcctctcatccttgagcatccacctgggcatggagtccttcattgtggtcaccgagtgtgagccgggctgtgctgtggacctcggcttggcgcgggaccggcccctggaggccgatggccaagaggtcccccttgacacctccgggtcccaggcccggccccacctctccggtcgcaagctgtctctgcaagagcggtcccagggtgggctggcagccggtggcagcctggacatgaacggacgctgcatctgcccgtccctgccctactcacccgtcagctccccgcagtcctcgcctcggctgccccggcggccgacagtggagtctcaccacgtctccatcacgggtatgcaggactgtgtgcagctgaatcagtataccctgaaggatgaaattggaaagggctcctatggtgtcgtcaagttggcctacaatgaaaatgacaatacctactatgcaatgaaggtgctgtccaaaaagaagctgatccggcaggccggctttccacgtcgccctccaccccgaggcacccggccagctcctggaggctgcatccagcccaggggccccattgagcaggtgtaccaggaaattgccatcctcaagaagctggaccaccccaatgtggtgaagctggtggaggtcctggatgaccccaatgaggaccatctgtacatggtgttcgaactggtcaaccaagggcccgtgatggaagtgcccaccctcaaaccactctctgaagaccaggcccgtttctacttccaggatctgatcaaaggcatcgagtacttacactaccagaagatcatccaccgtgacatcaaaccttccaacctcctggtcggagaagatgggcacatcaagatcgctgactttggtgtgagcaatgaattcaagggcagtgacgcgctcctctccaacaccgtgggcacgcccgccttcatggcacccgagtcgctctctgagacccgcaagatcttctctgggaaggccttggatgtttgggccatgggtgtgacactatactgctttgtctttggccagtgcccattcatggacgagcggatcatgtgtttacacagtaagatcaagagtcaggccctggaatttccagaccagcccgacatagctgaggacttgaaggacctgatcacccgtatgctggacaagaaccccgagtcgaggatcgtggtgccggaaatcaagctgcacccctgggtcacgaggcatggggcggagccgttgccgtcggaggatgagaactgcacgctggtcgaagtgactgaagaggaggtcgagaactcagtcaaacacattcccagcttggcaaccgtgatcctggtgaagaccatgatacgtaaacgctcctttgggaacccattcgagggcagccggcgggaggaacgctcactgtcagcgcctggaaacttgctcaccaaaaaaccaaccagggaatgtgagtccctgtctgagctcaaggaagcaaggcagcgaagacaacctccagggcaccgacccgccccccgtgggggaggaggaagtgctcttgtgagaggcagtccctgcgtggaaagttgctgggcccccgcccccggctcccccgcacgcatgcatccactgcggccggaggaggccatggagcccgagtagctgcctggatcgctcgacctcgcatgcgcgccgcgtcgcctctggggggctgctgcaccgcgtttccatagcagcatgtcctacggaaacccagcacgtgtgtagagcctcgatcgtcatctctggttatttgttttttcctttgttgttttaaaggggacaaaaaaaaaaaaaggacttgactccatgacgtcgaccgtggccgctggctggctggacaggcgggtgtgaggagttgcagacccaaacccacgtgcattttgggacaattgctttttaaaacgtttttatgccaaaaatccttcattgtgattttcagaaccacgtcagatataccaagtgactgtgtgtggggtttgacaactgtggaaaggcgagcagaaaactccggcggtctgaggccatggaggtggttgctgcatttgagagggagtagggggctagatgtggctcctagtgcaaaccggaaaccatggcaccttccagagccgtggtctcaaggagtcagagcagggctggccctcagtagctgcagggagctttgatgcaacttatttgtaagaaggatttttaaattttttatgggtagaattgtagtcaggaaaacagaaagggcttgaaatttaataagtgctgctggaaggggattttccaagcctggaagggtattcagcagctgtggtggggaaacatttctcctgaaagactgaacgtgtttcttcatgacagctgctcaaagcaggtttctgagatagctgaccgagctctggtaaatctctttgtcaaattacgaaaacttcagggtgaaatcctatgcttccatgtacattacatggcttaagattaaacaaaaacatttttcaagtctctaactagagtgaactctagagcacagtagttcagaaactatttagagcttccaggatatatttcacagcttcaggcatgtgatcagttagagccgatgaaacctatgcccgcctgtatatatattagcagcttagctagttcataacctgtatattctaaagactgctaaggttttgttttcattttaaatcctagctgattgttgtggtcaatgaaatacccagtttctggagggccaggtgggaaatgctttcactggaccaacacacaaatgatcatcctgaggatctgagcttccctagactccacacaataaccttggggcacccttttagagaagactgttgaaacccacagcactcgttggggtatgaggaaaccagggcttggcacaggaagttcccctttgtagctaaaagtccagaaagaaagggttcatctttttgacttccaactgatattgggaagtttggttgaggttcaagtgtgactccttccagagccacaggtaggggagtgtgaagttgagggggaggaaagctggaaggactctgccttgggagattcccagctctgctttccagcgcttggtggaatctgggctggggaaagacggcaccgggaaactctgcttccccattgtttccatctgatcagctgtggtgtgaggacttctcagacaaaggcaaggcctcgtgcccctgcccagcccattcatggagccctgggccttcttggcttccatagatcctaagctcttgactgtagtttagccagacttgttttgctatcttataagcagttcagaattagggaatgctggttttgaagagcaaaggacaggtagtctagagagggtcgtctggcctgcttgctgggtctttgtaacccagcacttcctcttgccctcctggctttatgtttatggggagaggactcaatagctccaccccttctggcaccagatggggcttggttagtttgcaataagcaccttgcagaggttaaagccagcgggtccctagtcttaggcccagcctgcttgtgtgggctctggcctggcctggtggctggcccagggggcagcagtgcttagagcttctgcagggcttctcttgtttacacagctgcatcagacaatgccatttctccccaccacggaaccttccatctaagatttcttccagggaatgccagcaatcaggcagcacccagctgtgggggcagtggggtgggggagacccacattgatgactttttttttttcttttaatgaagaaacaccaaagaaagctgtggaaaggacctgccccacatgaaaaggataagccaagatggctgtaaacacagagcatttgagctgccactcttggagcacattgatttttcaaaagccagctctgtcaggaaaggaggtgctgttatgagcagctcttccagtgggcaaagaggacgcccataatttcttccattgctagctcatctgtgggaccaatttggtgtaagcaacctgtggcctgcacttgtggcctcgaaggaagcacaaaccctccatccacttcccatttcctctgcccttttccacctcccccttccatcccaccagctgccagtggctcccagaaagccttattgagccccttgttgacacttggggctgcggaggcctctccctactggtctggcctttcctgagaggcaggtcttccgtcctcagagcctttctggaacaaggagaatgcctgtgcaggtggacacacaggcctggcctgtcgctctcacttgtcttccagcggggagcttcacgttgccgagtggaagaaccatgacctccacttgcttccaaggtgctagggaagtttcagggtacgctggttcccctctccagctggaggccgagtttctggggactgcagatttttctactctgtgatcgattcaatgcccgatgcttctgtttcattcccgaccctttctactatgcattttccttttatcaggtgtataaagttaaatactgtgtatttatcactaaaaagtacatgaacttaagagacaactaagcctttcgtgtttttccacaggtgtttaagcttctctgtacagttgaaataaacagacagcaaaatggt

SEQ ID NO: 113397 - DNA, 5218 bp, Homo sapiens
  Payload ID: 2168
  Gene Symbol: CAMKK2
  Gene Name: calcium/calmodulin-dependent protein kinase kinase 2, beta
  Uniprot ID: Q96RR4
  ENST ID: ENST00000347034
  CDS Start-End: 579-2216
cccatctctacgaaaaatacaaaaattagccaagtatggtggccggcgcctgtaatcccagctactcgggagactgaggcagagaactgcttgaacctgggaggcagaggttgcagtgatccgagatcgcgtcactgcactccagcgtgggcgacagagcgagactccgtttcagaaaagaaaaaaaaaaaaaaaaaaaagggagtcggggtggagctctcattggctcgttgcatgtgagtgtccctacggcctagaaatacaagagaagcacatcggaacgggctggaaatccacccagttaactagagggctttgaaccttttattaacttggaggttgactctcctgtcaactcgattcccttttggctgtttggcagggtcagtgagacatcccctgggtcgctcgaccccgtaggacggttcagggagccctccaggtcttcgtttctcctcttccccgcacagtgctgttatccagctgggggatccaacgcacacttaaggctccagcaaagtggctccgctgccggatgggagtgccccagtgtgctggatgaagctggcgcatgcaccatgtcatcatgtgtctctagccagcccagcagcaaccgggccgccccccaggatgagctggggggcaggggcagcagcagcagcgaaagccagaagccctgtgaggccctgcggggcctctcatccttgagcatccacctgggcatggagtccttcattgtggtcaccgagtgtgagccgggctgtgctgtggacctcggcttggcgcgggaccggcccctggaggccgatggccaagaggtcccccttgacacctccgggtcccaggcccggccccacctctccggtcgcaagctgtctctgcaagagcggtcccagggtgggctggcagccggtggcagcctggacatgaacggacgctgcatctgcccgtccctgccctactcacccgtcagctccccgcagtcctcgcctcggctgccccggcggccgacagtggagtctcaccacgtctccatcacgggtatgcaggactgtgtgcagctgaatcagtataccctgaaggatgaaattggaaagggctcctatggtgtcgtcaagttggcctacaatgaaaatgacaatacctactatgcaatgaaggtgctgtccaaaaagaagctgatccggcaggccggctttccacgtcgccctccaccccgaggcacccggccagctcctggaggctgcatccagcccaggggccccattgagcaggtgtaccaggaaattgccatcctcaagaagctggaccaccccaatgtggtgaagctggtggaggtcctggatgaccccaatgaggaccatctgtacatggtgttcgaactggtcaaccaagggcccgtgatggaagtgcccaccctcaaaccactctctgaagaccaggcccgtttctacttccaggatctgatcaaaggcatcgagtacttacactaccagaagatcatccaccgtgacatcaaaccttccaacctcctggtcggagaagatgggcacatcaagatcgctgactttggtgtgagcaatgaattcaagggcagtgacgcgctcctctccaacaccgtgggcacgcccgccttcatggcacccgagtcgctctctgagacccgcaagatcttctctgggaaggccttggatgtttgggccatgggtgtgacactatactgctttgtctttggccagtgcccattcatggacgagcggatcatgtgtttacacagtaagatcaagagtcaggccctggaatttccagaccagcccgacatagctgaggacttgaaggacctgatcacccgtatgctggacaagaaccccgagtcgaggatcgtggtgccggaaatcaagatcctggtgaagaccatgatacgtaaacgctcctttgggaacccattcgagggcagccggcgggaggaacgctcactgtcagcgcctggaaacttgctcaccaaaaaaccaaccagggaatgtgagtccctgtctgagctcaaggaagcaaggcagcgaagacaacctccagggcaccgacccgccccccgtgggggaggaggaagtgctcttgtgagaggcagtccctgcgtggaaagttgctgggcccccgcccccggctcccccgcacgcatgcatccactgcggccggaggaggccatggagcccgagtagctgcctggatcgctcgacctcgcatgcgcgccgcgtcgcctctggggggctgctgcaccgcgtttccatagcagcatgtcctacggaaacccagcacgtgtgtagagcctcgatcgtcatctctggttatttgttttttcctttgttgttttaaaggggacaaaaaaaaaaaaaggacttgactccatgacgtcgaccgtggccgctggctggctggacaggcgggtgtgaggagttgcagacccaaacccacgtgcattttgggacaattgctttttaaaacgtttttatgccaaaaatccttcattgtgattttcagaaccacgtcagatataccaagtgactgtgtgtggggtttgacaactgtggaaaggcgagcagaaaactccggcggtctgaggccatggaggtggttgctgcatttgagagggagtagggggctagatgtggctcctagtgcaaaccggaaaccatggcaccttccagagccgtggtctcaaggagtcagagcagggctggccctcagtagctgcagggagctttgatgcaacttatttgtaagaaggatttttaaattttttatgggtagaattgtagtcaggaaaacagaaagggcttgaaatttaataagtgctgctggaaggggattttccaagcctggaagggtattcagcagctgtggtggggaaacatttctcctgaaagactgaacgtgtttcttcatgacagctgctcaaagcaggtttctgagatagctgaccgagctctggtaaatctctttgtcaaattacgaaaacttcagggtgaaatcctatgcttccatgtacattacatggcttaagattaaacaaaaacatttttcaagtctctaactagagtgaactctagagcacagtagttcagaaactatttagagcttccaggatatatttcacagcttcaggcatgtgatcagttagagccgatgaaacctatgcccgcctgtatatatattagcagcttagctagttcataacctgtatattctaaagactgctaaggttttgttttcattttaaatcctagctgattgttgtggtcaatgaaatacccagtttctggagggccaggtgggaaatgctttcactggaccaacacacaaatgatcatcctgaggatctgagcttccctagactccacacaataaccttggggcacccttttagagaagactgttgaaacccacagcactcgttggggtatgaggaaaccagggcttggcacaggaagttcccctttgtagctaaaagtccagaaagaaagggttcatctttttgacttccaactgatattgggaagtttggttgaggttcaagtgtgactccttccagagccacaggtaggggagtgtgaagttgagggggaggaaagctggaaggactctgccttgggagattcccagctctgctttccagcgcttggtggaatctgggctggggaaagacggcaccgggaaactctgcttccccattgtttccatctgatcagctgtggtgtgaggacttctcagacaaaggcaaggcctcgtgcccctgcccagcccattcatggagccctgggccttcttggcttccatagatcctaagctcttgactgtagtttagccagacttgttttgctatcttataagcagttcagaattagggaatgctggttttgaagagcaaaggacaggtagtctagagagggtcgtctggcctgcttgctgggtctttgtaacccagcacttcctcttgccctcctggctttatgtttatggggagaggactcaatagctccaccccttctggcaccagatggggcttggttagtttgcaataagcaccttgcagaggttaaagccagcgggtccctagtcttaggcccagcctgcttgtgtgggctctggcctggcctggtggctggcccagggggcagcagtgcttagagcttctgcagggcttctcttgtttacacagctgcatcagacaatgccatttctccccaccacggaaccttccatctaagatttcttccagggaatgccagcaatcaggcagcacccagctgtgggggcagtggggtgggggagacccacattgatgactttttttttttcttttaatgaagaaacaccaaagaaagctgtggaaaggacctgccccacatgaaaaggataagccaagatggctgtaaacacagagcatttgagctgccactcttggagcacattgatttttcaaaagccagctctgtcaggaaaggaggtgctgttatgagcagctcttccagtgggcaaagaggacgcccataatttcttccattgctagctcatctgtgggaccaatttggtgtaagcaacctgtggcctgcacttgtggcctcgaaggaagcacaaaccctccatccacttcccatttcctctgcccttttccacctcccccttccatcccaccagctgccagtggctcccagaaagccttattgagccccttgttgacacttggggctgcggaggcctctccctactggtctggcctttcctgagaggcaggtcttccgtcctcagagcctttctggaacaaggagaatgcctgtgcaggtggacacacaggcctggcctgtcgctctcacttgtcttccagcggggagcttcacgttgccgagtggaagaaccatgacctccacttgcttccaaggtgctagggaagtttcagggtacgctggttcccctctccagctggaggccgagtttctggggactgcagatttttctactctgtgatcgattcaatgcccgatgcttctgtttcattcccgaccctttctactatgcattttccttttatcaggtgtataaagttaaatactgtgtatttatcactaaaaagtacatgaacttaagagacaactaagcctttcgtgtttttccacaggtgtttaagcttctctgtacagttgaaataaacagacagcaaaatggt

SEQ ID NO: 113398 - DNA, 5304 bp, Homo sapiens
  Payload ID: 2168
  Gene Symbol: CAMKK2
  Gene Name: calcium/calmodulin-dependent protein kinase kinase 2, beta
  Uniprot ID: Q96RR4
  ENST ID: ENST00000337174
  CDS Start-End: 579-2204
cccatctctacgaaaaatacaaaaattagccaagtatggtggccggcgcctgtaatcccagctactcgggagactgaggcagagaactgcttgaacctgggaggcagaggttgcagtgatccgagatcgcgtcactgcactccagcgtgggcgacagagcgagactccgtttcagaaaagaaaaaaaaaaaaaaaaaaaagggagtcggggtggagctctcattggctcgttgcatgtgagtgtccctacggcctagaaatacaagagaagcacatcggaacgggctggaaatccacccagttaactagagggctttgaaccttttattaacttggaggttgactctcctgtcaactcgattcccttttggctgtttggcagggtcagtgagacatcccctgggtcgctcgaccccgtaggacggttcagggagccctccaggtcttcgtttctcctcttccccgcacagtgctgttatccagctgggggatccaacgcacacttaaggctccagcaaagtggctccgctgccggatgggagtgccccagtgtgctggatgaagctggcgcatgcaccatgtcatcatgtgtctctagccagcccagcagcaaccgggccgccccccaggatgagctggggggcaggggcagcagcagcagcgaaagccagaagccctgtgaggccctgcggggcctctcatccttgagcatccacctgggcatggagtccttcattgtggtcaccgagtgtgagccgggctgtgctgtggacctcggcttggcgcgggaccggcccctggaggccgatggccaagaggtcccccttgacacctccgggtcccaggcccggccccacctctccggtcgcaagctgtctctgcaagagcggtcccagggtgggctggcagccggtggcagcctggacatgaacggacgctgcatctgcccgtccctgccctactcacccgtcagctccccgcagtcctcgcctcggctgccccggcggccgacagtggagtctcaccacgtctccatcacgggtatgcaggactgtgtgcagctgaatcagtataccctgaaggatgaaattggaaagggctcctatggtgtcgtcaagttggcctacaatgaaaatgacaatacctactatgcaatgaaggtgctgtccaaaaagaagctgatccggcaggccggctttccacgtcgccctccaccccgaggcacccggccagctcctggaggctgcatccagcccaggggccccattgagcaggtgtaccaggaaattgccatcctcaagaagctggaccaccccaatgtggtgaagctggtggaggtcctggatgaccccaatgaggaccatctgtacatggtgttcgaactggtcaaccaagggcccgtgatggaagtgcccaccctcaaaccactctctgaagaccaggcccgtttctacttccaggatctgatcaaaggcatcgagtacttacactaccagaagatcatccaccgtgacatcaaaccttccaacctcctggtcggagaagatgggcacatcaagatcgctgactttggtgtgagcaatgaattcaagggcagtgacgcgctcctctccaacaccgtgggcacgcccgccttcatggcacccgagtcgctctctgagacccgcaagatcttctctgggaaggccttggatgtttgggccatgggtgtgacactatactgctttgtctttggccagtgcccattcatggacgagcggatcatgtgtttacacagtaagatcaagagtcaggccctggaatttccagaccagcccgacatagctgaggacttgaaggacctgatcacccgtatgctggacaagaaccccgagtcgaggatcgtggtgccggaaatcaagctgcacccctgggtcacgaggcatggggcggagccgttgccgtcggaggatgagaactgcacgctggtcgaagtgactgaagaggaggtcgagaactcagtcaaacacattcccagcttggcaaccgtgatcctggtgaagaccatgatacgtaaacgctcctttgggaacccattcgagggcagccggcgggaggaacgctcactgtcagcgcctggaaacttgctcacgaagcaaggcagcgaagacaacctccagggcaccgacccgccccccgtgggggaggaggaagtgctcttgtgagaggcagtccctgcgtggaaagttgctgggcccccgcccccggctcccccgcacgcatgcatccactgcggccggaggaggccatggagcccgagtagctgcctggatcgctcgacctcgcatgcgcgccgcgtcgcctctggggggctgctgcaccgcgtttccatagcagcatgtcctacggaaacccagcacgtgtgtagagcctcgatcgtcatctctggttatttgttttttcctttgttgttttaaaggggacaaaaaaaaaaaaaggacttgactccatgacgtcgaccgtggccgctggctggctggacaggcgggtgtgaggagttgcagacccaaacccacgtgcattttgggacaattgctttttaaaacgtttttatgccaaaaatccttcattgtgattttcagaaccacgtcagatataccaagtgactgtgtgtggggtttgacaactgtggaaaggcgagcagaaaactccggcggtctgaggccatggaggtggttgctgcatttgagagggagtagggggctagatgtggctcctagtgcaaaccggaaaccatggcaccttccagagccgtggtctcaaggagtcagagcagggctggccctcagtagctgcagggagctttgatgcaacttatttgtaagaaggatttttaaattttttatgggtagaattgtagtcaggaaaacagaaagggcttgaaatttaataagtgctgctggaaggggattttccaagcctggaagggtattcagcagctgtggtggggaaacatttctcctgaaagactgaacgtgtttcttcatgacagctgctcaaagcaggtttctgagatagctgaccgagctctggtaaatctctttgtcaaattacgaaaacttcagggtgaaatcctatgcttccatgtacattacatggcttaagattaaacaaaaacatttttcaagtctctaactagagtgaactctagagcacagtagttcagaaactatttagagcttccaggatatatttcacagcttcaggcatgtgatcagttagagccgatgaaacctatgcccgcctgtatatatattagcagcttagctagttcataacctgtatattctaaagactgctaaggttttgttttcattttaaatcctagctgattgttgtggtcaatgaaatacccagtttctggagggccaggtgggaaatgctttcactggaccaacacacaaatgatcatcctgaggatctgagcttccctagactccacacaataaccttggggcacccttttagagaagactgttgaaacccacagcactcgttggggtatgaggaaaccagggcttggcacaggaagttcccctttgtagctaaaagtccagaaagaaagggttcatctttttgacttccaactgatattgggaagtttggttgaggttcaagtgtgactccttccagagccacaggtaggggagtgtgaagttgagggggaggaaagctggaaggactctgccttgggagattcccagctctgctttccagcgcttggtggaatctgggctggggaaagacggcaccgggaaactctgcttccccattgtttccatctgatcagctgtggtgtgaggacttctcagacaaaggcaaggcctcgtgcccctgcccagcccattcatggagccctgggccttcttggcttccatagatcctaagctcttgactgtagtttagccagacttgttttgctatcttataagcagttcagaattagggaatgctggttttgaagagcaaaggacaggtagtctagagagggtcgtctggcctgcttgctgggtctttgtaacccagcacttcctcttgccctcctggctttatgtttatggggagaggactcaatagctccaccccttctggcaccagatggggcttggttagtttgcaataagcaccttgcagaggttaaagccagcgggtccctagtcttaggcccagcctgcttgtgtgggctctggcctggcctggtggctggcccagggggcagcagtgcttagagcttctgcagggcttctcttgtttacacagctgcatcagacaatgccatttctccccaccacggaaccttccatctaagatttcttccagggaatgccagcaatcaggcagcacccagctgtgggggcagtggggtgggggagacccacattgatgactttttttttttcttttaatgaagaaacaccaaagaaagctgtggaaaggacctgccccacatgaaaaggataagccaagatggctgtaaacacagagcatttgagctgccactcttggagcacattgatttttcaaaagccagctctgtcaggaaaggaggtgctgttatgagcagctcttccagtgggcaaagaggacgcccataatttcttccattgctagctcatctgtgggaccaatttggtgtaagcaacctgtggcctgcacttgtggcctcgaaggaagcacaaaccctccatccacttcccatttcctctgcccttttccacctcccccttccatcccaccagctgccagtggctcccagaaagccttattgagccccttgttgacacttggggctgcggaggcctctccctactggtctggcctttcctgagaggcaggtcttccgtcctcagagcctttctggaacaaggagaatgcctgtgcaggtggacacacaggcctggcctgtcgctctcacttgtcttccagcggggagcttcacgttgccgagtggaagaaccatgacctccacttgcttccaaggtgctagggaagtttcagggtacgctggttcccctctccagctggaggccgagtttctggggactgcagatttttctactctgtgatcgattcaatgcccgatgcttctgtttcattcccgaccctttctactatgcattttccttttatcaggtgtataaagttaaatactgtgtatttatcactaaaaagtacatgaacttaagagacaactaagcctttcgtgtttttccacaggtgtttaagcttctctgtacagttgaaataaacagacagcaaaatggt

SEQ ID NO: 113399 - DNA, 2967 bp, Homo sapiens
  Payload ID: 2168
  Gene Symbol: CAMKK2
  Gene Name: calcium/calmodulin-dependent protein kinase kinase 2, beta
  Uniprot ID: Q96RR4
  ENST ID: ENST00000392473
  CDS Start-End: 830-2431
gagcctggggaggtcgagggtgcagcgagccgtgatcgtgctactgcactccagcctgggcaacacagagagaccctgtctcaaaacaaacaaacaaacaaacaaacaaacaaacaaaaaaaacaaagaaaaaaaaatgggagtgggccgggcgcggtgactcacacctgtaatcccagcactttcggaggccaaggcgggtggatcacgaggtcaggaattcaagattagcctggacaacatggtgaaaccccatctctacgaaaaatacaaaaattagccaagtatggtggccggcgcctgtaatcccagctactcgggagactgaggcagagaactgcttgaacctgggaggcagaggttgcagtgatccgagatcgcgtcactgcactccagcgtgggcgacagagcgagactccgtttcagaaaagaaaaaaaaaaaaaaaaaaaagggagtcggggtggagctctcattggctcgttgcatgtgagtgtccctacggcctagaaatacaagagaagcacatcggaacgggctggaaatccacccagttaactagagggctttgaaccttttattaacttggaggttgactctcctgtcaactcgattcccttttggctgtttggcagggtcagtgagacatcccctgggtcgctcgaccccgtaggacggttcagggagccctccaggtcttcgtttctcctcttccccgcacagtgctgttatccagctgggggatccaacgcacacttaaggctccagcaaagtggctccgctgccggatgggagtgccccagtgtgctggatgaagctggcgcatgcaccatgtcatcatgtgtctctagccagcccagcagcaaccgggccgccccccaggatgagctggggggcaggggcagcagcagcagcgaaagccagaagccctgtgaggccctgcggggcctctcatccttgagcatccacctgggcatggagtccttcattgtggtcaccgagtgtgagccgggctgtgctgtggacctcggcttggcgcgggaccggcccctggaggccgatggccaagaggtcccccttgacacctccgggtcccaggcccggccccacctctccggtcgcaagctgtctctgcaagagcggtcccagggtgggctggcagccggtggcagcctggacatgaacggacgctgcatctgcccgtccctgccctactcacccgtcagctccccgcagtcctcgcctcggctgccccggcggccgacagtggagtctcaccacgtctccatcacgggtatgcaggactgtgtgcagctgaatcagtataccctgaaggatgaaattggaaagggctcctatggtgtcgtcaagttggcctacaatgaaaatgacaatacctactatgcaatgaaggtgctgtccaaaaagaagctgatccggcaggccggctttccacgtcgccctccaccccgaggcacccggccagctcctggaggctgcatccagcccaggggccccattgagcaggtgtaccaggaaattgccatcctcaagaagctggaccaccccaatgtggtgaagctggtggaggtcctggatgaccccaatgaggaccatctgtacatggtgttcgaactggtcaaccaagggcccgtgatggaagtgcccaccctcaaaccactctctgaagaccaggcccgtttctacttccaggatctgatcaaaggcatcgagtacttacactaccagaagatcatccaccgtgacatcaaaccttccaacctcctggtcggagaagatgggcacatcaagatcgctgactttggtgtgagcaatgaattcaagggcagtgacgcgctcctctccaacaccgtgggcacgcccgccttcatggcacccgagtcgctctctgagacccgcaagatcttctctgggaaggccttggatgtttgggccatgggtgtgacactatactgctttgtctttggccagtgcccattcatggacgagcggatcatgtgtttacacagtaagatcaagagtcaggccctggaatttccagaccagcccgacatagctgaggacttgaaggacctgatcacccgtatgctggacaagaaccccgagtcgaggatcgtggtgccggaaatcaagctgcacccctgggtcacgaggcatggggcggagccgttgccgtcggaggatgagaactgcacgctggtcgaagtgactgaagaggaggtcgagaactcagtcaaacacattcccagcttggcaaccgtgatcctggtgaagaccatgatacgtaaacgctcctttgggaacccattcgagggcagccggcgggaggaacgctcactgtcagcgcctggaaacttgctcaccaaaaaaccaaccagggaatgtgagtccctgtctgagctcaagacctagaaaataagtccccttcctgcctgttgcaaagtaacgtaagagttccctcacccgagtggatgcagaccttcttgctgtcagccacccttccttcatacacatagccagcccaggtgaccagaacctcccaggacagatgaggctttgtgtccttatgagactgggagaacctgctgggcacccctgctgcaggtgctgtggtgggtggggaccccactgcccttcccactgagcacatcatggctacctgacttggtgggagctccaggcagtcacttctgtttcttaaacatagctttactgaggtacaattcacataccatgtaattcacccacgggaagtgtatgattcagtggtttctaatacagacttctgcagccattaccaccgtcaactttacgacattttcatcagcccaagaagacaccctacactccttagctgtccccatccaactcccccaccccagtaaccactcagaataggtatggatttgcctattctggacgtttcgtataaatggcgtcatacacta

SEQ ID NO: 113400 - DNA, 4453 bp, Homo sapiens
  Payload ID: 2168
  Gene Symbol: CAMKK2
  Gene Name: calcium/calmodulin-dependent protein kinase kinase 2, beta
  Uniprot ID: Q96RR4
  ENST ID: ENST00000392474
  CDS Start-End: 6-1676
gcaccatgtcatcatgtgtctctagccagcccagcagcaaccgggccgccccccaggatgagctggggggcaggggcagcagcagcagcgaaagccagaagccctgtgaggccctgcggggcctctcatccttgagcatccacctgggcatggagtccttcattgtggtcaccgagtgtgagccgggctgtgctgtggacctcggcttggcgcgggaccggcccctggaggccgatggccaagaggtcccccttgacacctccgggtcccaggcccggccccacctctccggtcgcaagctgtctctgcaagagcggtcccagggtgggctggcagccggtggcagcctggacatgaacggacgctgcatctgcccgtccctgccctactcacccgtcagctccccgcagtcctcgcctcggctgccccggcggccgacagtggagtctcaccacgtctccatcacgggtatgcaggactgtgtgcagctgaatcagtataccctgaaggatgaaattggaaagggctcctatggtgtcgtcaagttggcctacaatgaaaatgacaatacctactatgcaatgaaggtgctgtccaaaaagaagctgatccggcaggccggctttccacgtcgccctccaccccgaggcacccggccagctcctggaggctgcatccagcccaggggccccattgagcaggtgtaccaggaaattgccatcctcaagaagctggaccaccccaatgtggtgaagctggtggaggtcctggatgaccccaatgaggaccatctgtacatggtgttcgaactggtcaaccaagggcccgtgatggaagtgcccaccctcaaaccactctctgaagaccaggcccgtttctacttccaggatctgatcaaaggcatcgagtacttacactaccagaagatcatccaccgtgacatcaaaccttccaacctcctggtcggagaagatgggcacatcaagatcgctgactttggtgtgagcaatgaattcaagggcagtgacgcgctcctctccaacaccgtgggcacgcccgccttcatggcacccgagtcgctctctgagacccgcaagatcttctctgggaaggccttggatgtttgggccatgggtgtgacactatactgctttgtctttggccagtgcccattcatggacgagcggatcatgtgtttacacagtaagatcaagagtcaggccctggaatttccagaccagcccgacatagctgaggacttgaaggacctgatcacccgtatgctggacaagaaccccgagtcgaggatcgtggtgccggaaatcaagctgcacccctgggtcacgaggcatggggcggagccgttgccgtcggaggatgagaactgcacgctggtcgaagtgactgaagaggaggtcgagaactcagtcaaacacattcccagcttggcaaccgtgatcctggtgaagaccatgatacgtaaacgctcctttgggaacccattcgagggcagccggcgggaggaacgctcactgtcagcgcctggaaacttgctcaccaaaaaaccaaccagggaatgtgagtccctgtctgagctcaaggggacaaaaaaaaaaaaaggacttgactccatgacgtcgaccgtggccgctggctggctggacaggcgggtgtgaggagttgcagacccaaacccacgtgcattttgggacaattgctttttaaaacgtttttatgccaaaaatccttcattgtgattttcagaaccacgtcagatataccaagtgactgtgtgtggggtttgacaactgtggaaaggcgagcagaaaactccggcggtctgaggccatggaggtggttgctgcatttgagagggagtagggggctagatgtggctcctagtgcaaaccggaaaccatggcaccttccagagccgtggtctcaaggagtcagagcagggctggccctcagtagctgcagggagctttgatgcaacttatttgtaagaaggatttttaaattttttatgggtagaattgtagtcaggaaaacagaaagggcttgaaatttaataagtgctgctggaaggggattttccaagcctggaagggtattcagcagctgtggtggggaaacatttctcctgaaagactgaacgtgtttcttcatgacagctgctcaaagcaggtttctgagatagctgaccgagctctggtaaatctctttgtcaaattacgaaaacttcagggtgaaatcctatgcttccatgtacattacatggcttaagattaaacaaaaacatttttcaagtctctaactagagtgaactctagagcacagtagttcagaaactatttagagcttccaggatatatttcacagcttcaggcatgtgatcagttagagccgatgaaacctatgcccgcctgtatatatattagcagcttagctagttcataacctgtatattctaaagactgctaaggttttgttttcattttaaatcctagctgattgttgtggtcaatgaaatacccagtttctggagggccaggtgggaaatgctttcactggaccaacacacaaatgatcatcctgaggatctgagcttccctagactccacacaataaccttggggcacccttttagagaagactgttgaaacccacagcactcgttggggtatgaggaaaccagggcttggcacaggaagttcccctttgtagctaaaagtccagaaagaaagggttcatctttttgacttccaactgatattgggaagtttggttgaggttcaagtgtgactccttccagagccacaggtaggggagtgtgaagttgagggggaggaaagctggaaggactctgccttgggagattcccagctctgctttccagcgcttggtggaatctgggctggggaaagacggcaccgggaaactctgcttccccattgtttccatctgatcagctgtggtgtgaggacttctcagacaaaggcaaggcctcgtgcccctgcccagcccattcatggagccctgggccttcttggcttccatagatcctaagctcttgactgtagtttagccagacttgttttgctatcttataagcagttcagaattagggaatgctggttttgaagagcaaaggacaggtagtctagagagggtcgtctggcctgcttgctgggtctttgtaacccagcacttcctcttgccctcctggctttatgtttatggggagaggactcaatagctccaccccttctggcaccagatggggcttggttagtttgcaataagcaccttgcagaggttaaagccagcgggtccctagtcttaggcccagcctgcttgtgtgggctctggcctggcctggtggctggcccagggggcagcagtgcttagagcttctgcagggcttctcttgtttacacagctgcatcagacaatgccatttctccccaccacggaaccttccatctaagatttcttccagggaatgccagcaatcaggcagcacccagctgtgggggcagtggggtgggggagacccacattgatgactttttttttttcttttaatgaagaaacaccaaagaaagctgtggaaaggacctgccccacatgaaaaggataagccaagatggctgtaaacacagagcatttgagctgccactcttggagcacattgatttttcaaaagccagctctgtcaggaaaggaggtgctgttatgagcagctcttccagtgggcaaagaggacgcccataatttcttccattgctagctcatctgtgggaccaatttggtgtaagcaacctgtggcctgcacttgtggcctcgaaggaagcacaaaccctccatccacttcccatttcctctgcccttttccacctcccccttccatcccaccagctgccagtggctcccagaaagccttattgagccccttgttgacacttggggctgcggaggcctctccctactggtctggcctttcctgagaggcaggtcttccgtcctcagagcctttctggaacaaggagaatgcctgtgcaggtggacacacaggcctggcctgtcgctctcacttgtcttccagcggggagcttcacgttgccgagtggaagaaccatgacctccacttgcttccaaggtgctagggaagtttcagggtacgctggttcccctctccagctggaggccgagtttctggggactgcagatttttctactctgtgatcgattcaatgcccgatgcttctgtttcattcccgaccctttctactatgcattttccttttatcaggtgtataaagttaaatactgtgtatttatcactaaaaagtacatgaacttaagagacaactaagcctttcgtgtttttccacaggtgtttaagcttctctgtacagttgaaataaacagacagcaaaatggtgccaag

SEQ ID NO: 113401 - DNA, 2051 bp, Homo sapiens
  Payload ID: 2168
  Gene Symbol: CAMKK2
  Gene Name: calcium/calmodulin-dependent protein kinase kinase 2, beta
  Uniprot ID: Q96RR4
  ENST ID: ENST00000402834
  CDS Start-End: 133-1899
cagagcaagctgagccgagccgagccgagctgggggcgcagagcgcgggaggcggcggcggcgcggagcccaggtggctccgctgccggatgggagtgccccagtgtgctggatgaagctggcgcatgcaccatgtcatcatgtgtctctagccagcccagcagcaaccgggccgccccccaggatgagctggggggcaggggcagcagcagcagcgaaagccagaagccctgtgaggccctgcggggcctctcatccttgagcatccacctgggcatggagtccttcattgtggtcaccgagtgtgagccgggctgtgctgtggacctcggcttggcgcgggaccggcccctggaggccgatggccaagaggtcccccttgacacctccgggtcccaggcccggccccacctctccggtcgcaagctgtctctgcaagagcggtcccagggtgggctggcagccggtggcagcctggacatgaacggacgctgcatctgcccgtccctgccctactcacccgtcagctccccgcagtcctcgcctcggctgccccggcggccgacagtggagtctcaccacgtctccatcacgggtatgcaggactgtgtgcagctgaatcagtataccctgaaggatgaaattggaaagggctcctatggtgtcgtcaagttggcctacaatgaaaatgacaatacctactatgcaatgaaggtgctgtccaaaaagaagctgatccggcaggccggctttccacgtcgccctccaccccgaggcacccggccagctcctggaggctgcatccagcccaggggccccattgagcaggtgtaccaggaaattgccatcctcaagaagctggaccaccccaatgtggtgaagctggtggaggtcctggatgaccccaatgaggaccatctgtacatggtgttcgaactggtcaaccaagggcccgtgatggaagtgcccaccctcaaaccactctctgaagaccaggcccgtttctacttccaggatctgatcaaaggcatcgagtacttacactaccagaagatcatccaccgtgacatcaaaccttccaacctcctggtcggagaagatgggcacatcaagatcgctgactttggtgtgagcaatgaattcaagggcagtgacgcgctcctctccaacaccgtgggcacgcccgccttcatggcacccgagtcgctctctgagacccgcaagatcttctctgggaaggccttggatgtttgggccatgggtgtgacactatactgctttgtctttggccagtgcccattcatggacgagcggatcatgtgtttacacagtaagatcaagagtcaggccctggaatttccagaccagcccgacatagctgaggacttgaaggacctgatcacccgtatgctggacaagaaccccgagtcgaggatcgtggtgccggaaatcaagctgcacccctgggtcacgaggcatggggcggagccgttgccgtcggaggatgagaactgcacgctggtcgaagtgactgaagaggaggtcgagaactcagtcaaacacattcccagcttggcaaccgtgatcctggtgaagaccatgatacgtaaacgctcctttgggaacccattcgagggcagccggcgggaggaacgctcactgtcagcgcctggaaacttgctcaccaaaaaaccaaccagggaatgtgagtccctgtctgagctcaaggaagcaaggcagcgaagacaacctccagggcaccgacccgccccccgtgggggaggaggaagtgctcttgtgagaggcagtccctgcgtggaaagttgctgggcccccgcccccggctcccccgcacgcatgcatccactgcggccggaggaggccatggagcccgagtagctgcctggatcgctcgacctcgcatgcgcgccgcgtcgcctctggggggctgctgcaccgcgtttccatagcagcatgtcctacggaaacccagcacgtgtgtagagcctcgatcgtcatctctggttatttgttttttcctttgttgtttt

SEQ ID NO: 113402 - DNA, 2116 bp, Homo sapiens
  Payload ID: 2168
  Gene Symbol: CAMKK2
  Gene Name: calcium/calmodulin-dependent protein kinase kinase 2, beta
  Uniprot ID: Q96RR4
  ENST ID: ENST00000404169
  CDS Start-End: 176-1942
gcgcgcccgccgcccgggcggaggagaggagcgcgcggccgcgcagagcaagctgagccgagccgagccgagctgggggcgcagagcgcgggaggcggcggcggcgcggagcccaggtggctccgctgccggatgggagtgccccagtgtgctggatgaagctggcgcatgcaccatgtcatcatgtgtctctagccagcccagcagcaaccgggccgccccccaggatgagctggggggcaggggcagcagcagcagcgaaagccagaagccctgtgaggccctgcggggcctctcatccttgagcatccacctgggcatggagtccttcattgtggtcaccgagtgtgagccgggctgtgctgtggacctcggcttggcgcgggaccggcccctggaggccgatggccaagaggtcccccttgacacctccgggtcccaggcccggccccacctctccggtcgcaagctgtctctgcaagagcggtcccagggtgggctggcagccggtggcagcctggacatgaacggacgctgcatctgcccgtccctgccctactcacccgtcagctccccgcagtcctcgcctcggctgccccggcggccgacagtggagtctcaccacgtctccatcacgggtatgcaggactgtgtgcagctgaatcagtataccctgaaggatgaaattggaaagggctcctatggtgtcgtcaagttggcctacaatgaaaatgacaatacctactatgcaatgaaggtgctgtccaaaaagaagctgatccggcaggccggctttccacgtcgccctccaccccgaggcacccggccagctcctggaggctgcatccagcccaggggccccattgagcaggtgtaccaggaaattgccatcctcaagaagctggaccaccccaatgtggtgaagctggtggaggtcctggatgaccccaatgaggaccatctgtacatggtgttcgaactggtcaaccaagggcccgtgatggaagtgcccaccctcaaaccactctctgaagaccaggcccgtttctacttccaggatctgatcaaaggcatcgagtacttacactaccagaagatcatccaccgtgacatcaaaccttccaacctcctggtcggagaagatgggcacatcaagatcgctgactttggtgtgagcaatgaattcaagggcagtgacgcgctcctctccaacaccgtgggcacgcccgccttcatggcacccgagtcgctctctgagacccgcaagatcttctctgggaaggccttggatgtttgggccatgggtgtgacactatactgctttgtctttggccagtgcccattcatggacgagcggatcatgtgtttacacagtaagatcaagagtcaggccctggaatttccagaccagcccgacatagctgaggacttgaaggacctgatcacccgtatgctggacaagaaccccgagtcgaggatcgtggtgccggaaatcaagctgcacccctgggtcacgaggcatggggcggagccgttgccgtcggaggatgagaactgcacgctggtcgaagtgactgaagaggaggtcgagaactcagtcaaacacattcccagcttggcaaccgtgatcctggtgaagaccatgatacgtaaacgctcctttgggaacccattcgagggcagccggcgggaggaacgctcactgtcagcgcctggaaacttgctcaccaaaaaaccaaccagggaatgtgagtccctgtctgagctcaaggaagcaaggcagcgaagacaacctccagggcaccgacccgccccccgtgggggaggaggaagtgctcttgtgagaggcagtccctgcgtggaaagttgctgggcccccgcccccggctcccccgcacgcatgcatccactgcggccggaggaggccatggagcccgagtagctgcctggatcgctcgacctcgcatgcgcgccgcgtcgcctctggggggctgctgcaccgcgtttccatagcagcatgtcctacggaaacccagcacgtgtgtagagcctcgatcgtcatctctggttatttgttttttcctttgttgttttaaaggggacaaaaaaaaaaaaa

SEQ ID NO: 113403 - DNA, 2587 bp, Homo sapiens
  Payload ID: 2168
  Gene Symbol: CAMKK2
  Gene Name: calcium/calmodulin-dependent protein kinase kinase 2, beta
  Uniprot ID: Q96RR4
  ENST ID: ENST00000446440
  CDS Start-End: 579-2051
cccatctctacgaaaaatacaaaaattagccaagtatggtggccggcgcctgtaatcccagctactcgggagactgaggcagagaactgcttgaacctgggaggcagaggttgcagtgatccgagatcgcgtcactgcactccagcgtgggcgacagagcgagactccgtttcagaaaagaaaaaaaaaaaaaaaaaaaagggagtcggggtggagctctcattggctcgttgcatgtgagtgtccctacggcctagaaatacaagagaagcacatcggaacgggctggaaatccacccagttaactagagggctttgaaccttttattaacttggaggttgactctcctgtcaactcgattcccttttggctgtttggcagggtcagtgagacatcccctgggtcgctcgaccccgtaggacggttcagggagccctccaggtcttcgtttctcctcttccccgcacagtgctgttatccagctgggggatccaacgcacacttaaggctccagcaaagtggctccgctgccggatgggagtgccccagtgtgctggatgaagctggcgcatgcaccatgtcatcatgtgtctctagccagcccagcagcaaccgggccgccccccaggatgagctggggggcaggggcagcagcagcagcgaaagccagaagccctgtgaggccctgcggggcctctcatccttgagcatccacctgggcatggagtccttcattgtggtcaccgagtgtgagccgggctgtgctgtggacctcggcttggcgcgggaccggcccctggaggccgatggccaagaggtcccccttgacacctccgggtcccaggcccggccccacctctccggtcgcaagctgtctctgcaagagcggtcccagggtgggctggcagccggtggcagcctggacatgaacggacgctgcatctgcccgtccctgccctactcacccgtcagctccccgcagtcctcgcctcggctgccccggcggccgacagtggagtctcaccacgtctccatcacgggtatgcaggactgtgtgcagctgaatcagtataccctgaaggatgaaattggaaagggctcctatggtgtcgtcaagttggcctacaatgaaaatgacaatacctactatgcaatgaaggtgctgtccaaaaagaagctgatccggcaggccggctttccacgtcgccctccaccccgaggcacccggccagctcctggaggctgcatccagcccaggggccccattgagcaggtgtaccaggaaattgccatcctcaagaagctggaccaccccaatgtggtgaagctggtggaggtcctggatgaccccaatgaggaccatctgtacatggtgttcgaactggtcaaccaagggcccgtgatggaagtgcccaccctcaaaccactctctgaagaccaggcccgtttctacttccaggatctgatcaaaggcatcgagtacttacactaccagaagatcatccaccgtgacatcaaaccttccaacctcctggtcggagaagatgggcacatcaagatcgctgactttggtgtgagcaatgaattcaagggcagtgacgcgctcctctccaacaccgtgggcacgcccgccttcatggcacccgagtcgctctctgagacccgcaagatcttctctgggaaggccttggatgtttgggccatgggtgtgacactatactgctttgtctttggccagtgcccattcatggacgagcggatcatgtgtttacacagtaagatcaagagtcaggccctggaatttccagaccagcccgacatagctgaggacttgaaggacctgatcacccgtatgctggacaagaaccccgagtcgaggatcgtggtgccggaaatcaagatcctggtgaagaccatgatacgtaaacgctcctttgggaacccattcgagggcagccggcgggaggaacgctcactgtcagcgcctggaaacttgctcaccaaaaaaccaaccagggaatgtgagtccctgtctgagctcaagacctagaaaataagtccccttcctgcctgttgcaaagtaacgtaagagttccctcacccgagtggatgcagaccttcttgctgtcagccacccttccttcatacacatagccagcccaggtgaccagaacctcccaggacagatgaggctttgtgtccttatgagactgggagaacctgctgggcacccctgctgcaggtgctgtggtgggtggggaccccactgcccttcccactgagcacatcatggctacctgacttggtgggagctccaggcagtcacttctgtttcttaaacatagctttactgaggtacaattcacataccatgtaattcacccacgggaagtgtatgattcagtggtttctaatacagacttctgcagccattaccaccgtcaactttacgacattttcatcagcccaagaagacaccctacactccttagctgtccccatccaactcccccaccccagtaaccactcagaataggtatggatttgcctattctggacgtttcgtataaatggcgtcatacacta

SEQ ID NO: 113404 - DNA, 2006 bp, Homo sapiens
  Payload ID: 2168
  Gene Symbol: CAMKK2
  Gene Name: calcium/calmodulin-dependent protein kinase kinase 2, beta
  Uniprot ID: Q96RR4
  ENST ID: ENST00000412367
  CDS Start-End: 109-1734
ccgagctgggggcgcagagcgcgggaggcggcggcggcgcggagcccaggtggctccgctgccggatgggagtgccccagtgtgctggatgaagctggcgcatgcaccatgtcatcatgtgtctctagccagcccagcagcaaccgggccgccccccaggatgagctggggggcaggggcagcagcagcagcgaaagccagaagccctgtgaggccctgcggggcctctcatccttgagcatccacctgggcatggagtccttcattgtggtcaccgagtgtgagccgggctgtgctgtggacctcggcttggcgcgggaccggcccctggaggccgatggccaagaggtcccccttgacacctccgggtcccaggcccggccccacctctccggtcgcaagctgtctctgcaagagcggtcccagggtgggctggcagccggtggcagcctggacatgaacggacgctgcatctgcccgtccctgccctactcacccgtcagctccccgcagtcctcgcctcggctgccccggcggccgacagtggagtctcaccacgtctccatcacgggtatgcaggactgtgtgcagctgaatcagtataccctgaaggatgaaattggaaagggctcctatggtgtcgtcaagttggcctacaatgaaaatgacaatacctactatgcaatgaaggtgctgtccaaaaagaagctgatccggcaggccggctttccacgtcgccctccaccccgaggcacccggccagctcctggaggctgcatccagcccaggggccccattgagcaggtgtaccaggaaattgccatcctcaagaagctggaccaccccaatgtggtgaagctggtggaggtcctggatgaccccaatgaggaccatctgtacatggtgttcgaactggtcaaccaagggcccgtgatggaagtgcccaccctcaaaccactctctgaagaccaggcccgtttctacttccaggatctgatcaaaggcatcgagtacttacactaccagaagatcatccaccgtgacatcaaaccttccaacctcctggtcggagaagatgggcacatcaagatcgctgactttggtgtgagcaatgaattcaagggcagtgacgcgctcctctccaacaccgtgggcacgcccgccttcatggcacccgagtcgctctctgagacccgcaagatcttctctgggaaggccttggatgtttgggccatgggtgtgacactatactgctttgtctttggccagtgcccattcatggacgagcggatcatgtgtttacacagtaagatcaagagtcaggccctggaatttccagaccagcccgacatagctgaggacttgaaggacctgatcacccgtatgctggacaagaaccccgagtcgaggatcgtggtgccggaaatcaagctgcacccctgggtcacgaggcatggggcggagccgttgccgtcggaggatgagaactgcacgctggtcgaagtgactgaagaggaggtcgagaactcagtcaaacacattcccagcttggcaaccgtgatcctggtgaagaccatgatacgtaaacgctcctttgggaacccattcgagggcagccggcgggaggaacgctcactgtcagcgcctggaaacttgctcacgaagcaaggcagcgaagacaacctccagggcaccgacccgccccccgtgggggaggaggaagtgctcttgtgagaggcagtccctgcgtggaaagttgctgggcccccgcccccggctcccccgcacgcatgcatccactgcggccggaggaggccatggagcccgagtagctgcctggatcgctcgacctcgcatgcgcgccgcgtcgcctctggggggctgctgcaccgcgtttccatagcagcatgtcctacggaaacccagcacgtgtgtagagcctcgatcgtcatctctggttatttgttttttcctttgttgttttaaaggggacaaaaaaaaaaaaa

SEQ ID NO: 113405 - DNA, 3797 bp, Homo sapiens
  Payload ID: 2168
  Gene Symbol: CAMKK2
  Gene Name: calcium/calmodulin-dependent protein kinase kinase 2, beta
  ENST ID: ENST00000545538
  CDS Start-End: 68-1099
gccattaggatctcacactctgggggttttccctatcttccatcttaactgggaaacacgctgccaaatgcagccctcctgttggcaaacgcagccacgtggatgctgcctcctccctgctcatatctattctctctttttctcccccgccatccgtctcctgcctattccatgtggctgtgccaaggtcctggatgaccccaatgaggaccatctgtacatggtgttcgaactggtcaaccaagggcccgtgatggaagtgcccaccctcaaaccactctctgaagaccaggcccgtttctacttccaggatctgatcaaaggcatcgagtacttacactaccagaagatcatccaccgtgacatcaaaccttccaacctcctggtcggagaagatgggcacatcaagatcgctgactttggtgtgagcaatgaattcaagggcagtgacgcgctcctctccaacaccgtgggcacgcccgccttcatggcacccgagtcgctctctgagacccgcaagatcttctctgggaaggccttggatgtttgggccatgggtgtgacactatactgctttgtctttggccagtgcccattcatggacgagcggatcatgtgtttacacagtaagatcaagagtcaggccctggaatttccagaccagcccgacatagctgaggacttgaaggacctgatcacccgtatgctggacaagaaccccgagtcgaggatcgtggtgccggaaatcaagctgcacccctgggtcacgaggcatggggcggagccgttgccgtcggaggatgagaactgcacgctggtcgaagtgactgaagaggaggtcgagaactcagtcaaacacattcccagcttggcaaccgtgatcctggtgaagaccatgatacgtaaacgctcctttgggaacccattcgagggcagccggcgggaggaacgctcactgtcagcgcctggaaacttgctcaccaaaaaaccaaccagggaatgtgagtccctgtctgagctcaaggggacaaaaaaaaaaaaaggacttgactccatgacgtcgaccgtggccgctggctggctggacaggcgggtgtgaggagttgcagacccaaacccacgtgcattttgggacaattgctttttaaaacgtttttatgccaaaaatccttcattgtgattttcagaaccacgtcagatataccaagtgactgtgtgtggggtttgacaactgtggaaaggcgagcagaaaactccggcggtctgaggccatggaggtggttgctgcatttgagagggagtagggggctagatgtggctcctagtgcaaaccggaaaccatggcaccttccagagccgtggtctcaaggagtcagagcagggctggccctcagtagctgcagggagctttgatgcaacttatttgtaagaaggatttttaaattttttatgggtagaattgtagtcaggaaaacagaaagggcttgaaatttaataagtgctgctggaaggggattttccaagcctggaagggtattcagcagctgtggtggggaaacatttctcctgaaagactgaacgtgtttcttcatgacagctgctcaaagcaggtttctgagatagctgaccgagctctggtaaatctctttgtcaaattacgaaaacttcagggtgaaatcctatgcttccatgtacattacatggcttaagattaaacaaaaacatttttcaagtctctaactagagtgaactctagagcacagtagttcagaaactatttagagcttccaggatatatttcacagcttcaggcatgtgatcagttagagccgatgaaacctatgcccgcctgtatatatattagcagcttagctagttcataacctgtatattctaaagactgctaaggttttgttttcattttaaatcctagctgattgttgtggtcaatgaaatacccagtttctggagggccaggtgggaaatgctttcactggaccaacacacaaatgatcatcctgaggatctgagcttccctagactccacacaataaccttggggcacccttttagagaagactgttgaaacccacagcactcgttggggtatgaggaaaccagggcttggcacaggaagttcccctttgtagctaaaagtccagaaagaaagggttcatctttttgacttccaactgatattgggaagtttggttgaggttcaagtgtgactccttccagagccacaggtaggggagtgtgaagttgagggggaggaaagctggaaggactctgccttgggagattcccagctctgctttccagcgcttggtggaatctgggctggggaaagacggcaccgggaaactctgcttccccattgtttccatctgatcagctgtggtgtgaggacttctcagacaaaggcaaggcctcgtgcccctgcccagcccattcatggagccctgggccttcttggcttccatagatcctaagctcttgactgtagtttagccagacttgttttgctatcttataagcagttcagaattagggaatgctggttttgaagagcaaaggacaggtagtctagagagggtcgtctggcctgcttgctgggtctttgtaacccagcacttcctcttgccctcctggctttatgtttatggggagaggactcaatagctccaccccttctggcaccagatggggcttggttagtttgcaataagcaccttgcagaggttaaagccagcgggtccctagtcttaggcccagcctgcttgtgtgggctctggcctggcctggtggctggcccagggggcagcagtgcttagagcttctgcagggcttctcttgtttacacagctgcatcagacaatgccatttctccccaccacggaaccttccatctaagatttcttccagggaatgccagcaatcaggcagcacccagctgtgggggcagtggggtgggggagacccacattgatgactttttttttttcttttaatgaagaaacaccaaagaaagctgtggaaaggacctgccccacatgaaaaggataagccaagatggctgtaaacacagagcatttgagctgccactcttggagcacattgatttttcaaaagccagctctgtcaggaaaggaggtgctgttatgagcagctcttccagtgggcaaagaggacgcccataatttcttccattgctagctcatctgtgggaccaatttggtgtaagcaacctgtggcctgcacttgtggcctcgaaggaagcacaaaccctccatccacttcccatttcctctgcccttttccacctcccccttccatcccaccagctgccagtggctcccagaaagccttattgagccccttgttgacacttggggctgcggaggcctctccctactggtctggcctttcctgagaggcaggtcttccgtcctcagagcctttctggaacaaggagaatgcctgtgcaggtggacacacaggcctggcctgtcgctctcacttgtcttccagcggggagcttcacgttgccgagtggaagaaccatgacctccacttgcttccaaggtgctagggaagtttcagggtacgctggttcccctctccagctggaggccgagtttctggggactgcagatttttctactctgtgatcgattcaatgcccgatgcttctgtttcattcccgaccctttctactatgcattttccttttatcaggtgtataaagttaaatactgtgtatttatcactaaaaagtacatgaacttaagagacaa

SEQ ID NO: 113406 - DNA, 563 bp, Homo sapiens
  Payload ID: 2168
  Gene Symbol: CAMKK2
  Gene Name: calcium/calmodulin-dependent protein kinase kinase 2, beta
  ENST ID: ENST00000543477
  CDS Start-End: 189-563
aacgcacacttaaggctccagcaaagtaagtgccaaaaaggggagaatgggaagaatatgctgtatttcacaaaaagcatctaagtagccatctggaaaagccagaatgaacttcaatggtgcatccaggtggctccgctgccggatgggagtgccccagtgtgctggatgaagctggcgcatgcaccatgtcatcatgtgtctctagccagcccagcagcaaccgggccgccccccaggatgagctggggggcaggggcagcagcagcagcgaaagccagaagccctgtgaggccctgcggggcctctcatccttgagcatccacctgggcatggagtccttcattgtggtcaccgagtgtgagccgggctgtgctgtggacctcggcttggcgcgggaccggcccctggaggccgatggccaagaggtcccccttgacacctccgggtcccaggcccggccccacctctccggtcgcaagctgtctctgcaagagcggtcccagggtgggctggcagccggtggcagcctggacatgaacggacgctgcatctgcccgtcc

SEQ ID NO: 113407 - DNA, 543 bp, Homo sapiens
  Payload ID: 2168
  Gene Symbol: CAMKK2
  Gene Name: calcium/calmodulin-dependent protein kinase kinase 2, beta
  ENST ID: ENST00000544485
  CDS Start-End: 282-543
gagtcggtggtggcccaaagtccaggccgcatccaccgcccggcgcctagcgcaggggcagcagccgggtcgccacaggaggggccccgggtgttcttgccggcttgggggaactttcccagggtcagcccggaggcgccctgcagccccggcatttggctaaacaaagcaagcgctgccggcgcggcccgcccgagggcgccgcgggaagaacctgggcaggtggctccgctgccggatgggagtgccccagtgtgctggatgaagctggcgcatgcaccatgtcatcatgtgtctctagccagcccagcagcaaccgggccgccccccaggatgagctggggggcaggggcagcagcagcagcgaaagccagaagccctgtgaggccctgcggggcctctcatccttgagcatccacctgggcatggagtccttcattgtggtcaccgagtgtgagccgggctgtgctgtggacctcggcttggcgcgggaccggcccctggaggccgatggccaagaggtcccccttgacacctccgggt

SEQ ID NO: 113408 - DNA, 5175 bp, Homo sapiens
  Payload ID: 2168
  Gene Symbol: CAMKK2
  Gene Name: calcium/calmodulin-dependent protein kinase kinase 2, beta
  Uniprot ID: Q96RR4
  ENST ID: ENST00000538733
  CDS Start-End: 579-2075
cccatctctacgaaaaatacaaaaattagccaagtatggtggccggcgcctgtaatcccagctactcgggagactgaggcagagaactgcttgaacctgggaggcagaggttgcagtgatccgagatcgcgtcactgcactccagcgtgggcgacagagcgagactccgtttcagaaaagaaaaaaaaaaaaaaaaaaaagggagtcggggtggagctctcattggctcgttgcatgtgagtgtccctacggcctagaaatacaagagaagcacatcggaacgggctggaaatccacccagttaactagagggctttgaaccttttattaacttggaggttgactctcctgtcaactcgattcccttttggctgtttggcagggtcagtgagacatcccctgggtcgctcgaccccgtaggacggttcagggagccctccaggtcttcgtttctcctcttccccgcacagtgctgttatccagctgggggatccaacgcacacttaaggctccagcaaagtggctccgctgccggatgggagtgccccagtgtgctggatgaagctggcgcatgcaccatgtcatcatgtgtctctagccagcccagcagcaaccgggccgccccccaggatgagctggggggcaggggcagcagcagcagcgaaagccagaagccctgtgaggccctgcggggcctctcatccttgagcatccacctgggcatggagtccttcattgtggtcaccgagtgtgagccgggctgtgctgtggacctcggcttggcgcgggaccggcccctggaggccgatggccaagaggtcccccttgacacctccgggtcccaggcccggccccacctctccggtcgcaagctgtctctgcaagagcggtcccagggtgggctggcagccggtggcagcctggacatgaacggacgctgcatctgcccgtccctgccctactcacccgtcagctccccgcagtcctcgcctcggctgccccggcggccgacagtggagtctcaccacgtctccatcacgggtatgcaggactgtgtgcagctgaatcagtataccctgaaggatgaaattggaaagggctcctatggtgtcgtcaagttggcctacaatgaaaatgacaatacctactatgcaatgaaggtgctgtccaaaaagaagctgatccggcaggccggctttccacgtcgccctccaccccgaggcacccggccagctcctggaggctgcatccagcccaggggccccattgagcaggtgtaccaggaaattgccatcctcaagaagctggaccaccccaatgtggtgaagctggtggaggtcctggatgaccccaatgaggaccatctgtacatggtgttcgaactggtcaaccaagggcccgtgatggaagtgcccaccctcaaaccactctctgaagaccaggcccgtttctacttccaggatctgatcaaaggcatcgagtacttacactaccagaagatcatccaccgtgacatcaaaccttccaacctcctggtcggagaagatgggcacatcaagatcgctgactttggtgtgagcaatgaattcaagggcagtgacgcgctcctctccaacaccgtgggcacgcccgccttcatggcacccgagtcgctctctgagacccgcaagatcttctctgggaaggccttggatgtttgggccatgggtgtgacactatactgctttgtctttggccagtgcccattcatggacgagcggatcatgtgtttacacagtaagatcaagagtcaggccctggaatttccagaccagcccgacatagctgaggacttgaaggacctgatcacccgtatgctggacaagaaccccgagtcgaggatcgtggtgccggaaatcaagatcctggtgaagaccatgatacgtaaacgctcctttgggaacccattcgagggcagccggcgggaggaacgctcactgtcagcgcctggaaacttgctcacgaagcaaggcagcgaagacaacctccagggcaccgacccgccccccgtgggggaggaggaagtgctcttgtgagaggcagtccctgcgtggaaagttgctgggcccccgcccccggctcccccgcacgcatgcatccactgcggccggaggaggccatggagcccgagtagctgcctggatcgctcgacctcgcatgcgcgccgcgtcgcctctggggggctgctgcaccgcgtttccatagcagcatgtcctacggaaacccagcacgtgtgtagagcctcgatcgtcatctctggttatttgttttttcctttgttgttttaaaggggacaaaaaaaaaaaaaggacttgactccatgacgtcgaccgtggccgctggctggctggacaggcgggtgtgaggagttgcagacccaaacccacgtgcattttgggacaattgctttttaaaacgtttttatgccaaaaatccttcattgtgattttcagaaccacgtcagatataccaagtgactgtgtgtggggtttgacaactgtggaaaggcgagcagaaaactccggcggtctgaggccatggaggtggttgctgcatttgagagggagtagggggctagatgtggctcctagtgcaaaccggaaaccatggcaccttccagagccgtggtctcaaggagtcagagcagggctggccctcagtagctgcagggagctttgatgcaacttatttgtaagaaggatttttaaattttttatgggtagaattgtagtcaggaaaacagaaagggcttgaaatttaataagtgctgctggaaggggattttccaagcctggaagggtattcagcagctgtggtggggaaacatttctcctgaaagactgaacgtgtttcttcatgacagctgctcaaagcaggtttctgagatagctgaccgagctctggtaaatctctttgtcaaattacgaaaacttcagggtgaaatcctatgcttccatgtacattacatggcttaagattaaacaaaaacatttttcaagtctctaactagagtgaactctagagcacagtagttcagaaactatttagagcttccaggatatatttcacagcttcaggcatgtgatcagttagagccgatgaaacctatgcccgcctgtatatatattagcagcttagctagttcataacctgtatattctaaagactgctaaggttttgttttcattttaaatcctagctgattgttgtggtcaatgaaatacccagtttctggagggccaggtgggaaatgctttcactggaccaacacacaaatgatcatcctgaggatctgagcttccctagactccacacaataaccttggggcacccttttagagaagactgttgaaacccacagcactcgttggggtatgaggaaaccagggcttggcacaggaagttcccctttgtagctaaaagtccagaaagaaagggttcatctttttgacttccaactgatattgggaagtttggttgaggttcaagtgtgactccttccagagccacaggtaggggagtgtgaagttgagggggaggaaagctggaaggactctgccttgggagattcccagctctgctttccagcgcttggtggaatctgggctggggaaagacggcaccgggaaactctgcttccccattgtttccatctgatcagctgtggtgtgaggacttctcagacaaaggcaaggcctcgtgcccctgcccagcccattcatggagccctgggccttcttggcttccatagatcctaagctcttgactgtagtttagccagacttgttttgctatcttataagcagttcagaattagggaatgctggttttgaagagcaaaggacaggtagtctagagagggtcgtctggcctgcttgctgggtctttgtaacccagcacttcctcttgccctcctggctttatgtttatggggagaggactcaatagctccaccccttctggcaccagatggggcttggttagtttgcaataagcaccttgcagaggttaaagccagcgggtccctagtcttaggcccagcctgcttgtgtgggctctggcctggcctggtggctggcccagggggcagcagtgcttagagcttctgcagggcttctcttgtttacacagctgcatcagacaatgccatttctccccaccacggaaccttccatctaagatttcttccagggaatgccagcaatcaggcagcacccagctgtgggggcagtggggtgggggagacccacattgatgactttttttttttcttttaatgaagaaacaccaaagaaagctgtggaaaggacctgccccacatgaaaaggataagccaagatggctgtaaacacagagcatttgagctgccactcttggagcacattgatttttcaaaagccagctctgtcaggaaaggaggtgctgttatgagcagctcttccagtgggcaaagaggacgcccataatttcttccattgctagctcatctgtgggaccaatttggtgtaagcaacctgtggcctgcacttgtggcctcgaaggaagcacaaaccctccatccacttcccatttcctctgcccttttccacctcccccttccatcccaccagctgccagtggctcccagaaagccttattgagccccttgttgacacttggggctgcggaggcctctccctactggtctggcctttcctgagaggcaggtcttccgtcctcagagcctttctggaacaaggagaatgcctgtgcaggtggacacacaggcctggcctgtcgctctcacttgtcttccagcggggagcttcacgttgccgagtggaagaaccatgacctccacttgcttccaaggtgctagggaagtttcagggtacgctggttcccctctccagctggaggccgagtttctggggactgcagatttttctactctgtgatcgattcaatgcccgatgcttctgtttcattcccgaccctttctactatgcattttccttttatcaggtgtataaagttaaatactgtgtatttatcactaaaaagtacatgaacttaagagacaactaagcctttcgtgtttttccacaggtgtttaagcttctctgtacagttgaaataaacagacagcaaaatggt

SEQ ID NO: 113409 - DNA, 2494 bp, Homo sapiens
  Payload ID: 2169
  Gene Symbol: CASK
  Gene Name: calcium/calmodulin-dependent serine protein kinase (MAGUK family)
  ENST ID: ENST00000378154
  CDS Start-End: 476-2248
gccgccgccacctccctccgcggcgatcctcgctccatggtcctgccgcggccccctctgtagcccgagctgctccgcgacgcgacggagccggcctcggacagagggagcggtcgcggcctcgcggcccgcgcgggctgacgagcggagagcgcgacgccgcgcggtccccgaggatccgcacgccgggcagcgcggcccgagcagcgcgagaagcagcgggcgggcgggcggcgccgggcccgggccgccctcgctcccgcgccccggccccgccgcccgcgccggggcggtcgcctgcagaggaaggcgccgcagtctctgggcctcgcggccccactcgagcgtcctcggcaccgagggctcgcgggtcctgaggggaggaggcgatcccggggctgggcactgagctcttgggcgcccccacccccgttttcgaagccctccacgctgcggccgctatcccctccggaccatggccgacgacgacgtgctgttcgaggatgtgtacgagctgtgcgaggtgatcggaaagggtcccttcagtgttgtacgacgatgtatcaacagagaaactgggcaacaatttgctgtaaaaattgttgatgtagccaagttcacatcaagtccagggttaagtacagaagatctaaagcgggaagccagtatctgtcatatgctgaaacatccacacattgtagagttattggagacatatagctcagatggaatgctttacatggttttcgaatttatggatggagcagatctgtgttttgaaatcgtaaagcgagctgacgctggttttgtgtacagtgaagctgtagccagccattatatgagacagatactggaagctctacgctactgccatgataataacataattcacagggatgtgaagccccactgtgttctccttgcctcaaaagaaaactcggcacctgttaaacttggaggctttggggtagctattcaattaggggagtctggacttgtagctggaggacgtgttggaacacctcattttatggcaccagaagtggtcaaaagagagccttacggaaagcctgtagacgtctgggggtgcggtgtgatcctttttatcctgctcagtggttgtttgcctttttacggaaccaaggaaagattgtttgaaggcattattaaaggaaaatataagatgaatccaaggcagtggagccatatctctgaaagtgccaaagacctagtacgtcgcatgctgatgctggatccagctgaaaggatcactgtttatgaagcactgaatcacccatggcttaaggagcgggatcgttacgcctacaagattcatcttccagaaacagtagagcagctgaggaaattcaatgcaaggaggaaactaaagggtgcagtactagccgctgtgtcaagtcacaaattcaactcattctatggggatccccctgaagagttaccagatttctccgaagaccctacctcctcaggacttctagcagcagaaagagcagtctcacaggtgctggacagcctggaagagattcatgcgcttacagactgcagtgaaaaggacctagattttctacacagtgttttccaggatcagcatcttcacacactactagatctgtatgacaaaattaacacaaagtcttcaccacaaatcaggaatcctccaagcgatgcagtacagagagccaaagaggtattggaagaaatttcatgttaccctgagaataacgacgcaaaggaactaaagcgtattttaacacaacctcatttcatggccttacttcagactcacgacgtagtggcacatgaagtttacagtgatgaagcattgagggtcacacctcctcccacctctccctatttaaacggcgattctccagaaagtgctaacggagacatggatatggagaatgtgaccagagttcggctggtacagtttcaaaagaacacagatgaaccaatgggaatcactttaaaaatgaatgaactaaatcattgtattgttgcaagaattatgcatgggggcatgattcacaggcaaggtacacttcatgttggtgatgaaattcgagaaatcaatggcatcagtgtggctaaccaaacagtggaacaactgcaaaaaatgcttagggaaatgcgggggagtattaccttcaagattgtgccaagttaccgcactcagtcttcgtcctgtgaggtaatgactctaacaaaccacccccatctgctctgagttcttaactaactgtctgctgatggctgtatgtttttgctttctgggaaattgtttctgcctgtgctgttagatcactgcacaccaattttacaacaaagataacggaacagagtaggtcccatccacctactcagccctgcttccatgtggatctcctcagcactttgaactttttgcaggctgaaatctgagcaaaatgtagagaagttacaaatgatgacataaggcttaataaggaaaaaa

SEQ ID NO: 113410 - DNA, 3848 bp, Homo sapiens
  Payload ID: 2169
  Gene Symbol: CASK
  Gene Name: calcium/calmodulin-dependent serine protein kinase (MAGUK family)
  Uniprot ID: O14936
  ENST ID: ENST00000378158
  CDS Start-End: 352-3081
cggcccgcgcgggctgacgagcggagagcgcgacgccgcgcggtccccgaggatccgcacgccgggcagcgcggcccgagcagcgcgagaagcagcgggcgggcgggcggcgccgggcccgggccgccctcgctcccgcgccccggccccgccgcccgcgccggggcggtcgcctgcagaggaaggcgccgcagtctctgggcctcgcggccccactcgagcgtcctcggcaccgagggctcgcgggtcctgaggggaggaggcgatcccggggctgggcactgagctcttgggcgcccccacccccgttttcgaagccctccacgctgcggccgctatcccctccggaccatggccgacgacgacgtgctgttcgaggatgtgtacgagctgtgcgaggtgatcggaaagggtcccttcagtgttgtacgacgatgtatcaacagagaaactgggcaacaatttgctgtaaaaattgttgatgtagccaagttcacatcaagtccagggttaagtacagaagatctaaagcgggaagccagtatctgtcatatgctgaaacatccacacattgtagagttattggagacatatagctcagatggaatgctttacatggttttcgaatttatggatggagcagatctgtgttttgaaatcgtaaagcgagctgacgctggttttgtgtacagtgaagctgtagccagccattatatgagacagatactggaagctctacgctactgccatgataataacataattcacagggatgtgaagccccactgtgttctccttgcctcaaaagaaaactcggcacctgttaaacttggaggctttggggtagctattcaattaggggagtctggacttgtagctggaggacgtgttggaacacctcattttatggcaccagaagtggtcaaaagagagccttacggaaagcctgtagacgtctgggggtgcggtgtgatcctttttatcctgctcagtggttgtttgcctttttacggaaccaaggaaagattgtttgaaggcattattaaaggaaaatataagatgaatccaaggcagtggagccatatctctgaaagtgccaaagacctagtacgtcgcatgctgatgctggatccagctgaaaggatcactgtttatgaagcactgaatcacccatggcttaaggagcgggatcgttacgcctacaagattcatcttccagaaacagtagagcagctgaggaaattcaatgcaaggaggaaactaaagggtgcagtactagccgctgtgtcaagtcacaaattcaactcattctatggggatccccctgaagagttaccagatttctccgaagaccctacctcctcaggacttctagcagcagaaagagcagtctcacaggtgctggacagcctggaagagattcatgcgcttacagactgcagtgaaaaggacctagattttctacacagtgttttccaggatcagcatcttcacacactactagatctgtatgacaaaattaacacaaagtcttcaccacaaatcaggaatcctccaagcgatgcagtacagagagccaaagaggtattggaagaaatttcatgttaccctgagaataacgacgcaaaggaactaaagcgtattttaacacaacctcatttcatggccttacttcagactcacgacgtagtggcacatgaagtttacagtgatgaagcattgagggtcacacctcctcccacctctccctatttaaacggcgattctccagaaagtgctaacggagacatggatatggagaatgtgaccagagttcggctggtacagtttcaaaagaacacagatgaaccaatgggaatcactttaaaaatgaatgaactaaatcattgtattgttgcaagaattatgcatgggggcatgattcacaggcaaggtacacttcatgttggtgatgaaattcgagaaatcaatggcatcagtgtggctaaccaaacagtggaacaactgcaaaaaatgcttagggaaatgcgggggagtattaccttcaagattgtgccaagttaccgcactcagtcttcgtcctgtgagagagattccccttccacttccagacagtccccagctaatggtcatagcagcactaacaattctgtttcgatctatgtaagagcacaatttgaatatgatccagccaaggatgacctcatcccctgtaaagaagctggcattcgattcagagttggtgacatcatccagattattagtaaggatgatcataattggtggcagggtaaactggaaaactccaaaaatggaactgcaggtctcattccttctcctgaacttcaggaatggcgagtagcttgcattgccatggagaagaccaaacaggagcagcaggccagctgtacttggtttggcaagaaaaagaagcagtacaaagataaatatttggcaaagcacaatgcagatcttgtcacatatgaagaagtagtaaaactgccagcattcaagaggaaaacactagtcttattaggcgcacatggtgttgggagaagacacataaaaaacactctcatcacaaagcacccagaccggtttgcgtaccctattccacatacaaccagacctccaaagaaagacgaagaaaatggaaagaattattactttgtatctcatgaccaaatgatgcaagacatctctaataacgagtacttggagtacggcagccacgaggatgcgatgtatgggacaaaactggagaccatccggaagatccacgagcaggggctgattgcaatactggacgtggagcctcaggcactgaaggtcctgagaactgcagagtttgctccttttgttgttttcattgctgcaccaactattactccaggtttaaatgaggatgaatctcttcagcgtctgcagaaggagtctgacatcttacagagaacatatgcacactacttcgatctcacaattatcaacaatgaaattgatgagacaatcagacatctggaggaagctgttgagctcgtgtgcacagccccacagtgggtccctgtctcctgggtctattaggcctctccccagatatctgagcataactgggagcacctcatttgtggaaaagcctctttgttatcggccttgtgtcagcaggtcatggtccctagagactacctagttgtagtgtgacctacatttataattattgtcatgtccgaatagataggaggagaaaaacaattacacactaatttaaagagacagtatcttttttaatcagttctcctaaactttaataaaatgtatctttaaatgtatgtattattcaatcctttggaatgttatatttttggaaatcatagctttttatttccaaggcccctaaaaactgcacaaaatagatgctgctttctataatctattttaataataataaacaatgattctgttaccttgactgggggtggaacactacattctttttagagtctgattttatggattggaatattgggatatctttctttcctttatttatttgaaataattagtgtagtgattacaaaacagtcataaatttttaaaggccttttttctctctttttttttttttagaatagtatttttttttaagtcctttatgtaacatccagataatgtgatactgtctctttgaagcaccctgtaaaccttttagagatttgaagttgggtcttgactcttaatgcatgtggacagtcgcgagcgtttatgctgtcggtgtgtctgtgttggacaaaacaatctgtaatctacagcaaagtacattctacattccgttcatggggcacacccagggg

SEQ ID NO: 113411 - DNA, 4411 bp, Homo sapiens
  Payload ID: 2169
  Gene Symbol: CASK
  Gene Name: calcium/calmodulin-dependent serine protein kinase (MAGUK family)
  Uniprot ID: O14936
  ENST ID: ENST00000378163
  CDS Start-End: 476-3256
gccgccgccacctccctccgcggcgatcctcgctccatggtcctgccgcggccccctctgtagcccgagctgctccgcgacgcgacggagccggcctcggacagagggagcggtcgcggcctcgcggcccgcgcgggctgacgagcggagagcgcgacgccgcgcggtccccgaggatccgcacgccgggcagcgcggcccgagcagcgcgagaagcagcgggcgggcgggcggcgccgggcccgggccgccctcgctcccgcgccccggccccgccgcccgcgccggggcggtcgcctgcagaggaaggcgccgcagtctctgggcctcgcggccccactcgagcgtcctcggcaccgagggctcgcgggtcctgaggggaggaggcgatcccggggctgggcactgagctcttgggcgcccccacccccgttttcgaagccctccacgctgcggccgctatcccctccggaccatggccgacgacgacgtgctgttcgaggatgtgtacgagctgtgcgaggtgatcggaaagggtcccttcagtgttgtacgacgatgtatcaacagagaaactgggcaacaatttgctgtaaaaattgttgatgtagccaagttcacatcaagtccagggttaagtacagaagatctaaagcgggaagccagtatctgtcatatgctgaaacatccacacattgtagagttattggagacatatagctcagatggaatgctttacatggttttcgaatttatggatggagcagatctgtgttttgaaatcgtaaagcgagctgacgctggttttgtgtacagtgaagctgtagccagccattatatgagacagatactggaagctctacgctactgccatgataataacataattcacagggatgtgaagccccactgtgttctccttgcctcaaaagaaaactcggcacctgttaaacttggaggctttggggtagctattcaattaggggagtctggacttgtagctggaggacgtgttggaacacctcattttatggcaccagaagtggtcaaaagagagccttacggaaagcctgtagacgtctgggggtgcggtgtgatcctttttatcctgctcagtggttgtttgcctttttacggaaccaaggaaagattgtttgaaggcattattaaaggaaaatataagatgaatccaaggcagtggagccatatctctgaaagtgccaaagacctagtacgtcgcatgctgatgctggatccagctgaaaggatcactgtttatgaagcactgaatcacccatggcttaaggagcgggatcgttacgcctacaagattcatcttccagaaacagtagagcagctgaggaaattcaatgcaaggaggaaactaaagggtgcagtactagccgctgtgtcaagtcacaaattcaactcattctatggggatccccctgaagagttaccagatttctccgaagaccctacctcctcaggacttctagcagcagaaagagcagtctcacaggtgctggacagcctggaagagattcatgcgcttacagactgcagtgaaaaggacctagattttctacacagtgttttccaggatcagcatcttcacacactactagatctgtatgacaaaattaacacaaagtcttcaccacaaatcaggaatcctccaagcgatgcagtacagagagccaaagaggtattggaagaaatttcatgttaccctgagaataacgacgcaaaggaactaaagcgtattttaacacaacctcatttcatggccttacttcagactcacgacgtagtggcacatgaagtttacagtgatgaagcattgagggtcacacctcctcccacctctccctatttaaacggcgattctccagaaagtgctaacggagacatggatatggagaatgtgaccagagttcggctggtacagtttcaaaagaacacagatgaaccaatgggaatcactttaaaaatgaatgaactaaatcattgtattgttgcaagaattatgcatgggggcatgattcacaggcaaggtacacttcatgttggtgatgaaattcgagaaatcaatggcatcagtgtggctaaccaaacagtggaacaactgcaaaaaatgcttagggaaatgcgggggagtattaccttcaagattgtgccaagttaccgcactcagtcttcgtcctgtgagagagattccccttccacttccagacagtccccagctaatggtcatagcagcactaacaattctgtttcggacttgccatcaactacccaaccaaaaggacgacagatctatgtaagagcacaatttgaatatgatccagccaaggatgacctcatcccctgtaaagaagctggcattcgattcagagttggtgacatcatccagattattagtaaggatgatcataattggtggcagggtaaactggaaaactccaaaaatggaactgcaggtctcattccttctcctgaacttcaggaatggcgagtagcttgcattgccatggagaagaccaaacaggagcagcaggccagctgtacttggtttggcaagaaaaagaagcagtacaaagataaatatttggcaaagcacaatgcagtgtttgatcaattagatcttgtcacatatgaagaagtagtaaaactgccagcattcaagaggaaaacactagtcttattaggcgcacatggtgttgggagaagacacataaaaaacactctcatcacaaagcacccagaccggtttgcgtaccctattccacatacaaccagacctccaaagaaagacgaagaaaatggaaagaattattactttgtatctcatgaccaaatgatgcaagacatctctaataacgagtacttggagtacggcagccacgaggatgcgatgtatgggacaaaactggagaccatccggaagatccacgagcaggggctgattgcaatactggacgtggagcctcaggcactgaaggtcctgagaactgcagagtttgctccttttgttgttttcattgctgcaccaactattactccaggtttaaatgaggatgaatctcttcagcgtctgcagaaggagtctgacatcttacagagaacatatgcacactacttcgatctcacaattatcaacaatgaaattgatgagacaatcagacatctggaggaagctgttgagctcgtgtgcacagccccacagtgggtccctgtctcctgggtctattaggcctctccccagatatctgagcataactgggagcacctcatttgtggaaaagcctctttgttatcggccttgtgtcagcaggtcatggtccctagagactacctagttgtagtgtgacctacatttataattattgtcatgtccgaatagataggaggagaaaaacaattacacactaatttaaagagacagtatcttttttaatcagttctcctaaactttaataaaatgtatctttaaatgtatgtattattcaatcctttggaatgttatatttttggaaatcatagctttttatttccaaggcccctaaaaactgcacaaaatagatgctgctttctataatctattttaataataataaacaatgattctgttaccttgactgggggtggaacactacattctttttagagtctgattttatggattggaatattgggatatctttctttcctttatttatttgaaataattagtgtagtgattacaaaacagtcataaatttttaaaggccttttttctctctttttttttttttagaatagtatttttttttaagtcctttatgtaacatccagataatgtgatactgtctctttgaagcaccctgtaaaccttttagagatttgaagttgggtcttgactcttaatgcatgtggacagtcgcgagcgtttatgctgtcggtgtgtctgtgttggacaaaacaatctgtaatctacagcaaagtacattctacattccgttcatggggcacacccaggggaataagaataaaatgctattatgactaagttgtaaacctatgcacatcccttgcattttgggcaactttataaaaaaaaagaaactgatttttattaataataatcatgtagtgaaatgtgtttgtaattttgtctcaatttaatttgttgtaaggtggggtggggggaattgctggtttcaccatttcagatctgtgttgtctaagagtattaacgttttaattaagcaaagaaatgatttttaatctgtatgtaattgttttaaagcacccattttaagagaaaatactgtgcaatgaagaaaccagtttaggcatttgctataaactgaaatattccaaaagaatcatctataacagccctgtaaattcctttaaaatgataact

SEQ ID NO: 113412 - DNA, 3123 bp, Homo sapiens
  Payload ID: 2169
  Gene Symbol: CASK
  Gene Name: calcium/calmodulin-dependent serine protein kinase (MAGUK family)
  Uniprot ID: O14936
  ENST ID: ENST00000378166
  CDS Start-End: 28-2793
cgctgcggccgctatcccctccggaccatggccgacgacgacgtgctgttcgaggatgtgtacgagctgtgcgaggtgatcggaaagggtcccttcagtgttgtacgacgatgtatcaacagagaaactgggcaacaatttgctgtaaaaattgttgatgtagccaagttcacatcaagtccagggttaagtacagaagatctaaagcgggaagccagtatctgtcatatgctgaaacatccacacattgtagagttattggagacatatagctcagatggaatgctttacatggttttcgaatttatggatggagcagatctgtgttttgaaatcgtaaagcgagctgacgctggttttgtgtacagtgaagctgtagccagccattatatgagacagatactggaagctctacgctactgccatgataataacataattcacagggatgtgaagccccactgtgttctccttgcctcaaaagaaaactcggcacctgttaaacttggaggctttggggtagctattcaattaggggagtctggacttgtagctggaggacgtgttggaacacctcattttatggcaccagaagtggtcaaaagagagccttacggaaagcctgtagacgtctgggggtgcggtgtgatcctttttatcctgctcagtggttgtttgcctttttacggaaccaaggaaagattgtttgaaggcattattaaaggaaaatataagatgaatccaaggcagtggagccatatctctgaaagtgccaaagacctagtacgtcgcatgctgatgctggatccagctgaaaggatcactgtttatgaagcactgaatcacccatggcttaaggagcgggatcgttacgcctacaagattcatcttccagaaacagtagagcagctgaggaaattcaatgcaaggaggaaactaaagggtgcagtactagccgctgtgtcaagtcacaaattcaactcattctatggggatccccctgaagagttaccagatttctccgaagaccctacctcctcaggacttctagcagcagaaagagcagtctcacaggtgctggacagcctggaagagattcatgcgcttacagactgcagtgaaaaggacctagattttctacacagtgttttccaggatcagcatcttcacacactactagatctgtatgacaaaattaacacaaagtcttcaccacaaatcaggaatcctccaagcgatgcagtacagagagccaaagaggtattggaagaaatttcatgttaccctgagaataacgacgcaaaggaactaaagcgtattttaacacaacctcatttcatggccttacttcagactcacgacgtagtggcacatgaagtttacagtgatgaagcattgagggtcacacctcctcccacctctccctatttaaacggcgattctccagaaagtgctaacggagacatggatatggagaatgtgaccagagttcggctggtacagtttcaaaagaacacagatgaaccaatgggaatcactttaaaaatgaatgaactaaatcattgtattgttgcaagaattatgcatgggggcatgattcacaggcaaggtacacttcatgttggtgatgaaattcgagaaatcaatggcatcagtgtggctaaccaaacagtggaacaactgcaaaaaatgcttagggaaatgcgggggagtattaccttcaagattgtgccaagttaccgcactcagtcttcgtcctgtgagagagattccccttccacttccagacagtccccagctaatggtcatagcagcactaacaattctgtttcggacttgccatcaactacccaaccaaaaggacgacagatctatgtaagagcacaatttgaatatgatccagccaaggatgacctcatcccctgtaaagaagctggcattcgattcagagttggtgacatcatccagattattagtaaggatgatcataattggtggcagggtaaactggaaaactccaaaaatggaactgcaggtctcattccttctcctgaacttcaggaatggcgagtagcttgcattgccatggagaagaccaaacaggagcagcaggccagctgtacttggtttggcaagaaaaagaagcagtacaaagataaatatttggcaaagcacaatgcagatcttgtcacatatgaagaagtagtaaaactgccagcattcaagaggaaaacactagtcttattaggcgcacatggtgttgggagaagacacataaaaaacactctcatcacaaagcacccagaccggtttgcgtaccctattccacatacaaccagacctccaaagaaagacgaagaaaatggaaagaattattactttgtatctcatgaccaaatgatgcaagacatctctaataacgagtacttggagtacggcagccacgaggatgcgatgtatgggacaaaactggagaccatccggaagatccacgagcaggggctgattgcaatactggacgtggagcctcaggcactgaaggtcctgagaactgcagagtttgctccttttgttgttttcattgctgcaccaactattactccaggtttaaatgaggatgaatctcttcagcgtctgcagaaggagtctgacatcttacagagaacatatgcacactacttcgatctcacaattatcaacaatgaaattgatgagacaatcagacatctggaggaagctgttgagctcgtgtgcacagccccacagtgggtccctgtctcctgggtctattaggcctctccccagatatctgagcataactgggagcacctcatttgtggaaaagcctctttgttatcggccttgtgtcagcaggtcatggtccctagagactacctagttgtagtgtgacctacatttataattattgtcatgtccgaatagataggaggagaaaaacaattacacactaatttaaagagacagtatcttttttaatcagttctcctaaactttaataaaatgtatctttaaatgtatgtattattcaatcctttggaatgttatatttttggaaatcatagctttttatttccaaggcccctaaaaactgcacaaaataga

SEQ ID NO: 113413 - DNA, 2017 bp, Homo sapiens
  Payload ID: 2169
  Gene Symbol: CASK
  Gene Name: calcium/calmodulin-dependent serine protein kinase (MAGUK family)
  ENST ID: ENST00000378168
  CDS Start-End: 1-1146
gatgaaattcgagaaatcaatggcatcagtgtggctaaccaaacagtggaacaactgcaaaaaatgcttagggaaatgcgggggagtattaccttcaagattgtgccaagttaccgcactcagtcttcgtcctgtgagagagattccccttccacttccagacagtccccagctaatggtcatagcagcactaacaattctgtttcgatctatgtaagagcacaatttgaatatgatccagccaaggatgacctcatcccctgtaaagaagctggcattcgattcagagttggtgacatcatccagattattagtaaggatgatcataattggtggcagggtaaactggaaaactccaaaaatggaactgcaggtctcattccttctcctgaacttcaggaatggcgagtagcttgcattgccatggagaagaccaaacaggagcagcaggccagctgtacttggtttggcaagaaaaagaagcagtacaaagataaatatttggcaaagcacaatgcagtgtttgatcaattagatcttgtcacatatgaagaagtagtaaaactgccagcattcaagaggaaaacactagtcttattaggcgcacatggtgttgggagaagacacataaaaaacactctcatcacaaagcacccagaccggtttgcgtaccctattccacatacaaccagacctccaaagaaagacgaagaaaatggaaagaattattactttgtatctcatgaccaaatgatgcaagacatctctaataacgagtacttggagtacggcagccacgaggatgcgatgtatgggacaaaactggagaccatccggaagatccacgagcaggggctgattgcaatactggacgtggagcctcaggcactgaaggtcctgagaactgcagagtttgctccttttgttgttttcattgctgcaccaactattactccaggtttaaatgaggatgaatctcttcagcgtctgcagaaggagtctgacatcttacagagaacatatgcacactacttcgatctcacaattatcaacaatgaaattgatgagacaatcagacatctggaggaagctgttgagctcgtgtgcacagccccacagtgggtccctgtctcctgggtctattaggcctctccccagatatctgagcataactgggagcacctcatttgtggaaaagcctctttgttatcggccttgtgtcagcaggtcatggtccctagagactacctagttgtagtgtgacctacatttataattattgtcatgtccgaatagataggaggagaaaaacaattacacactaatttaaagagacagtatcttttttaatcagttctcctaaactttaataaaatgtatctttaaatgtatgtattattcaatcctttggaatgttatatttttggaaatcatagctttttatttccaaggcccctaaaaactgcacaaaatagatgctgctttctataatctattttaataataataaacaatgattctgttaccttgactgggggtggaacactacattctttttagagtctgattttatggattggaatattgggatatctttctttcctttatttatttgaaataattagtgtagtgattacaaaacagtcataaatttttaaaggccttttttctctctttttttttttttagaatagtatttttttttaagtcctttatgtaacatccagataatgtgatactgtctctttgaagcaccctgtaaaccttttagagatttgaagttgggtcttgactcttaatgcatgtggacagtcgcgagcgtttatgctgtcggtgtgtctgtgttggacaaaacaatctgtaatctacagcaaagtacattctacattccgttcatggggcacacccaggggaataagaataaaatgctattatgactaagttgtaaacctatgcacatcccttgcattttgggcaactttataaaaaaaaagaaactgatttttattaataataa

SEQ ID NO: 113414 - DNA, 2809 bp, Homo sapiens
  Payload ID: 2169
  Gene Symbol: CASK
  Gene Name: calcium/calmodulin-dependent serine protein kinase (MAGUK family)
  ENST ID: ENST00000378179
  CDS Start-End: 360-1916
gccagaaagcattctttcattttactctgtattcatgctattgaaagttgcttctgtcagaggaaacaaacactgtgattgaggaaatattgatgaattttaaatgacaaggaaattgccacattgacagaattttggtccatctatttaaagatgattttttgaaaagatatgcataagactcatattctgacaagtttcacagaacaattcagaggttattaccaagaggatcccactgaaatcatcagcctgcctttttaaaagaaaaatattgtttagtgaaataataaatatgaagctctgatttttagcaaagaattgtgagtgtttactggattttcttctttgctttttagctgtatgacaaaattaacacaaagtcttcaccacaaatcaggaatcctccaagcgatgcagtacagagagccaaagaggtattggaagaaatttcatgttaccctgagaataacgacgcaaaggaactaaagcgtattttaacacaacctcatttcatggccttacttcagactcacgacgtagtggcacatgaagtttacagtgatgaagcattgagggtcacacctcctcccacctctccctatttaaacggcgattctccagaaagtgctaacggagacatggatatggagaatgtgaccagagttcggctggtacagtttcaaaagaacacagatgaaccaatgggaatcactttaaaaatgaatgaactaaatcattgtattgttgcaagaattatgcatgggggcatgattcacaggcaaggtacacttcatgttggtgatgaaattcgagaaatcaatggcatcagtgtggctaaccaaacagtggaacaactgcaaaaaatgcttagggaaatgcgggggagtattaccttcaagattgtgccaagttaccgcactcagtcttcgtcctgtgaggacttgccatcaactacccaaccaaaaggacgacagatctatgtaagagcacaatttgaatatgatccagccaaggatgacctcatcccctgtaaagaagctggcattcgattcagagttggtgacatcatccagattattagtaaggatgatcataattggtggcagggtaaactggaaaactccaaaaatggaactgcaggtctcattccttctcctgaacttcaggaatggcgagtagcttgcattgccatggagaagaccaaacaggagcagcaggccagctgtacttggtttggcaagaaaaagaagcagtacaaagataaatatttggcaaagcacaatgcagtgtttgatcaattagatcttgtcacatatgaagaagtagtaaaactgccagcattcaagaggaaaacactagtcttattaggcgcacatggtgttgggagaagacacataaaaaacactctcatcacaaagcacccagaccggtttgcgtaccctattccacatacaaccagacctccaaagaaagacgaagaaaatggaaagaattattactttgtatctcatgaccaaatgatgcaagacatctctaataacgagtacttggagtacggcagccacgaggatgcgatgtatgggacaaaactggagaccatccggaagatccacgagcaggggctgattgcaatactggacgtggagcctcaggcactgaaggtcctgagaactgcagagtttgctccttttgttgttttcattgctgcaccaactattactccaggtttaaatgaggatgaatctcttcagcgtctgcagaaggagtctgacatcttacagagaacatatgcacactacttcgatctcacaattatcaacaatgaaattgatgagacaatcagacatctggaggaagctgttgagctcgtgtgcacagccccacagtgggtccctgtctcctgggtctattaggcctctccccagatatctgagcataactgggagcacctcatttgtggaaaagcctctttgttatcggccttgtgtcagcaggtcatggtccctagagactacctagttgtagtgtgacctacatttataattattgtcatgtccgaatagataggaggagaaaaacaattacacactaatttaaagagacagtatcttttttaatcagttctcctaaactttaataaaatgtatctttaaatgtatgtattattcaatcctttggaatgttatatttttggaaatcatagctttttatttccaaggcccctaaaaactgcacaaaatagatgctgctttctataatctattttaataataataaacaatgattctgttaccttgactgggggtggaacactacattctttttagagtctgattttatggattggaatattgggatatctttctttcctttatttatttgaaataattagtgtagtgattacaaaacagtcataaatttttaaaggccttttttctctctttttttttttttagaatagtatttttttttaagtcctttatgtaacatccagataatgtgatactgtctctttgaagcaccctgtaaaccttttagagatttgaagttgggtcttgactcttaatgcatgtggacagtcgcgagcgtttatgctgtcggtgtgtctgtgttggacaaaacaatctgtaatctacagcaaagtacattctacattccgttcatggggcacacccaggggaataagaataaaatgctattatgactaagttgtaaacctatgcacatcccttgcattttgggcaactttataaaaaaaaagaaactgatttttattaataataatcatgtagtgaaatgtgtttgt

SEQ ID NO: 113415 - DNA, 2800 bp, Homo sapiens
  Payload ID: 2169
  Gene Symbol: CASK
  Gene Name: calcium/calmodulin-dependent serine protein kinase (MAGUK family)
  Uniprot ID: O14936
  ENST ID: ENST00000442742
  CDS Start-End: 20-2716
ccgctatcccctccggaccatggccgacgacgacgtgctgttcgaggatgtgtacgagctgtgcgaggtgatcggaaagggtcccttcagtgttgtacgacgatgtatcaacagagaaactgggcaacaatttgctgtaaaaattgttgatgtagccaagttcacatcaagtccagggttaagtacagaagatctaaagcgggaagccagtatctgtcatatgctgaaacatccacacattgtagagttattggagacatatagctcagatggaatgctttacatggttttcgaatttatggatggagcagatctgtgttttgaaatcgtaaagcgagctgacgctggttttgtgtacagtgaagctgtagccagccattatatgagacagatactggaagctctacgctactgccatgataataacataattcacagggatgtgaagccccactgtgttctccttgcctcaaaagaaaactcggcacctgttaaacttggaggctttggggtagctattcaattaggggagtctggacttgtagctggaggacgtgttggaacacctcattttatggcaccagaagtggtcaaaagagagccttacggaaagcctgtagacgtctgggggtgcggtgtgatcctttttatcctgctcagtggttgtttgcctttttacggaaccaaggaaagattgtttgaaggcattattaaaggaaaatataagatgaatccaaggcagtggagccatatctctgaaagtgccaaagacctagtacgtcgcatgctgatgctggatccagctgaaaggatcactgtttatgaagcactgaatcacccatggcttaaggagcgggatcgttacgcctacaagattcatcttccagaaacagtagagcagctgaggaaattcaatgcaaggaggaaactaaagggtgcagtactagccgctgtgtcaagtcacaaattcaactcattctatggggatccccctgaagagttaccagatttctccgaagaccctacctcctcaggacttctagcagcagaaagagcagtctcacaggtgctggacagcctggaagagattcatgcgcttacagactgcagtgaaaaggacctagattttctacacagtgttttccaggatcagcatcttcacacactactagatctgtatgacaaaattaacacaaagtcttcaccacaaatcaggaatcctccaagcgatgcagtacagagagccaaagaggtattggaagaaatttcatgttaccctgagaataacgacgcaaaggaactaaagcgtattttaacacaacctcatttcatggccttacttcagactcacgacgtagtggcacatgaagtttacagtgatgaagcattgagggtcacacctcctcccacctctccctatttaaacggcgattctccagaaagtgctaacggagacatggatatggagaatgtgaccagagttcggctggtacagtttcaaaagaacacagatgaaccaatgggaatcactttaaaaatgaatgaactaaatcattgtattgttgcaagaattatgcatgggggcatgattcacaggcaaggtacacttcatgttggtgatgaaattcgagaaatcaatggcatcagtgtggctaaccaaacagtggaacaactgcaaaaaatgcttagggaaatgcgggggagtattaccttcaagattgtgccaagttaccgcactcagtcttcgtcctgtgaggacttgccatcaactacccaaccaaaaggacgacagatctatgtaagagcacaatttgaatatgatccagccaaggatgacctcatcccctgtaaagaagctggcattcgattcagagttggtgacatcatccagattattagtaaggatgatcataattggtggcagggtaaactggaaaactccaaaaatggaactgcaggtctcattccttctcctgaacttcaggaatggcgagtagcttgcattgccatggagaagaccaaacaggagcagcaggccagctgtacttggtttggcaagaaaaagaagcagtacaaagataaatatttggcaaagcacaatgcagatcttgtcacatatgaagaagtagtaaaactgccagcattcaagaggaaaacactagtcttattaggcgcacatggtgttgggagaagacacataaaaaacactctcatcacaaagcacccagaccggtttgcgtaccctattccacatacaaccagacctccaaagaaagacgaagaaaatggaaagaattattactttgtatctcatgaccaaatgatgcaagacatctctaataacgagtacttggagtacggcagccacgaggatgcgatgtatgggacaaaactggagaccatccggaagatccacgagcaggggctgattgcaatactggacgtggagcctcaggcactgaaggtcctgagaactgcagagtttgctccttttgttgttttcattgctgcaccaactattactccaggtttaaatgaggatgaatctcttcagcgtctgcagaaggagtctgacatcttacagagaacatatgcacactacttcgatctcacaattatcaacaatgaaattgatgagacaatcagacatctggaggaagctgttgagctcgtgtgcacagccccacagtgggtccctgtctcctgggtctattaggcctctccccagatatctgagcataactgggagcacctcatttgtggaaaagcctctttgttatcggccttgtgtcagcaggtc

SEQ ID NO: 113416 - DNA, 8204 bp, Homo sapiens
  Payload ID: 2169
  Gene Symbol: CASK
  Gene Name: calcium/calmodulin-dependent serine protein kinase (MAGUK family)
  Uniprot ID: O14936
  ENST ID: ENST00000421587
  CDS Start-End: 25-2718
tgcggccgctatcccctccggaccatggccgacgacgacgtgctgttcgaggatgtgtacgagctgtgcgaggtgatcggaaagggtcccttcagtgttgtacgacgatgtatcaacagagaaactgggcaacaatttgctgtaaaaattgttgatgtagccaagttcacatcaagtccagggttaagtacagaagatctaaagcgggaagccagtatctgtcatatgctgaaacatccacacattgtagagttattggagacatatagctcagatggaatgctttacatggttttcgaatttatggatggagcagatctgtgttttgaaatcgtaaagcgagctgacgctggttttgtgtacagtgaagctgtagccagccattatatgagacagatactggaagctctacgctactgccatgataataacataattcacagggatgtgaagccccactgtgttctccttgcctcaaaagaaaactcggcacctgttaaacttggaggctttggggtagctattcaattaggggagtctggacttgtagctggaggacgtgttggaacacctcattttatggcaccagaagtggtcaaaagagagccttacggaaagcctgtagacgtctgggggtgcggtgtgatcctttttatcctgctcagtggttgtttgcctttttacggaaccaaggaaagattgtttgaaggcattattaaaggaaaatataagatgaatccaaggcagtggagccatatctctgaaagtgccaaagacctagtacgtcgcatgctgatgctggatccagctgaaaggatcactgtttatgaagcactgaatcacccatggcttaaggagcgggatcgttacgcctacaagattcatcttccagaaacagtagagcagctgaggaaattcaatgcaaggaggaaactaaagggtgcagtactagccgctgtgtcaagtcacaaattcaactcattctatggggatccccctgaagagttaccagatttctccgaagaccctacctcctcaggagcagtctcacaggtgctggacagcctggaagagattcatgcgcttacagactgcagtgaaaaggacctagattttctacacagtgttttccaggatcagcatcttcacacactactagatctgtatgacaaaattaacacaaagtcttcaccacaaatcaggaatcctccaagcgatgcagtacagagagccaaagaggtattggaagaaatttcatgttaccctgagaataacgacgcaaaggaactaaagcgtattttaacacaacctcatttcatggccttacttcagactcacgacgtagtggcacatgaagtttacagtgatgaagcattgagggtcacacctcctcccacctctccctatttaaacggcgattctccagaaagtgctaacggagacatggatatggagaatgtgaccagagttcggctggtacagtttcaaaagaacacagatgaaccaatgggaatcactttaaaaatgaatgaactaaatcattgtattgttgcaagaattatgcatgggggcatgattcacaggcaaggtacacttcatgttggtgatgaaattcgagaaatcaatggcatcagtgtggctaaccaaacagtggaacaactgcaaaaaatgcttagggaaatgcgggggagtattaccttcaagattgtgccaagttaccgcactcagtcttcgtcctgtgaggacttgccatcaactacccaaccaaaaggacgacagatctatgtaagagcacaatttgaatatgatccagccaaggatgacctcatcccctgtaaagaagctggcattcgattcagagttggtgacatcatccagattattagtaaggatgatcataattggtggcagggtaaactggaaaactccaaaaatggaactgcaggtctcattccttctcctgaacttcaggaatggcgagtagcttgcattgccatggagaagaccaaacaggagcagcaggccagctgtacttggtttggcaagaaaaagaagcagtacaaagataaatatttggcaaagcacaatgcagtgtttgatcaattagatcttgtcacatatgaagaagtagtaaaactgccagcattcaagaggaaaacactagtcttattaggcgcacatggtgttgggagaagacacataaaaaacactctcatcacaaagcacccagaccggtttgcgtaccctattccacatacaaccagacctccaaagaaagacgaagaaaatggaaagaattattactttgtatctcatgaccaaatgatgcaagacatctctaataacgagtacttggagtacggcagccacgaggatgcgatgtatgggacaaaactggagaccatccggaagatccacgagcaggggctgattgcaatactggacgtggagcctcaggcactgaaggtcctgagaactgcagagtttgctccttttgttgttttcattgctgcaccaactattactccaggtttaaatgaggatgaatctcttcagcgtctgcagaaggagtctgacatcttacagagaacatatgcacactacttcgatctcacaattatcaacaatgaaattgatgagacaatcagacatctggaggaagctgttgagctcgtgtgcacagccccacagtgggtccctgtctcctgggtctattaggcctctccccagatatctgagcataactgggagcacctcatttgtggaaaagcctctttgttatcggccttgtgtcagcaggtcatggtccctagagactacctagttgtagtgtgacctacatttataattattgtcatgtccgaatagataggaggagaaaaacaattacacactaatttaaagagacagtatcttttttaatcagttctcctaaactttaataaaatgtatctttaaatgtatgtattattcaatcctttggaatgttatatttttggaaatcatagctttttatttccaaggcccctaaaaactgcacaaaatagatgctgctttctataatctattttaataataataaacaatgattctgttaccttgactgggggtggaacactacattctttttagagtctgattttatggattggaatattgggatatctttctttcctttatttatttgaaataattagtgtagtgattacaaaacagtcataaatttttaaaggccttttttctctctttttttttttttagaatagtatttttttttaagtcctttatgtaacatccagataatgtgatactgtctctttgaagcaccctgtaaaccttttagagatttgaagttgggtcttgactcttaatgcatgtggacagtcgcgagcgtttatgctgtcggtgtgtctgtgttggacaaaacaatctgtaatctacagcaaagtacattctacattccgttcatggggcacacccaggggaataagaataaaatgctattatgactaagttgtaaacctatgcacatcccttgcattttgggcaactttataaaaaaaaagaaactgatttttattaataataatcatgtagtgaaatgtgtttgtaattttgtctcaatttaatttgttgtaaggtggggtggggggaattgctggtttcaccatttcagatctgtgttgtctaagagtattaacgttttaattaagcaaagaaatgatttttaatctgtatgtaattgttttaaagcacccattttaagagaaaatactgtgcaatgaagaaaccagtttaggcatttgctataaactgaaatattccaaaagaatcatctataacagccctgtaaattcctttaaaatgataactaacaggacagtttgaccaattttttttaaatatacttccttttatgtgttcaataattaaatgcctttgggtccttcatttcattatagatttgttcaggcttccaagctgataatctttacaattgtataatttgttagatgctcattgaacctttgaaggcccaggagtgagtatcagttggcagggtgacaaagtagcctgccagagcacagctggaccacgtctgactcgcacagagccatgcgcccaagggccacgggtgtactggaggccacctgtggtctctccttcctcttgctgtatcccttggcacaggggaatcatctgtccttgttgctttagagacattaaccatctcataactcttccatgaagtcacattcttccaatacaggagattcgggctggggttctcagactctttgccagaggtcagtagaatgtttttcattagcatgtgagggtgtgaagtgcttatattaacctgtgatccttgaaaacataccatcattttttgcttcttgtaggttagatggccttgtcactttgtgccttggcaggatgtgcagggtgtgttctgagctgaacagctcctcttaaaggaccaaacagagaaggcattagtatacttcttttacattgtcaacaccatacccgcctccgccccccaccgcctattattaaatggtggcgatttttttttttctgatgttgttctttgccagtgaccagatgagtctgcaacttactaacaaggtattgagtgaactacttctgtatgggccccacagtggggtgaccaagccaccaaaccagagataagctcaacagtggtctcacactagatagagagagaaaccttcaaagagttgggtagggctgtgttagaactgattcgaatctgatagatgccaaggccagacagtcgttcctggtatggtactgaccacaatttcgggctcttagtgtgaaggtgcgcactctacctcttttctggtgaagcacaaagacaactacaactaacacatgggaaacagaaacttccctccctctagtggaaacccccacgcccccacttgccctttgagcccacatctccagagatgctgatgatgcctgtcttaagccatctgccatatttataaaggtggattaagcagaggaggagaaaagcaatgccaacttaaatgtctgtggccccacaattcacaagcactgtagcactcatcctcagtggctttatacgtcctctgagaagcacacaggcaggcatcattcttgccatcattccgatggtgaaatccctgcatgcagaactcattgacttctcaaagatgttacctgttccattccactaatacatgtcttctctaaagcagtgtctttatgacctagctgcatatacttacatttctgaattcagagtaatttcagtacattgctgctgctgctgctgctgctgctgctgctgctgctgctgctgctgctgctactgctacattacaattgtccactaagcaatcagagaaaattgctaaaagcttctttactgcttccattccatcagcagaacctttttttttctttctttcttttaaagaccagaatgaatgtttagagtactaaatcttattagtggtcaattgaagtattggagagccacattttgaaggttctctcccccacccaactccattccccacagcaagaaagggagtgtttttatatgttgaattctttgttaaaaagatgaaatgtcctgattttccagtcacaagacagtaattactttgcacatacagcatatcccattttaatgctaaaaagggaaatgtcactcaatttaattcatctggaagtttcccagtgtcaagataacattgtagcctttttaaatgcaattaaatgtatctcttgtcaggtgagatgatttaaaatctttgctcagagaggaaaacaaatggttgacctacttcttgctatttgcattcagaaggcatcgtcccagcccatcctattggtggcagaatatctaaagatgtcgcaaagtcccccactgcagtagaaatgcaggaggtgttcctgttccccgtccaattccttcttaggctgctagagacagccagtgggccaagccttcccctgtgctccaggcaggcctgggctgcagctactgttacctttttacagcctttgatctgatcgctgcagagttcttttgtttttaaatcacttgtatttgtctcttcattaaggcttcaagtttatttcttgaaaaagtttagtcaattgaaccaccctccaggaagattcccagcgtggaaactgcccctgaaaaacaaggcagcccaaagccagctctcttttgtcccccactgatgtcatgtcctttttttttttcatttcaggccagtttcttaacttggggcaaagagaatgtgttgctaaagctaccaagaaaactgcttgattaacaaattcttaatagaaatgcctcccacactgtctctttgaaaagagaaggcaccttggaatcggcattccaaaaccaagctccttgtcatcctcatccctcctccttcttgcttcctattatcaaactcgtgtgtgtttcttgttttctcagaactgaacacagcctcctaattccatcctcttgactagggcttacaatactgagagcgattacaggctgtaataagttaaaggtccctgagcgtggctttcttgttctgcgcctctaattaattcttctattaaaagatgctttccttctcactgcagcttacagaaaggctacaagctttaatcacagatcatttcatttgccagagcctttccttttctaactcctttagaaataagatttccctctctgtttggaatctctggatacaggactctcctccaagctcatggcttgattggctttgcctgtgcacacacacatcagtttgccttaaacttggagctatggggagtcccagattttccagcttagtgggtgaagtttagctgtcacctacatccaggaagtgggggaaaagggaaaaaaagaggatattcaccaccatgttcccatccggtctttcccctgccttgctttgtgcagcaggtgggcagacagagcccacagaaacagaagtagaaagagggccgcaccatctctggggccagcactcctaagtcttagctctttgtgggaatagaaaatcctgagctcccaccacctctcgtctgaccctccatcaactccctcgaacctgtgcaaatggactgagcaaaagaaaatggaaagagatgtttgtcaccacacaggagacctcctttctggccccaagcacaactccatctctgcgtatgctcagaaactcagaatttagctgctacttatgtgttagctccattctctctggtgtgtgactgagagaacacgccagtgttcttactgacagaggcttaggggtgaccctctctggacccagaggaagtacaacctctgtagcgagaattgtccttgggaacagaaacaggcattcctccacagtgagtggctccccctattttttttttatttggaagagaccaagaattgggggaattgatttccagtcttagctgtttcccggaatgtcatctgtgcaggcaggtaggcggctgccgggtgcagcaggcagcgtgactgatgtgaaggccgcccaatcctcacgtgctaagacccgagtatcgtgtttaattgcagtgtaggcacgtcgccattcaaactcagttctggggtggttttgcataaagttttgccaacgtgttcttttttctgtatgtattattgcctttttataaaaggtgttgaagtattgtctcagtgataaaaagagagagatgttaatggttgttgtatatttcaccgtatccaattgtaagtatttgcagggtacagcagagccttagcttgcaagagcgtttgtgcaggaggtgtccctcaacacccaggagctgaagggattggaaaggtttggattctttgtaaatgtcctgcttttctttctctctgtgtgtatctatttacatgccttagcacacgccctcccatcctgatccctttgccctgtcgccggaacaaccagaatgctggtgcgctgccggcacagtacaagttgatgaaaccctaatcagttatcttgtgtgacaggggaagaagagaaactccatagtattccttgtagaatatacatacctgtaggatgctgtgtaatgggaaaccatagaattgggcttttgtcatttcaaagttggagaaatgtatgaataaaatgtataaaacatgaaaa

SEQ ID NO: 113417 - DNA, 1532 bp, Homo sapiens
  Payload ID: 2170
  Gene Symbol: CABS1
  Gene Name: calcium-binding protein, spermatid-specific 1
  Uniprot ID: Q96KC9
  ENST ID: ENST00000273936
  CDS Start-End: 75-1262
actgctctcctgcctagagataccactgagtccagaagcaagacctgtgagagtgcacagtgccacttcgccccatggctgaagatggtttgcccaaaatttattctcatcctccaacagaaagcagtaaaacaccaactgcagcaaccattttctttggggctgacaatgctattcccaaatcagaaacaactattacttcagaaggagaccacgtcacttcagtaaatgaatatatgctagaaagcgatttttcaacaactacagacaacaaactgacagctaaaaaggaaaaactcaaatcagaagatgatatggggaccgactttattaagtcaacaactcacctacagaaagaaattacctctctgactggcactacaaactccataacaagagactctattaccgaacatttcatgccagtgaaaattgggaatatttcatcaccagttactactgtttctttaatagatttttccactgacatagcaaaagaagatatcctcttagctaccattgacacaggagatgcagagatctcaataacctctgaagtctctggcacactaaaggacagcagtgctggtgttgctgacgctcctgcctttccacgtaaaaaggatgaagctgatatgagcaattataattcctccatcaaatccaatgtccctgctgatgaggctgtccaggtcactgattccactattcctgaggctgaaatccctcctgctcctgaagaaagcttcactactattccagacataactgcccttgaagaagagaaaataaccgaaattgacctaagtgttttagaagatgacaccagtgctgtggctacattaactgactctgatgagaagtttatcactgtgtttgaactcactacctctgctgaaaaagacaaagataaacgggaagatactctgctaactgatgaagaaactaccgagggagccagtatttggatggagagagatactgcaaatgaagcagagacccattctgttttgcttactgctgttgaatccagatatgacttcgttgtccctgcatcaatagctacaaacctagtggaagaatcatctacagaagaagatttgtctgaaactgataatacagagactgtacctaagatcactgagccattttctggaactacctctgtattagataccccagactataaggaagacacctccacaactgaaacggatatctttgaactactgaaagaagaacccgatgagttcatgatttaaaagcaacaaaagggataccatgtagaattgtgcaatagtctagccagctagccttaacatctaagaaatttttccaacaagcaaaaacctttagaaatgaaagaatgtgggcatttaaggtcttaaacactgaatatcacactcttcttatgactcttgttagcgattcaaggacataaatcttcattcttttctggcacagactacttaaatgggtctgttttcactttgctcatttttcttcaataaatctttttggcaagcaactga

SEQ ID NO: 113418 - DNA, 3783 bp, Homo sapiens
  Payload ID: 2171
  Gene Symbol: CASR
  Gene Name: calcium-sensing receptor
  Uniprot ID: P41180
  ENST ID: ENST00000490131
  CDS Start-End: 373-3609
caacaggcacctggctgcagccaggaaggaccgcacgccctttcgcgcaggagagtggaaggagggagctgtttgccagcaccgaggtcttgcggcacaggcaacgcttgacctgagtcttgcagaatgaaaggcatcacaggaggcctctgcatgatgtggcttccaaagactcaaggaccacccacattacaagtctggattgaggaaggcagaaatggagattcaaacaccacgtcttctattattttattaatcaatctgtagacatgtgtccccactgcagggagtgaactgctccaagggagaaacttctgggagcctccaaactcctagctgtctcatcccttgccctggagagacggcagaaccatggcattttatagctgctgctgggtcctcttggcactcacctggcacacctctgcctacgggccagaccagcgagcccaaaagaagggggacattatccttggggggctctttcctattcattttggagtagcagctaaagatcaagatctcaaatcaaggccggagtctgtggaatgtatcaggtataatttccgtgggtttcgctggttacaggctatgatatttgccatagaggagataaacagcagcccagcccttcttcccaacttgacgctgggatacaggatatttgacacttgcaacaccgtttctaaggccttggaagccaccctgagttttgttgctcaaaacaaaattgattctttgaaccttgatgagttctgcaactgctcagagcacattccctctacgattgctgtggtgggagcaactggctcaggcgtctccacggcagtggcaaatctgctggggctcttctacattccccaggtcagttatgcctcctccagcagactcctcagcaacaagaatcaattcaagtctttcctccgaaccatccccaatgatgagcaccaggccactgccatggcagacatcatcgagtatttccgctggaactgggtgggcacaattgcagctgatgacgactatgggcggccggggattgagaaattccgagaggaagctgaggaaagggatatctgcatcgacttcagtgaactcatctcccagtactctgatgaggaagagatccagcatgtggtagaggtgattcaaaattccacggccaaagtcatcgtggttttctccagtggcccagatcttgagcccctcatcaaggagattgtccggcgcaatatcacgggcaagatctggctggccagcgaggcctgggccagctcctccctgatcgccatgcctcagtacttccacgtggttggcggcaccattggattcgctctgaaggctgggcagatcccaggcttccgggaattcctgaagaaggtccatcccaggaagtctgtccacaatggttttgccaaggagttttgggaagaaacatttaactgccacctccaagaaggtgcaaaaggacctttacctgtggacacctttctgagaggtcacgaagaaagtggcgacaggtttagcaacagctcgacagccttccgacccctctgtacaggggatgagaacatcagcagtgtcgagaccccttacatagattacacgcatttacggatatcctacaatgtgtacttagcagtctactccattgcccacgccttgcaagatatatatacctgcttacctgggagagggctcttcaccaatggctcctgtgcagacatcaagaaagttgaggcgtggcaggtcctgaagcacctacggcatctaaactttacaaacaatatgggggagcaggtgacctttgatgagtgtggtgacctggtggggaactattccatcatcaactggcacctctccccagaggatggctccatcgtgtttaaggaagtcgggtattacaacgtctatgccaagaagggagaaagactcttcatcaacgaggagaaaatcctgtggagtgggttctccagggaggtgcccttctccaactgcagccgagactgcctggcagggaccaggaaagggatcattgagggggagcccacctgctgctttgagtgtgtggagtgtcctgatggggagtatagtgatgagacagatgccagtgcctgtaacaagtgcccagatgacttctggtccaatgagaaccacacctcctgcattgccaaggagatcgagtttctgtcgtggacggagccctttgggatcgcactcaccctctttgccgtgctgggcattttcctgacagcctttgtgctgggtgtgtttatcaagttccgcaacacacccattgtcaaggccaccaaccgagagctctcctacctcctcctcttctccctgctctgctgcttctccagctccctgttcttcatcggggagccccaggactggacgtgccgcctgcgccagccggcctttggcatcagcttcgtgctctgcatctcatgcatcctggtgaaaaccaaccgtgtcctcctggtgtttgaggccaagatccccaccagcttccaccgcaagtggtgggggctcaacctgcagttcctgctggttttcctctgcaccttcatgcagattgtcatctgtgtgatctggctctacaccgcgcccccgtcaagctaccgcaaccaggagctggaggatgagatcatcttcatcacgtgccacgagggctccctcatggccctgggcttcctgatcggctacacctgcctgctggctgccatctgcttcttctttgccttcaagtcccggaagctgccggagaacttcaatgaagccaagttcatcaccttcagcatgctcatcttcttcatcgtctggatctccttcattccagcctatgccagcacctatggcaagtttgtctctgccgtagaggtgattgccatcctggcagccagctttggcttgctggcgtgcatcttcttcaacaagatctacatcattctcttcaagccatcccgcaacaccatcgaggaggtgcgttgcagcaccgcagctcacgctttcaaggtggctgcccgggccacgctgcgccgcagcaacgtctcccgcaagcggtccagcagccttggaggctccacgggatccaccccctcctcctccatcagcagcaagagcaacagcgaagacccattcccacagcccgagaggcagaagcagcagcagccgctggccctaacccagcaagagcagcagcagcagcccctgaccctcccacagcagcaacgatctcagcagcagcccagatgcaagcagaaggtcatctttggcagcggcacggtcaccttctcactgagctttgatgagcctcagaagaacgccatggcccacaggaattctacgcaccagaactccctggaggcccagaaaagcagcgatacgctgacccgacacgagccattactcccgctgcagtgcggggaaacggacttagatctgaccgtccaggaaacaggtctgcaaggacctgtgggtggagaccagcggccagaggtggaggaccctgaagagttgtccccagcacttgtagtgtccagttcacagagctttgtcatcagtggtggaggcagcactgttacagaaaacgtagtgaattcataaaatggaaggagaagactgggctagggagaatgcagagaggtttcttggggtcccagggaagaggaatcgccccagactcctttcctctgaggaagaagggataatagacacatcaaatgccccgaatttagtcacaccatcttaaatgacagtgaattgacccatgttcccttt

SEQ ID NO: 113419 - DNA, 5017 bp, Homo sapiens
  Payload ID: 2171
  Gene Symbol: CASR
  Gene Name: calcium-sensing receptor
  ENST ID: ENST00000498619
  CDS Start-End: 439-3705
ggggctgctgtggccggacccgaaggcgggcgccgggagcgcagcgagccagacgcgcctctccaagaccgtgaccttggcatagggagcggggctgcgcgcagtcctgagatcagaccagagctcatcctcgtggagacccacggccgaggggccggagctgcctctgtgcgagggagccctggccgcggcgcagaaggcatcacaggaggcctctgcatgatgtggcttccaaagactcaaggaccacccacattacaagtctggattgaggaaggcagaaatggagattcaaacaccacgtcttctattattttattaatcaatctgtagacatgtgtccccactgcagggagtgaactgctccaagggagaaacttctgggagcctccaaactcctagctgtctcatcccttgccctggagagacggcagaaccatggcattttatagctgctgctgggtcctcttggcactcacctggcacacctctgcctacgggccagaccagcgagcccaaaagaagggggacattatccttggggggctctttcctattcattttggagtagcagctaaagatcaagatctcaaatcaaggccggagtctgtggaatgtatcaggtataatttccgtgggtttcgctggttacaggctatgatatttgccatagaggagataaacagcagcccagcccttcttcccaacttgacgctgggatacaggatatttgacacttgcaacaccgtttctaaggccttggaagccaccctgagttttgttgctcaaaacaaaattgattctttgaaccttgatgagttctgcaactgctcagagcacattccctctacgattgctgtggtgggagcaactggctcaggcgtctccacggcagtggcaaatctgctggggctcttctacattccccaggtcagttatgcctcctccagcagactcctcagcaacaagaatcaattcaagtctttcctccgaaccatccccaatgatgagcaccaggccactgccatggcagacatcatcgagtatttccgctggaactgggtgggcacaattgcagctgatgacgactatgggcggccggggattgagaaattccgagaggaagctgaggaaagggatatctgcatcgacttcagtgaactcatctcccagtactctgatgaggaagagatccagcatgtggtagaggtgattcaaaattccacggccaaagtcatcgtggttttctccagtggcccagatcttgagcccctcatcaaggagattgtccggcgcaatatcacgggcaagatctggctggccagcgaggcctgggccagctcctccctgatcgccatgcctcagtacttccacgtggttggcggcaccattggattcgctctgaaggctgggcagatcccaggcttccgggaattcctgaagaaggtccatcccaggaagtctgtccacaatggttttgccaaggagttttgggaagaaacatttaactgccacctccaagaaggtgcaaaaggacctttacctgtggacacctttctgagaggtcacgaagaaagtggcgacaggtttagcaacagctcgacagccttccgacccctctgtacaggggatgagaacatcagcagtgtcgagaccccttacatagattacacgcatttacggatatcctacaatgtgtacttagcagtctactccattgcccacgccttgcaagatatatatacctgcttacctgggagagggctcttcaccaatggctcctgtgcagacatcaagaaagttgaggcgtggcaggtcctgaagcacctacggcatctaaactttacaaacaatatgggggagcaggtgacctttgatgagtgtggtgacctggtggggaactattccatcatcaactggcacctctccccagaggatggctccatcgtgtttaaggaagtcgggtattacaacgtctatgccaagaagggagaaagactcttcatcaacgaggagaaaatcctgtggagtgggttctccagggagccactcacctttgtgctgtctgtcctccaggtgcccttctccaactgcagccgagactgcctggcagggaccaggaaagggatcattgagggggagcccacctgctgctttgagtgtgtggagtgtcctgatggggagtatagtgatgagacagatgccagtgcctgtaacaagtgcccagatgacttctggtccaatgagaaccacacctcctgcattgccaaggagatcgagtttctgtcgtggacggagccctttgggatcgcactcaccctctttgccgtgctgggcattttcctgacagcctttgtgctgggtgtgtttatcaagttccgcaacacacccattgtcaaggccaccaaccgagagctctcctacctcctcctcttctccctgctctgctgcttctccagctccctgttcttcatcggggagccccaggactggacgtgccgcctgcgccagccggcctttggcatcagcttcgtgctctgcatctcatgcatcctggtgaaaaccaaccgtgtcctcctggtgtttgaggccaagatccccaccagcttccaccgcaagtggtgggggctcaacctgcagttcctgctggttttcctctgcaccttcatgcagattgtcatctgtgtgatctggctctacaccgcgcccccgtcaagctaccgcaaccaggagctggaggatgagatcatcttcatcacgtgccacgagggctccctcatggccctgggcttcctgatcggctacacctgcctgctggctgccatctgcttcttctttgccttcaagtcccggaagctgccggagaacttcaatgaagccaagttcatcaccttcagcatgctcatcttcttcatcgtctggatctccttcattccagcctatgccagcacctatggcaagtttgtctctgccgtagaggtgattgccatcctggcagccagctttggcttgctggcgtgcatcttcttcaacaagatctacatcattctcttcaagccatcccgcaacaccatcgaggaggtgcgttgcagcaccgcagctcacgctttcaaggtggctgcccgggccacgctgcgccgcagcaacgtctcccgcaagcggtccagcagccttggaggctccacgggatccaccccctcctcctccatcagcagcaagagcaacagcgaagacccattcccacagcccgagaggcagaagcagcagcagccgctggccctaacccagcaagagcagcagcagcagcccctgaccctcccacagcagcaacgatctcagcagcagcccagatgcaagcagaaggtcatctttggcagcggcacggtcaccttctcactgagctttgatgagcctcagaagaacgccatggcccacaggaattctacgcaccagaactccctggaggcccagaaaagcagcgatacgctgacccgacacgagccattactcccgctgcagtgcggggaaacggacttagatctgaccgtccaggaaacaggtctgcaaggacctgtgggtggagaccagcggccagaggtggaggaccctgaagagttgtccccagcacttgtagtgtccagttcacagagctttgtcatcagtggtggaggcagcactgttacagaaaacgtagtgaattcataaaatggaaggagaagactgggctagggagaatgcagagaggtttcttggggtcccagggaagaggaatcgccccagactcctttcctctgaggaagaagggataatagacacatcaaatgccccgaatttagtcacaccatcttaaatgacagtgaattgacccatgttccctttaaaattaaaaaaaagaagagccttgtgtttctgtggttgcatttgtcaaagcattgagatctccacggtcagatttgctgttcacccacatctaatgtctcttcctctgttctatcccacccaacagctcagagatgaaactatggctttaaactaccctccagagtgtgcagactgatgggacatcaaatttgccaccactagagctgagagtctgaaagacagaatgtcaccagtcctgcccaatgccttgacaacagactgaattttaaatgttcacaacataaggagaatgtatctcctcctatttatgaaaaccatatgatattttgtctcctacctgctgctgctattatgtaacatccagaaggtttgcacccctcctataccatatgtctgcttctgtccaggacatgatactgatgccatgtttagattccaggatcacaagaatcacctcaaattgttaggaagggactgcataaaccaatgagctgtatctgtaattaatattcctatatgtagctttatccttaggaaaatgcttctgttgtaatagtccatggacaatataaactgaaaaatgtcagtctggtttatataaggcagtattattgagctctatttccccaccccactatcctcactcccataagctaagccttatgtgagccccttcagggactcaagggtccagaagtccctcccatctctaccccaaagaattcctgaagccagatccaccctatccctgtacagagtaagttctcaattattggcctgctaatagctgctagggtaggaaagcgtggttccaagaaagatccaccctcaaatgtcagagctatgttccctccagcagtggtattaatactgccggtcacccaggctctggagccagagagacagaccggggttcaagccatggcttcgtcatttgcaagctgagtgactgtaggcagggaaccttaacctctctaagccacagcttcttcatctttaaaataaggataataatcattctttcccctcagagctcttatgtggattaaacgagataatgtatataaagtactttagcctggtacctagcacacaataagcattcaataaatattagttaatattattactgata

SEQ ID NO: 113420 - DNA, 2766 bp, Homo sapiens
  Payload ID: 2172
  Gene Symbol: CACYBP
  Gene Name: calcyclin binding protein
  Uniprot ID: Q9HB71
  ENST ID: ENST00000367679
  CDS Start-End: 449-1135
gcgactgcgcagcgtggcccagcgcggtcaaattataatacataaaagttgtcagggcggagagcaagacattactcttctcggattgccggttcgctcgcgagacttgagcgttgctaggagattcggcaggcgggcggagccagactcggcggggcggggaggggtggggctaggctcggcgaggcgaggaagggtgggtggagccaggcttggcgggctgtgcgtgctcgcggtgggcggtggcggcggctgcctcgcgaaggttcgagatccgtcgcgtgcgggaggcgggccgcgatcttgcgcagggtcggtgtgggcgcaggctgcagcgccgcgactcgtgcgggtaggcgtctgcgctcggtttgagggctcggcgcggggtttcctgttcctccttctgcgcggctgcagctcgggacttcggcctgacccagcccccatggcttcagaagagctacagaaagatctagaagaggtaaaggtgttgctggaaaaggctactaggaaaagagtacgtgatgcccttacagctgaaaaatccaagattgagacagaaatcaagaacaagatgcaacagaaatcacagaagaaagcagaacttcttgataatgaaaaaccagctgctgtggttgctcccattacaacgggctatacggtgaaaatcagtaattatggatgggatcagtcagataagtttgtgaaaatctacattaccttaactggagttcatcaagttcccactgagaatgtgcaggtgcatttcacagagaggtcatttgatcttttggtaaagaatctaaatgggaagagttactccatgattgtgaacaatctcttgaaacccatctctgtggaaggcagttcaaaaaaagtcaagactgatacagttcttatattgtgtagaaagaaagtggaaaacacaaggtgggattacctgacccaggttgaaaaggagtgcaaagaaaaagagaagccctcctatgacactgaaacagatcctagtgagggattgatgaatgttctaaagaaaatttatgaagatggagacgatgatatgaagcgaaccattaataaagcctgggtggaatcaagagagaagcaagccaaaggagacacggaattttgagactttaaagtcgttttgggaactgtgatgtgatgtggaaatactgatgtttccagtaagggaatattggtgagctgcatatataaatttgacagatagctatttacatagccttctaagtaaaggcaatgaattctccatttcctactggaggatttatttaaataaaatatgcttattaaacactcctgcaaagatggttttattagtaccctggtcattttgttcaaggaagggttatattgcattctcacgtgaaatataaaaagcaagtcttgcccaataaaaacgctacattgtgtgtattttttgttcagctaagaattggaaaagtatttgcttgccttttaagttactgacatcagcttccaccagtgtaaaaattgagtaaaacctgaagttttgcataaaatgcaaatcggtgcctgtgcttgaaggttgctgtagagcatctgaccccttattaccaccttaagcaatgtatatgccatgcattaccatgcactaattcaatcacaggtgtttctatctagatttaaatatatttgtcaatgaatgtggaatagaaaatctaaacatgacaataatagacatatctttgtatggtaccagttagttttgccgtggatcagatggtttataaaagtaataaccataaagcaaaaaataatttgaaagcccgtctattcctatgctcaataaagttaagtttttcttcattagaacagttttatgatttatttgtctaggagtatgtcagaaaaatcaggcttttagtaggaattactcctattccccctgaagtcaggaccagtgcctgtgatctccattactttattttcctggaggtattagccaacacagttagatcagagaaagcaattgaagccaggcatgaaggctggcgcccgtaatcccagctactaaggctggaggatcacttcagcccaggagtttaaggctgcagtgagctatgatgatgccactgtactgcagcttgggtaacagattgagaacctgtctcattaaaaaaaaaaaaaaaaaaaaagccgttagacacacaggaaaaatccagaagggtaaactaaactaaagctacaattaatatgggaatttggaagaagtggtaggatttaaaatacagaaacagtttatgtataggatagctataagtaaatactgaaacacattatgcctctgtaattggggttgacacatgaacagaatagcagacacaatgcatatgaaagttacagaatatggtaaaagtggggtaaagatgggtttttaatgatactaagataactgaaaataggcatatagatatattccaagccgcctgacgatctaattgtaaaaagtaaagcatacaaatactagaagaaaatggaggaaaacgacattatatgtgacttaaaacctagaagaaataaataaaactattgatcaattttaactacataaaaatgtttataggacaagaaaaaccccaccataacccaaggcaaacaatgtattgacaggattccaataattaagaatacttcatacaaaaagaaatgtaaatgacctttaacatgtaaagatgctcaccttgttcagaagagaataaaccagtgtttttacctttc

SEQ ID NO: 113421 - DNA, 243 bp, Homo sapiens
  Payload ID: 2172
  Gene Symbol: CACYBP
  Gene Name: calcyclin binding protein
  Uniprot ID: Q9HB71
  ENST ID: ENST00000406752
  CDS Start-End: 1-243
atggcttcagaagagctacagaaagatctagaagaggtaaaggtgttgctggaaaaggctactaggaaaagagtacgtgatgcccttacagctgaaaaatccaagattgagacagaaatcaagaacaagatgcaacagaaatcacagaagaaagcagaacttcttgataatgaaaaaccagctgctgtggttgctcccattacaacgggctatacggatgggatcagtcagataagtttgtga

SEQ ID NO: 113422 - DNA, 1059 bp, Homo sapiens
  Payload ID: 2172
  Gene Symbol: CACYBP
  Gene Name: calcyclin binding protein
  Uniprot ID: Q9HB71
  ENST ID: ENST00000405362
  CDS Start-End: 502-1059
atattccttatgccccccggctggagctgcagcgccagcctcccgccctaccgccgtttccgtgggctgagccgccctgcggccacccggtcccgcgccagtcagtgcgccgccttcccgggggacacctcactcgccccttgctgcgccgtcggctccccagcgcttccactcgacctcgcaccccactcgcctgctgggctcgagcgggggtgtgcggcgattatccgtgcaggcggtgcggggagtgggtctgggagagcggccctttgcgcgtgttcctcaggccctttctgccctggtttcccagccagtggacaggaagcttcattcaagcaaagctgggtgcaaacatgagtgtcgttcttggtagagggcggttggaagctacagaaagatctagaagaggtaaaggtgttgctggaaaaggctactaggaaaagagtacgtgatgcccttacagctgaaaaatccaagattgagacagaaatcaagaacaagatgcaacagaaatcacagaagaaagcagaacttcttgataatgaaaaaccagctgctgtggttgctcccattacaacgggctatacggtgaaaatcagtaattatggatgggatcagtcagataagtttgtgaaaatctacattaccttaactggagttcatcaagttcccactgagaatgtgcaggtgcatttcacagagaggtcatttgatcttttggtaaagaatctaaatgggaagagttactccatgattgtgaacaatctcttgaaacccatctctgtggaaggcagttcaaaaaaagtcaagactgatacagttcttatattgtgtagaaagaaagtggaaaacacaaggtgggattacctgacccaggttgaaaaggagtgcaaagaaaaagagaagccctcctatgacactgaaacagatcctagtgagggattgatgaatgttctaaagaaaatttatgaagatggagacgatgatatgaagcgaaccattaataaagcctgggtggaatcaagagagaagcaagccaaaggagacacggaattttga

SEQ ID NO: 113423 - DNA, 499 bp, Homo sapiens
  Payload ID: 2172
  Gene Symbol: CACYBP
  Gene Name: calcyclin binding protein
  ENST ID: ENST00000426793
  CDS Start-End: 348-499
agaccgcggtgacgtctccaccgcgccaaactcactgaaaatcaaaccgctaccattaggagccctccacgcttaacatatccgttctttctcgtttgaaagtaaccaggctgctcctccccatttttcgccttcttctcgcggaggctgagagactaaccttacacaacatggcggcctggtgtgtctggtgtcctagagcggacgaaagcaggtgactctctagtcaacttccgacttggactccgaagatcggcgtctgcgctcggtttgagggctcggcgcggggtttcctgttcctccttctgcgcggctgcagctcgggacttcggcctgacccagcccccatggcttcagaagagctacagaaagatctagaagaggtaaaggtgttgctggaaaaggctactaggaaaagagtacgtgatgcccttacagctgaaaaatccaagattgagacagaaatcaagaacaagatgcaacagaaatcacagaagaa

SEQ ID NO: 113424 - DNA, 2835 bp, Homo sapiens
  Payload ID: 2172
  Gene Symbol: CACYBP
  Gene Name: calcyclin binding protein
  Uniprot ID: Q9HB71
  ENST ID: ENST00000613570
  CDS Start-End: 642-1199
cattttctttgatggtaaacaggctcacttataccgaatccaaacccaggcgagaactacggactcttgaaatggtcggtgaaaggggcgaaagcaccaggaaatcgtgcttcaacagtccatgactgaaaggagggcctgaaactgtggccataggcgggcccttttgttagggccttgacctgggcttccgctacagggcccggtcacgaggccaacgtagctccacctcctacggcggccagtgatgacgccaccacgtcggaactgttagaccgcggtgacgtctccaccgcgccaaactcactgaaaatcaaaccgctaccattaggagccctccacgcttaacatatccgttctttctcgtttgaaagtaaccaggctgctcctccccatttttcgccttcttctcgcggaggctgagagactaaccttacacaacatggcggcctggtgtgtctggtgtcctagagcggacgaaagcaggtgactctctagtcaacttccgacttggactccgaagatcgctacagaaagatctagaagaggtaaaggtgttgctggaaaaggctactaggaaaagagtacgtgatgcccttacagctgaaaaatccaagattgagacagaaatcaagaacaagatgcaacagaaatcacagaagaaagcagaacttcttgataatgaaaaaccagctgctgtggttgctcccattacaacgggctatacggtgaaaatcagtaattatggatgggatcagtcagataagtttgtgaaaatctacattaccttaactggagttcatcaagttcccactgagaatgtgcaggtgcatttcacagagaggtcatttgatcttttggtaaagaatctaaatgggaagagttactccatgattgtgaacaatctcttgaaacccatctctgtggaaggcagttcaaaaaaagtcaagactgatacagttcttatattgtgtagaaagaaagtggaaaacacaaggtgggattacctgacccaggttgaaaaggagtgcaaagaaaaagagaagccctcctatgacactgaaacagatcctagtgagggattgatgaatgttctaaagaaaatttatgaagatggagacgatgatatgaagcgaaccattaataaagcctgggtggaatcaagagagaagcaagccaaaggagacacggaattttgagactttaaagtcgttttgggaactgtgatgtgatgtggaaatactgatgtttccagtaagggaatattggtgagctgcatatataaatttgacagatagctatttacatagccttctaagtaaaggcaatgaattctccatttcctactggaggatttatttaaataaaatatgcttattaaacactcctgcaaagatggttttattagtaccctggtcattttgttcaaggaagggttatattgcattctcacgtgaaatataaaaagcaagtcttgcccaataaaaacgctacattgtgtgtattttttgttcagctaagaattggaaaagtatttgcttgccttttaagttactgacatcagcttccaccagtgtaaaaattgagtaaaacctgaagttttgcataaaatgcaaatcggtgcctgtgcttgaaggttgctgtagagcatctgaccccttattaccaccttaagcaatgtatatgccatgcattaccatgcactaattcaatcacaggtgtttctatctagatttaaatatatttgtcaatgaatgtggaatagaaaatctaaacatgacaataatagacatatctttgtatggtaccagttagttttgccgtggatcagatggtttataaaagtaataaccataaagcaaaaaataatttgaaagcccgtctattcctatgctcaataaagttaagtttttcttcattagaacagttttatgatttatttgtctaggagtatgtcagaaaaatcaggcttttagtaggaattactcctattccccctgaagtcaggaccagtgcctgtgatctccattactttattttcctggaggtattagccaacacagttagatcagagaaagcaattgaagccaggcatgaaggctggcgcccgtaatcccagctactaaggctggaggatcacttcagcccaggagtttaaggctgcagtgagctatgatgatgccactgtactgcagcttgggtaacagattgagaacctgtctcattaaaaaaaaaaaaaaaaaaaaagccgttagacacacaggaaaaatccagaagggtaaactaaactaaagctacaattaatatgggaatttggaagaagtggtaggatttaaaatacagaaacagtttatgtataggatagctataagtaaatactgaaacacattatgcctctgtaattggggttgacacatgaacagaatagcagacacaatgcatatgaaagttacagaatatggtaaaagtggggtaaagatgggtttttaatgatactaagataactgaaaataggcatatagatatattccaagccgcctgacgatctaattgtaaaaagtaaagcatacaaatactagaagaaaatggaggaaaacgacattatatgtgacttaaaacctagaagaaataaataaaactattgatcaattttaactacataaaaatgtttataggacaagaaaaaccccaccataacccaaggcaaacaatgtattgacaggattccaataattaagaatacttcatacaaaaagaaatgtaaatgacctttaacatgtaaagatgctcaccttgttcagaagagaataaaccagtgtttttacctttcacttg

SEQ ID NO: 113425 - DNA, 2271 bp, Homo sapiens
  Payload ID: 2173
  Gene Symbol: CALY
  Gene Name: calcyon neuron-specific vesicular protein
  Uniprot ID: Q9NYX4
  ENST ID: ENST00000252939
  CDS Start-End: 95-748
gcatcctccgcatccacatccgcatcgtcgtcctccccgaccgcgtcctgcagcagctgccagtggagccgcctgacaaggactgccatccaccatggtgaagctgggctgcagcttctctgggaagccaggtaaagaccctggggaccaggatggggctgccatggacagtgtgcctctgatcagccccttggacatcagccagctccagccgccactccctgaccaggtggtcatcaagacacagacagaataccagctgtcctccccagaccagcagaatttccctgacctggagggccagaggctgaactgcagccacccagaggaagggcgcaggctgcccaccgcacggatgatcgccttcgccatggcgctactgggctgcgtgctgatcatgtacaaggccatctggtacgaccagttcacctgccccgacggcttcctgctgcggcacaagatctgcacgccgctgaccctggagatgtactacacggagatggaccccgagcgccaccgcagcatcctggcggccatcggggcctacccgctgagccgcaagcacggcacggagacgccggcggcctggggggacggctaccgcgcagccaaggaggagcgcaaggggcccacccaggctggggcggcggcggcggccaccgaaccccccgggaagccgtcggccaaggcggagaaggaggcggcgcggaaggcggccgggagcgcggcgcccccgcccgcgcagtgacgtctccagccccgcagcccggcccgggcgtcctccgccagctcctgtgaccagcgcgtctcccgatgctctccgccgtgttcgtgtccccaggcgccctcgctgcagccccgcccccgtgggtctctgactctgtcgcttttctctaagtaaagatttcacgtccaccggaggcttccatctctcctgcgcgtcctctgccgggctggcctttctcccgccccccaccccgccagttgtgagtgaggccggcattgtgctccccccagggacccccgaaggacccaggagagaccccgtggggggcagctcccaggaagccgtggtgcgcccaggcggagcacgcgcatcctcgcgctgcgtggtccgggccttgtccaagccccaccgggatgtgccttaatggcggggctccggcccacccaggggagcctcgggtccatccctatccgctgcccagccccttgtcctgctggttccccgaccccccgcccccatctacctggtgctgggcctgggccccgggcgttccccctctgacaggagtgtctgcctcccgggggacccctggttctgggcggcacccatgagcagctcctgcctcctagatgtgtggcccacaggcataaatgaccaagtgaagaaaggagtgaatgggggcgtctgagtggggagtggggcctgatgaggggtgagctctggttcctgggggctggggtctcccgtgtccctggagccagatgaaagatggtgaggctgaaacgccaggggagcctggagctgccatgagtctcccccagcatccccaccccagccccagcatccccaccccagccccagcatccccaccccagccccagccaactcccggcactgaacactacagggaatggacttccggcagatctcacccaccacctgcaccaccccagccagcagcagctctgcagccccgcccaccccagccagcagcagctctgcagccccgcccaccccagccagcagcagctctgcagccccgcccaccccagccaattgcagcactgcagccccgcccaccccagccaattgcagcactgcagccccgcccaccccagccagcagcggctctgcagccccgcccaccccagcccccgaccattggtggatggaagccccccaccattggctcccaggcttgctggctaggtgcgggtctaggcagcttcccagctcagtgggactggcctgctttggaacagcggcagtgcccaggaagcctgtgaactgggcctgccagggaagccatggtgagctggaagccagccaggtggggtcagggaaggcagggccatgcacaccacacccttcactgctgggcttctaagggcattggccagatgaacaagcacacgcagaactgaattggccctgatggcctgcaagggaggggggcccggggcctggggcgtcagctgggatatatgggggcagggagtctctgcatggccgatgtttgaattaaaatacagctttcccctgta

SEQ ID NO: 113426 - DNA, 783 bp, Homo sapiens
  Payload ID: 2173
  Gene Symbol: CALY
  Gene Name: calcyon neuron-specific vesicular protein
  Uniprot ID: Q9NYX4
  ENST ID: ENST00000368555
  CDS Start-End: 60-536
cccgaccgcgtcctgcagcagctgccagtggagccgcctgacaaggactgccatccaccatggtgaagctgggctgcagcttctctgggaagccaggtaaagaccctggggaccaggatggggctgccatggacagtgtgcctctgatcagccccttggacatcagccagctccagccgccactccctgaccaggtggtcatcaagacacagacagaataccagctgtcctccccagaccagcagaatttccctgacctggagggccagaggctgaactgcagccacccagaggaagggcgcagggtaaccacacccaccccacccactgtggggactcaggacaggaggagaaggtggaaggcagctgggggtgcctgggttccgtccaggccagtctggggtccccttgctctcagggaggagagggtggcagtgagtcatcccgcccagagctggccccaccggctgccctgcacccaccaggccccctcccgaggctgcaggtgcagactgaccaaacagtggcgctcctgagatgtttttctttctgggaagtgcccgcgagtgctgcttgcttgtttgcccagtgggtcattgtctcatcttcagtgacttacgggctttctatgtaatacttcctttctgcagtatatctggcaaatatcttctctcatcctcttgtttaaatctgtcaatgttactaatgatagctttagtcatttttagtggactgtttccaaagccttccattctccagtagacagatctgctagggctcccc

SEQ ID NO: 113427 - DNA, 825 bp, Homo sapiens
  Payload ID: 2173
  Gene Symbol: CALY
  Gene Name: calcyon neuron-specific vesicular protein
  Uniprot ID: Q9NYX4
  ENST ID: ENST00000368558
  CDS Start-End: 117-491
cccgcccggccgcgaagcgtctggaaccgcatcctccgcatccacatccgcatcgtcgtcctccccgaccgcgtcctgcagcagctgccagtggagccgcctgactgccatccaccatggtgaagctgggctgcagcttctctgggaagccaggtaaagaccctggggaccaggatggggctgccatggacagtgtgcctctgatcagccccttggacatcagccagctccagccgccactccctgaccaggtggtcatcaagacacagacagaataccagctgtcctccccagaccagcagaatttccctgacctggagggccagaggctgaactgcagccacccagaggaagggcgcaggctgcccaccgcacggatgatcgccttcgccatggcgctactgggctgcgtgctgatcatgtacaaggccatctggtacgaccagttcacctgccccgacggcttcctgctgcggggccctgagttctgaactggaggctgatcttcggtgtcctgaagccatggctccattacaaactgtccgcagtgtccccaaccgcagaagcgggagggcctgggcccggggcgcacaggagggctcagccccaccgaccctgacccggcccctcccgcagcacaagatctgcacgccgctgaccctggagatgtactacacggagatggaccccgagcgccaccgcagcatcctggcggccatcggggcctacccgctgagccgcaagcacggcacggagacgccggcggcctggggggacggctaccgcgcagccaaggaggagcgcaaggggcccacccaggctggg

SEQ ID NO: 113428 - DNA, 489 bp, Homo sapiens
  Payload ID: 2174
  Gene Symbol: CAPS
  Gene Name: calcyphosine
  Uniprot ID: Q13938
  ENST ID: ENST00000222125
  CDS Start-End: 1-489
atggacgccgtggatgccaccatggagaaactccgggcacagtgcctgtcccgcggggcctcgggcatccagggcctggccaggtttttccgccaactagaccgggacgggagcagatccctggacgctgatgagttccggcagggtctggccaaactcgggctggtgctggaccaggcggaggcagagggtgtgtgcaggaagtgggaccgcaatggcagcgggacgctggatctggaggagttccttcgggcgctgcggccccccatgtcccaggcccgggaggctgtcatcgcagctgcatttgccaagctggaccgcagtggggacggcgtcgtgacggtggacgacctccgcggggtgtacagtggccgtgcccaccccaaggtcacactggcggaattccaggactactacagcggcgtgagtgcctccatgaacacggatgaggagttcgtggccatgatgaccagtgcctggcagctgtga

SEQ ID NO: 113429 - DNA, 1789 bp, Homo sapiens
  Payload ID: 2174
  Gene Symbol: CAPS
  Gene Name: calcyphosine
  Uniprot ID: Q13938
  ENST ID: ENST00000452990
  CDS Start-End: 488-1234
ttttaagtagagacagggtttcaccatgttggccaggctggtctcaaactcctgacctcaggtgatctgtctgcctcggcctcccaaagtgctgtgattacaggcatgagccaccgcgcccagcccacctggggcatttttgttgctgtacaatagaaacaagttctctatatgttccccaggctggtccaaactcctgggctcaagtgatcctcccacctagacctcccaaagtgctgggatttcaggcatgagccgcagtggccggtcagaacctggggcccttttgaactttgattcctcagcaattttgtcagccctggctcgggctgagaagcccctgtgaagccagagagggaaagggacctgtccagggtcacacaggaatcatgcgtcaagcctccccagccacggacttgtctccatccagggcatttcagcccctgcagggcagtggcctgcccctcctccttggagccaggaagggatgcagtgccacagggatctggctctgtcccaggccctgtggggctggcagttgagtaagcagtcaggctgggcgcacccatccctcccccactccccactgcccagcacagtgcattcatgcagctgggccccaccccatctccagaggcaccttccactagcaacagtctccccaggcacaacacagctaacacaaggccccgcaggcaggactctgggacagacgcaggccagctgcccagagcccagaccaagcatggacgccgtggatgccaccatggagaaactccgggcacagtgcctgtcccgcggggcctcgggcatccagggcctggccaggtttttccgccaactagaccgggacgggagcagatccctggacgctgatgagttccggcagggtctggccaaactcgggctggtgctggaccaggcggaggcagagggtgtgtgcaggaagtgggaccgcaatggcagcgggacgctggatctggaggagttccttcgggcgctgcggccccccatgtcccaggcccgggaggctgtcatcgcagctgcatttgccaagctggaccgcagtggggacggcgtcgtgacggtggacgacctccgcggggtgtacagtggccgtgcccaccccaaggtcacactggcggaattccaggactactacagcggcgtgagtgcctccatgaacacggatgaggagttcgtggccatgatgaccagtgcctggcagctgtgagcagctccggctcagccctgctgccctggcctgtcactccccacccctgccggagacctcccttccctgggccccttctctcctgggcagccacaccacagagcggggaggggcaggtgggggaatggaggctgcaggactggctagaccaggtccctgccggtccaccaggcggaggtgggacaaaggtcctaacaggagtcactggctcaggaccccagggagaaacgctctccccacccacgccatgctgaccagagatcttgcagcccctgtggatgcccccgccgaggtcccccgatccccgcacccggactgctgctccctgcccctcccttgcgggtcccccaggaagccaggtgaccccaggtgggaggctgtgtgtggaggccatcctggaaggaagtttagacctgcccaggtgtggagcgaggggcacaggggcatcctaacctcagaaactgaaataaagcctttgaaaaaaaaatctgtaaaacatcaacccccaatcagaagatggcaaatggggaataaaaatagcaggtaacatgtcca

SEQ ID NO: 113430 - DNA, 3750 bp, Homo sapiens
  Payload ID: 2174
  Gene Symbol: CAPS
  Gene Name: calcyphosine
  ENST ID: ENST00000588776
  CDS Start-End: 2368-3195
ctgccaccctgccacccaggctgaagtacagtggtgtgatctaggctcactgcaacctctgcctccagggttcaagtgattctcctgccttggcctcctgagtagctgggattacaggcatgcaccaccatgcccagctatttattttttttagtagagatggggtttcaaaatgttggccaggctggtcttgaactcctgacctcaagtgatccgcccacctcagcctcccaaagtgctgggattacagctgtgagccaccgcgcccagccctggcctctttttttaagttatttatttatttttgagacagagtctcactctgtcgcccaggctgtggtgcagtggcatggtcttggttcactgcaacctctgcctcctgggttcaagtgattctcctgcctcagcctctggagtaggtgggattacaggcacccgccaccatacctggctaattttctttttttttttttgagacaaagtcttgctcttgtcccccagtctggagtgcaatggcacgatctcggctcactgcaacctccgcttcccaggttcatgcaattctcctgcctcagcctcccgagtagctgggattacaggcacataccaccacgcccagctagtttttcgtattttaagtagagacagggtttcaccatgttggccaggctggtctcaaactcctgacctcaggtgatctgtctgcctcggcctcccaaagtgctgtgattacaggcatgagccaccgcacccggctgactaatttttgtatttatagtagagacagggtttcaccatgttggccaggctggtctcgaactgctgacctcatgatctgcccgcctcggcctcccaaagtgctgggattacaggcgtgagccaccgtgcccggccagtttatttacttatttttaagaggcgggcgtcttgctctgtaacccaggctggagtgcagtggtgcgatcatagctcactgcagcctccaactcccgggctcaagtgatcctcctgcctcagccttccaagtaggtgggattacaggaacacaccaccatgcctggctaattttttgtagtttttgtagagatgggggggtctcactatgttgcacaggcgggtctcaaactcctgggctcaagtgatcttcctgccctggcttcccaaagtgttgggattacaggcatgagccaccgcgctcaggcaaggcaacttctgacaatataattgtgctgtgagcgaggtaaagccaggcttggagaaggctccgattgatgatccttgggtcggggcgaacagtgggtcctcaaacagggcccacgtttcaagtcctggaaaacccacctatcttagcgggcaggtatatccgatgtctccgttgaaggccttcagtgaggtggcttcgtctcttgaggtttatgtccaggatcagggctgctcttccactcggggtcacaacctctggctcaccaccttgtcaggagccagcccactaagtcacgtttcaggcctgaaaaccaacaacaaaagatccgtaaagacagaaatcctgggactggctcctaacaacggccagtgacaagctttgtggcagtgagcagaggtgtccctcaggctcagctcagtctctgtgggttgcaggacctgcccttggaggtgggcctgggtgggaggtcttagggccccaggacctgggccacctggggctttttttttttttttctttttgagatggagtcttgctctgtcgcccagactggagtgcagtggtgcaatcttggctcactgcaagctccacctcctgggttcaagcgattctcctgcctcagcttcctaagtagctcggattacaggcgcccaccatcatgcacggctaatttttgtatttttagtagaggcggggtttcaccatgttggtcaggctggtctcaaactcctcaccttgtgatctgcccacctcggcctcccaaagtgctgggattacaggcatgagccaccgcgcccagcccacctggggcatttttgttgctgtacaatagaaacaagttctctatatgttccccaggctggtccaaactcctgggctcaagtgatcctcccacctagacctcccaaagtgctgggatttcaggcatgagccgcagtggccggtcagaacctggggcccttttgaactttgattcctcagcaattttgtcagccctggctcgggctgagaagcccctgtgaagccagagagggaaagggacctgtccagggtcacacaggaatcatgcgtcaagcctccccagccacggacttgtctccatccagggcatttcagcccctgcagggcagtggcctgcccctcctccttggagccaggaagggatgcagtgccacagggatctggctctgtcccaggccctgtggggctggcagttgagtaagcagtcaggctgggcgcacccatccctcccccactccccactgcccagcacagtgcattcatgcagctgggccccaccccatctccagaggcaccttccactagcaacagtctccccaggcacaacacagctaacacaaggccccgcaggcaggactctgggacagacgcaggccagctgcccagagcccagaccaagcatggacgccgtggatgccaccatggagaaactccgggcacagtgcctgtcccgcggggcctcgggcatccagggcctggccaggtttttccgccaactagaccgggacgggagcagatccctggacgctgatgagttccggcagggtctggccaaactcgggctggtgctggaccaggcggaggcagagggtgtgtgcaggaagtgggaccgcaatggcagcgggacgctggatctggaggagttccttcgggcgctgcggccccccatgtcccaggcccgggaggctgtcatcgcagctgcatttgccaagctggaccgcagtggggacggcgtcgtgacggtggacgacctccgcggggtgtacagtggccgtgcccaccccaaggtgcgcagtggggagtggaccgaggacgaggtgctgcgccgcttcctggacaacttcgactcctctgagaaggacgggcaggtcacactggcggaattccaggactactacagcggcgtgagtgcctccatgaacacggatgaggagttcgtggccatgatgaccagtgcctggcagctgtgagcagctccggctcagccctgctgccctggcctgtcactccccacccctgccggagacctcccttccctgggccccttctctcctgggcagccacaccacagagcggggaggggcaggtgggggaatggaggctgcaggactggctagaccaggtccctgccggtccaccaggcggaggtgggacaaaggtcctaacaggagtcactggctcaggaccccagggagaaacgctctccccacccacgccatgctgaccagagatcttgcagcccctgtggatgcccccgccgaggtcccccgatccccgcacccggactgctgctccctgcccctcccttgcgggtcccccaggaagccaggtgaccccaggtgggaggctgtgtgtggaggccatcctggaaggaagtttagacctgcccaggtgtggagcgaggggcacaggggcatcctaacctcagaaactgaaataaagcctttgaaaaaaaaatctgtaaaacatcaacccccaatcagaagatggcaaatggggaataaaaatagcaggtaacatgtcca

SEQ ID NO: 113431 - DNA, 537 bp, Homo sapiens
  Payload ID: 2174
  Gene Symbol: CAPS
  Gene Name: calcyphosine
  ENST ID: ENST00000588865
  CDS Start-End: 135-537
gccccgcaggcaggactctgggacagacgcaggccaggtgagcatctgaacaaggggcagtcggccagggtgggcttgcgggagtccccaccttgacctctctcccttccagctgcccagagcccagaccaagcatggacgccgtggatgccaccatggagaaactccgggcacagtgcctgtcccgcggggcctcgggcatccagggcctggccaggtttttccgccaactagaccgggacgggagcagatccctggacgctgatgagttccggcagggtctggccaaactcgggctggtgctggaccaggcggaggcagagggtgtgtgcaggaagtgggaccgcaatggcagcgggacgctggatctggaggagttccttcgggcgctgcggccccccatgtcccaggcccgggaggctgtcatcgcagctgcatttgccaagctggaccgcagtggggacggcgtcgtgacggtggacgacctccgcggggtgtacagtggccgtgcccaccccaaggtgcgcagtggggagt

SEQ ID NO: 113432 - DNA, 1606 bp, Homo sapiens
  Payload ID: 2174
  Gene Symbol: CAPS
  Gene Name: calcyphosine
  Uniprot ID: Q13938
  ENST ID: ENST00000618299
  CDS Start-End: 151-720
acagtgcattcatgcagctgggccccaccccatctccagaggcaccttccactagcaacagtctccccaggcacaacacagctaacacaaggccccgcaggcaggactctgggacagacgcaggccagctgcccagagcccagaccaagcatggacgccgtggatgccaccatggagaaactccgggcacagtgcctgtcccgcggggcctcgggcatccagggcctggccaggtttttccgccaactagaccgggacgggagcagatccctggacgctgatgagttccggcagggtctggccaaactcgggctggtgctggaccaggcggaggcagagggtgtgtgcaggaagtgggaccgcaatggcagcgggacgctggatctggaggagttccttcgggcgctgcggccccccatgtcccaggcccgggaggctgtcatcgcagctgcatttgccaagctggaccgcagtggggacggcgtcgtgacggtggacgacctccgcggggtgtacagtggccgtgcccaccccaaggtgcgcagtggggagtggaccgaggacgaggtgctgcgccgcttcctggacaacttcgactcctctgagaaggacgggcaggtcacactggcggaattccaggactactacagcggcgtgagtgcctccatgaacacggatgaggagttcgtggccatgatgaccagtgcctggcagctgtgagcagctccggctcagccctgctgccctggcctgtcactccccacccctgccggagacctcccttccctgggccccttctctcctgggcagccacaccacagagcggggaggggcaggtgggggaatggaggctgcaggactggctagaccaggtccctgccggtccaccaggcggaggtgggacaaaggtcctaacaggagtcactggctcaggaccccagggagaaacgctctccccacccacgccatgctgaccagagatcttgcagcccctgtggatgcccccgccgaggtcccccgatccccgcacccggactgctgctccctgcccctcccttgcgggtcccccaggaagccaggtgaccccaggtgggaggctgtgtgtggaggccatcctggaaggaagtttagacctgcccaggtgtggagcgaggggcacaggggcatcctaacctcagaaactgaaataaagcctttgaaaaaaaaatctgtaaaacatcaacccccaatcagaagatggcaaatggggaataaaaatagcaggtaacatgtccagcgggcccagtatctacattctggtgagcggcccgaggctgggagctctgggcgggggcagaccggcggggccttgcagcaggggtgggggtaaagtgcgggtggtggtggagagaacagggctgtggctggaccccagcactggtgacacgctgggtgggagcatgaggccccaggctgctggaggtcctcgcccggggaggtggaggccgttcctggtcaggggcttcctgaggcccctggggcatgcagaggccagggttttagttaaaagtttaatgtagttcccaaatacatttcatatgacaatcttacataaatgttccaaaac

SEQ ID NO: 113433 - DNA, 3831 bp, Homo sapiens
  Payload ID: 2175
  Gene Symbol: CAPS2
  Gene Name: calcyphosine 2
  ENST ID: ENST00000328705
  CDS Start-End: 53-178
gggggagaggaggggaaagctagacctgcagagtgaagaaagctggtaatagatgtctgacaaactaaagaaagacttgtgttaccacaattcagacagcccggaatatcaagattcatctttttcactaattgtggcattcacagatgcaaagtattgttcctgggtgtgtctgtgagagtattgccaaaggagagcagtgaactgggaaaagcagacccacctcaatgtgggtgggcaacatccaatcggctgccagctagaataaaccaggcaggagaagatggaagagccgacttgctgaatcttccagccttcatctttctcgtgtgctggatgcttcctgccctcaaacatcagactccaggttcttcgtcttttggactctcggatttacatcagtggtttaccaggtgctctcaggccttcagccacacactgaaggctgaattgtcggcttcccgacttttgagattttgaaacttggactgagctactgctggcttccttgcttctcaacttacagatgggacttcacctatagatcatcaaaggtggacttctgagtcatggacaaaccagaattcttgcccaccagtggtcccacgacttgatttgggaagccttgttgactctgatgatgaggatcagaacataatacctgaaaatttgccagcaccaacagacaaatgtaaactaaaatatcagcaatgtaaaactgaaattaaagagggctataagcagtatagtcagagaaatgcagaaaatacaaaatcaaatgttacacataaacagtctccaagaaacaagatagatgaaaagtgtgtgcaagatgaagaagccaacacagatgaccttacgactctggataggaaagccatcttacagcaaggttatgcagacaactcttgcgataaacaacagagggcaagaaaattggatgcagtaagttgtcagcatttttacttatttggaaattgtggctgcagagaagaagaaacagattgttgcagagcaagtgatgatagaccacttatctagggctgtcatcagtgatccagagcaaaatttagccattgagcaaaaagaaagtgatcatatccttccagattcaaagatgacacctcttcgatttagaaaaagaacactacatgaaacaaagataagaactcattctacattaactgaaaatgtgctttctcataaattacagtttgatggtaggatcgtatcacgtaatggacgtgatgcttgcagagagctcattgggttctttttcactcatgaccaatcccttacaatttatgaatatcgacaatttgggaaaaatagaacaaatgtgcttccttttattcaaaaaagcatttatagtcatcagtgtggacgaagaaaaggaaaacaataccgacttggtgatttttatgttggtgcaaccttgacatttttgagttctgatcatctcagccttccagaaagcatcaaagaaaacacattacttaaactccgaatcacaaatattgatcaaatagctttggattctctcaaaactgcttctatggaacaggaggatgatataatcattcaagaaaccaatgataggctggtcttcaaagcaattcaagatgtgctaaaagaaaaactacataaaagaggtgttcgtattttgactggattgggaaaatattttcaacagttggacaaggaaggaaatggacttttagataaggcagattttaagcaagctctaaaagtgtttcacttagaagtgtctgaaaaggattttgagtctgcatggctaattctgaatgacaatggcaatggcaaggttgattatggagaattcaaacgtggtattattggtgaaatgaatgaatacaggaaatcatatgttcgaaaggcctttatgaaactggatttcaacaaaagtggcagtgtgcctattataaacataagaaaatgttactgtgcaaagaagcattctcaagtaatttcaggccattcaacagaggaagaaatcaaatcatcctttctagaaacattaaaagttgcctgcagcaagtctgatgaagtgtcatatggtgaatttgaagattactatgaaggtttaagtataggaatagtagatgatgaagactttgttaacatcttacgtactccatgggggatttagtctttaataatacatatgtcatcaacactaagcattttattggagagatgatatcaatgtaaaggatgatcaaacactggaatatattttcctaggacttcctttattctggtttcttgtttgtttgttttgttttgttttgttttctcaaaaatgttgaatttggaaagagaactatccagaaagatagatgtaggggtgtgttagtgtttgtgcatgtgtatgcctgttcacatgtccttacatttgtaaagatatctttttggtttattacttatcttgcgtatattttagaggtcattttttattaacttcagtaggaaagttacatctgcatcaaacaatatggcaacatctatttattaaccaagtttcctgtcctttcacattgttttttgctacctcttcctcagaatatatttgccaccatggtcaatttgataaattagaattgggcccaaagccagtgagataattcaatgtgtttttaacacatgaaaatattaaaggatatgcaagagaaatttttcaagcagtgtgattatagatgttttctgtatatagaatatttcaaatgatggaggtttaccccatgatgctcatttaaatactgacttgtcttttaaatctgtcttctaaattatgtactgttgttggttaaatagagcacaatgtagttattctaatgcccagttgtatttgttcttttattctgctttttaactgtaatcctttttaccagcatacgattgttattgagcaatatgaaagggaaatgttctttattaaaatcaatacattatcttattaaacaaagatcctaaaagtatattgttgcatatatgaatccaaggaatagttcagtaattattgcctaaaatgtgaaagcatattttgtatcctaaaatgaatgtatgatattctaaacatctgttttagtataacaaacaattgaaacatttccttctaaatatatgttatttaatagttacatgtattataatcattctttctaaattctttgctagtcatttcttcctgggaatacagagaaaagagacaactttatgagttgttttcaacttcataattttaaattttctatgttaatataacataaattagaaaaaataagtgattcaaaatgaaaatatttactttgtagaatatgactttagacatatcactgtatccatctatacttggcagcaacatgagaagtgtgatacatgtgaacccaacaaattcaaagttgcacttttcaagatgtgagaaggtactaaaacttaatactaaaacatgagagggaaaatatgtgtaaacctctagtgctattttcactggctaaattctttatttcttgatttttttaaaaattaggttattaaaattaaaacaatatgctagaagacattttggcagaaataagtctataacactatttttgtcacatatctttttcttggaaaaatttatccaactatagacatcttaaaccctacaaattgttcttgttaaaaatgactaatactgggggtgctcaatatgcatatagtgtttttcattgataatttttatttagttcttaagaaacctgttcttaatgttggcatgtcacatttttctgttactataatcagaaaatgtatagtctgttatac

SEQ ID NO: 113434 - DNA, 2569 bp, Homo sapiens
  Payload ID: 2175
  Gene Symbol: CAPS2
  Gene Name: calcyphosine 2
  ENST ID: ENST00000336815
  CDS Start-End: 52-480
ggggagaggaggggaaagctagacctgcagagtgaagaaagctggtaatagatgtctgacaaactaaagaaagacttgtgttacgatcagaacataatacctgaaaatttgccagcaccaacagacaaatgtaaactaaaatatcagcaatgtaaaactgaaattaaagagggctataagcagtatagtcagagaaatgcagaaaatacaaaatcaaatgttacacataaacagtctccaagaaacaagatagatgaaaagtgtgtgcaagatgaagaagccaacacagatgaccttacgactctggataggaaagccatcttacagcaaggttatgcagacaactcttgcgataaacaacagagggcaagaaaattggatgcagtaagttgtcagcatttttacttatttggaaattgtggctgcagagaagaagaaacagattgttgcagagcaagtgatgatagaccacttatctagggctgtcatcagtgatccagagcaaaatttagccattgagcaaaaagaaagtgatcatatccttccagattcaaagatgacacctcttcgatttagaaaaagaacactacatgaaacaaaggtgcaaccttgacatttttgagttctgatcatctcagccttccagaaagcatcaaagaaaacacattacttaaactccgaatcacaaatattgatcaaatagctttggattctctcaaaactgcttctatggaacaggaggatgatataatcattcaagaaaccaatgataggctggtcttcaaagcaattcaagatgtgctaaaagaaaaactacataaaagaggtgttcgtattttgactggattgggaaaatattttcaacagttggacaaggaaggaaatggacttttagataaggcagattttaagcaagctctaaaagtgtttcacttagaagtgtctgaaaaggattttgagtctgcatggctaattctgaatgacaatggcaatggcaaggttgattatggagaattcaaacgtggtattattggtgaaatgaatgaatacaggaaatcatatgttcgaaaggcctttatgaaactggatttcaacaaaagtggcagtgtgcctattataaacataagaaaatgttactgtgcaaagaagcattctcaagtaatttcaggccattcaacagaggaagaaatcaaatcatcctttctagaaacattaaaagttgcctgcagcaagtctgatgaagtgtcatatggtgaatttgaagattactatgaaggtttaagtataggaatagtagatgatgaagactttgttaacatcttacgtactccatgggggatttagtctttaataatacatatgtcatcaacactaagcattttattggagagatgatatcaatgtaaaggatgatcaaacactggaatatattttcctaggacttcctttattctggtttcttgtttgtttgttttgttttgttttgttttctcaaaaatgttgaatttggaaagagaactatccagaaagatagatgtaggggtgtgttagtgtttgtgcatgtgtatgcctgttcacatgtccttacatttgtaaagatatctttttggtttattacttatcttgcgtatattttagaggtcattttttattaacttcagtaggaaagttacatctgcatcaaacaatatggcaacatctatttattaaccaagtttcctgtcctttcacattgttttttgctacctcttcctcagaatatatttgccaccatggtcaatttgataaattagaattgggcccaaagccagtgagataattcaatgtgtttttaacacatgaaaatattaaaggatatgcaagagaaatttttcaagcagtgtgattatagatgttttctgtatatagaatatttcaaatgatggaggtttaccccatgatgctcatttaaatactgacttgtcttttaaatctgtcttctaaattatgtactgttgttggttaaatagagcacaatgtagttattctaatgcccagttgtatttgttcttttattctgctttttaactgtaatcctttttaccagcatacgattgttattgagcaatatgaaagggaaatgttctttattaaaatcaatacattatcttattaaacaaagatcctaaaagtatattgttgcatatatgaatccaaggaatagttcagtaattattgcctaaaatgtgaaagcatattttgtatcctaaaatgaatgtatgatattctaaacatctgttttagtataacaaacaattgaaacatttccttctaaatatatgttatttaatagttacatgtattataatcattctttctaaattctttgctagtcatttcttcctgggaatacagagaaaagagacaactttatgagttgttttcaacttcataattttaaattttctatgttaatataacataaattagaaaaaataagtgattcaaaatgaaaatatttactttgtagaatatgactttagacatatcactgtatccatctatacttggcagcaacatgagaagtgtg

SEQ ID NO: 113435 - DNA, 3430 bp, Homo sapiens
  Payload ID: 2175
  Gene Symbol: CAPS2
  Gene Name: calcyphosine 2
  Uniprot ID: Q9BXY5
  ENST ID: ENST00000393284
  CDS Start-End: 603-1751
ggagccaaattcagccattctttggaagaaagaagcctctacaacaaaggtggacttctgagtcatggacaaaccagaattcttgcccaccagtggtcccacgacttgatttgggaagccttgttgactctgatgatgaggacaatttttcatatattccacttagtacagcaaacctgccaaattcatcttctactcttggctgggtcacaccatgtcaaactccatatactcagtatcatctaaataaattggatcagaacataatacctgaaaatttgccagcaccaacagacaaatgtaaactaaaatatcagcaatgtaaaactgaaattaaagagggctataagcagtatagtcagagaaatgcagaaaatacaaaatcaaatgttacacataaacagtctccaagaaacaagatagatgaaaagtgtgtgcaagatgaagaagccaacacagatgaccttacgactctggataggaaagccatcttacagcaaggttatgcagacaactcttgcgataaacaacagagggcaagaaaattggatgcagaaattgtggctgcagagaagaagaaacagattgttgcagagcaagtgatgatagaccacttatctagggctgtcatcagtgatccagagcaaaatttagccattgagcaaaaagaaagtgatcatatccttccagattcaaagatgacacctcttcgatttagaaaaagaacactacatgaaacaaagataagaactcattctacattaactgaaaatgtgctttctcataaattacagtttgatggtaggatcgtatcacgtaatggacgtgatgcttgcagagagctcattgggttctttttcactcatgaccaatcccttacaatttatgaatatcgacaatttgggaaaaatagaacaaatgtgcttccttttattcaaaaaagcatttatagtcatcagtgtggacgaagaaaaggaaaacaataccgacttggtgatttttatgttggtgcaaccttgacatttttgagttctgatcatctcagccttccagaaagcatcaaagaaaacacattacttaaactccgaatcacaaatattgatcaaatagctttggattctctcaaaactgcttctatggaacaggaggatgatataatcattcaagaaaccaatgataggctggtcttcaaagcaattcaagatgtgctaaaagaaaaactacataaaagaggtgttcgtattttgactggattgggaaaatattttcaacagttggacaaggaaggaaatggacttttagataaggcagattttaagcaagctctaaaagtgtttcacttagaagtgtctgaaaaggattttgagtctgcatggctaattctgaatgacaatggcaatggcaaggttgattatggagaattcaaacgtggtattattggtgaaatgaatgaatacaggaaatcatatgttcgaaaggcctttatgaaactggatttcaacaaaagtggcagtgtgcctattataaacataagaaaatgttactgtgcaaagaagcattctcaagtaatttcaggccattcaacagaggaagaaatcaaatcatcctttctagaaacattaaaagttgcctgcagcaagtctgatgaagtgtcatatggtgaatttgaagattactatgaaggtttaagtataggaatagtagatgatgaagactttgttaacatcttacgtactccatgggggatttagtctttaataatacatatgtcatcaacactaagcattttattggagagatgatatcaatgtaaaggatgatcaaacactggaatatattttcctaggacttcctttattctggtttcttgtttgtttgttttgttttgttttgttttctcaaaaatgttgaatttggaaagagaactatccagaaagatagatgtaggggtgtgttagtgtttgtgcatgtgtatgcctgttcacatgtccttacatttgtaaagatatctttttggtttattacttatcttgcgtatattttagaggtcattttttattaacttcagtaggaaagttacatctgcatcaaacaatatggcaacatctatttattaaccaagtttcctgtcctttcacattgttttttgctacctcttcctcagaatatatttgccaccatggtcaatttgataaattagaattgggcccaaagccagtgagataattcaatgtgtttttaacacatgaaaatattaaaggatatgcaagagaaatttttcaagcagtgtgattatagatgttttctgtatatagaatatttcaaatgatggaggtttaccccatgatgctcatttaaatactgacttgtcttttaaatctgtcttctaaattatgtactgttgttggttaaatagagcacaatgtagttattctaatgcccagttgtatttgttcttttattctgctttttaactgtaatcctttttaccagcatacgattgttattgagcaatatgaaagggaaatgttctttattaaaatcaatacattatcttattaaacaaagatcctaaaagtatattgttgcatatatgaatccaaggaatagttcagtaattattgcctaaaatgtgaaagcatattttgtatcctaaaatgaatgtatgatattctaaacatctgttttagtataacaaacaattgaaacatttccttctaaatatatgttatttaatagttacatgtattataatcattctttctaaattctttgctagtcatttcttcctgggaatacagagaaaagagacaactttatgagttgttttcaacttcataattttaaattttctatgttaatataacataaattagaaaaaataagtgattcaaaatgaaaatatttactttgtagaatatgactttagacatatcactgtatccatctatacttggcagcaacatgagaagtgtgatacatgtgaacccaacaaattcaaagttgcacttttcaagatgtgagaaggtactaaaacttaatactaaaacatgagagggaaaatatgtgtaaacctctagtgctattttcactggctaaattctttatttcttgatttttttaaaaattaggttattaaaattaaaacaatatgctagaagacattttggcagaaataagtctataacactatttttgtcacatatctttttcttggaaaaatttatccaactatagacatcttaaaccctacaaattgttcttgttaaaaatgactaatactgggggtgctcaatatgcatatagtgtttttcattgataatttttatttagttcttaagaaacctgttcttaatgttggcatgtcacatttttctgttactataatcagaaaatgtatagtctgttatactgtaaaaaaaaaaaaaaa

SEQ ID NO: 113436 - DNA, 2135 bp, Homo sapiens
  Payload ID: 2175
  Gene Symbol: CAPS2
  Gene Name: calcyphosine 2
  Uniprot ID: Q9BXY5
  ENST ID: ENST00000409445
  CDS Start-End: 198-1871
agacgcgggcctggactgtctagactgtcctgtctaaagctttctgaatgcggtttttggaggaatcgcgctagtttataccttttccaactcttctaactctggacctcttcttaccgagcttgttaggtgaaatcaggctgactgtctcttgtgcccctcgcctgtcctgtccaggaatcccagttaggtaggggatggggaattccttctgctacactgcagtatactgcatgataaacacaggaactcaaatggatttagaggttaaaggagttgctgccacttctaggagccaaattcagccattctttggaagaaagaagcctctacaacaaaggtggacttctgagtcatggacaaaccagaattcttgcccaccagtggtcccacgacttgatttgggaagccttgttgactctgatgatgaggacaatttttcatatattccacttagtacagcaaacctgccaaattcatcttctactcttggctgggtcacaccatgtcaaactccatatactcagtatcatctaaataaattggatcagaacataatacctgaaaatttgccagcaccaacagacaaatgtaaactaaaatatcagcaatgtaaaactgaaattaaagagggctataagcagtatagtcagagaaatgcagaaaatacaaaatcaaatgttacacataaacagtctccaagaaacaagatagatgaaaagtgtgtgcaagatgaagaagccaacacagatgaccttacgactctggataggaaagccatcttacagcaaggttatgcagacaactcttgcgataaacaacagagggcaagaaaattggatgcagaaattgtggctgcagagaagaagaaacagattgttgcagagcaagtgatgatagaccacttatctagggctgtcatcagtgatccagagcaaaatttagccattgagcaaaaagaaagtgatcatatccttccagattcaaagatgacacctcttcgatttagaaaaagaacactacatgaaacaaagataagaactcattctacattaactgaaaatgtgctttctcataaattacagtttgatggtaggatcgtatcacgtaatggacgtgatgcttgcagagagctcattgggttctttttcactcatgaccaatcccttacaatttatgaatatcgacaatttgggaaaaatagaacaaatgtgcttccttttattcaaaaaagcatttatagtcatcagtgtggacgaagaaaaggaaaacaataccgacttggtgatttttatgttggtgcaaccttgacatttttgagttctgatcatctcagccttccagaaagcatcaaagaaaacacattacttaaactccgaatcacaaatattgatcaaatagctttggattctctcaaaactgcttctatggaacaggaggatgatataatcattcaagaaaccaatgataggctggtcttcaaagcaattcaagatgtgctaaaagaaaaactacataaaagaggtgttcgtattttgactggattgggaaaatattttcaacagttggacaaggaaggaaatggacttttagataaggcagattttaagcaagctctaaaagtgtttcacttagaagtgtctgaaaaggattttgagtctgcatggctaattctgaatgacaatggcaatggcaaggttgattatggagaattcaaacgtggtattattggtgaaatgaatgaatacaggaaatcatatgttcgaaaggcctttatgaaactggatttcaacaaaagtggcagtgtgcctattataaacataagaaaatgttactgtgcaaagaagcattctcaagtaatttcaggttgaccagcaaggacaaacatgaaaatgcttaaaaaaaagaaagcgcttaaaacaaagaaatagaaggtaatgggcatatataaaataagccaagcaagagaagagcaaagacaatctgcagggtggacatggatgtattcgtttctgatcatgagaagaggctcttgtcatacatatcgttccatttttattttaaagttctataaacttctgaggtaaactgatttcttggatgtacttaataaagaataaatgtttcatattgga

SEQ ID NO: 113437 - DNA, 1859 bp, Homo sapiens
  Payload ID: 2175
  Gene Symbol: CAPS2
  Gene Name: calcyphosine 2
  ENST ID: ENST00000409799
  CDS Start-End: 168-1595
gtctaaagctttctgaatgcggtttttggaggaatcgcgctagtttataccttttccaactcttctaactctggacctcttcttaccgagcttgttaggtgaaatcaggctgactgtctcttgtgcccctcgcctgtcctgtccaggaatcccagttagtatactgcatgataaacacaggaactcaaatggatttagaggttaaaggagttgctgccacttctaggagccaaattcagccattctttggaagaaagaagcctctacaacaaaggtggacttctgagtcatggacaaaccagaattcttgcccaccagtggtcccacgacttgatttgggaagccttgttgactctgatgatgaggatcagaacataatacctgaaaatttgccagcaccaacagacaaatgtaaactaaaatatcagcaatgtaaaactgaaattaaagagggctataagcagtatagtcagagaaatgcagaaaatacaaaatcaaatgttacacataaacagtctccaagaaacaagatagatgaaaagtgtgtgcaagatgaagaagccaacacagatgaccttacgactctggataggaaagccatcttacagcaaggttatgcagacaactcttgcgataaacaacagagggcaagaaaattggatgcagaaattgtggctgcagagaagaagaaacagattgttgcagagcaagtgatgatagaccacttatctagggctgtcatcagtgatccagagcaaaatttagccattgagcaaaaagaaagtgatcatatccttccagattcaaagatgacacctcttcgatttagaaaaagaacactacatgaaacaaagataagaactcattctacattaactgaaaatgtgctttctcataaattacagtttgatggtaggatcgtatcacgaacaaatgtgcttccttttattcaaaaaagcatttatagtcatcagtgtggacgaagaaaaggaaaacaataccgacttggtgatttttatgttggtgcaaccttgacatttttgagttctgatcatctcagccttccagaaagcatcaaagaaaacacattacttaaactccgaatcacaaatattgatcaaatagctttggattctctcaaaactgcttctatggaacaggaggatgatataatcattcaagaaaccaatgataggctggtcttcaaagcaattcaagatgtgctaaaagaaaaactacataaaagaggtgttcgtattttgactggattgggaaaatattttcaacagttggacaaggaaggaaatggacttttagataaggcagattttaagcaagctctaaaagtgtttcacttagaagtgtctgaaaaggattttgagtctgcatggctaattctgaatgacaatggcaatggcaaggttgattatggagaattcaaacgtggtattattggtgaaatgaatgaatacaggaaatcatatgttcgaaaggcctttatgaaactggatttcaacaaaagtggcagtgtgcctattataaacataagaaaatgttactgtgcaaagaagcattctcaagtaatttcaggttgaccagcaaggacaaacatgaaaatgcttaaaaaaaagaaagcgcttaaaacaaagaaatagaaggtaatgggcatatataaaataagccaagcaagagaagagcaaagacaatctgcagggtggacatggatgtattcgtttctgatcatgagaagaggctcttgtcatacatatcgttccatttttattttaaagttctataaacttctgaggtaaactgatttcttggatgtacttaataaagaataaatgtttcatattgga

SEQ ID NO: 113438 - DNA, 599 bp, Homo sapiens
  Payload ID: 2175
  Gene Symbol: CAPS2
  Gene Name: calcyphosine 2
  ENST ID: ENST00000436898
  CDS Start-End: 195-599
agacctgcagagtgaagaaagctggtaatagatgtctgacaaactaaagaaagacttgtgttactatactgcatgataaacacaggaactcaaatggatttagaggttaaaggagttgctgccacttctaggagccaaattcagccattctttggaagaaagaagcctctacaacaaaggtggacttctgagtcatggacaaaccagaattcttgcccaccagtgatcagaacataatacctgaaaatttgccagcaccaacagacaaatgtaaactaaaatatcagcaatgtaaaactgaaattaaagagggctataagcagtatagtcagagaaatgcagaaaatacaaaatcaaatgttacacataaacagtctccaagaaacaagatagatgaaaagtgtgtgcaagatgaagaagccaacacagatgaccttacgactctggataggaaagccatcttacagcaaggttatgcagacaactcttgcgataaacaacagagggcaagaaaattggatgcagaaattgtggctgcagagaagaagaaacagattgttgcagagcaagtgatgatagaccacttatctagggctgtc

SEQ ID NO: 113439 - DNA, 559 bp, Homo sapiens
  Payload ID: 2175
  Gene Symbol: CAPS2
  Gene Name: calcyphosine 2
  ENST ID: ENST00000551829
  CDS Start-End: 459-559
agacctgcagagtgaagaaagctggtaatagatgtctgacaaactaaagaaagacttgtgttacggtcccacgacttgatttgggaagccttgttgactctgatgatgaggatcagaacataatacctgaaaatttgccagcaccaacagacaaatgtaaactaaaatatcagcaatgtaaaactgaaattaaagagggctataagcagtatagtcagagaaatgcagaaaatacaaaatcaaatgttacacataaacagtctccaagaaacaagatagatgaaaagtgtgtgcaagatgaagaagccaacacagatgaccttacgactctggataggaaagccatcttacagcaaggttatgcagacaactcttgcgataaacaacagagggcaagaaaattggatgcagaaattgtggctgcagagaagaagaaacagattgttgcagagcaagtgatgatagaccacttatctagggctgtcatcagtgatccagagcaaaatttagccattgagcaaaaagaaagtgatcatatccttccagattcaaagatgac

SEQ ID NO: 113440 - DNA, 593 bp, Homo sapiens
  Payload ID: 2175
  Gene Symbol: CAPS2
  Gene Name: calcyphosine 2
  ENST ID: ENST00000552497
  CDS Start-End: 32-593
agacctgcagagtgaagaaagctggtaatagatgtctgacaaactaaagaaagacttgtgttacgatcagaacataatacctgaaaatttgccagcaccaacagacaaatgtaaactaaaatatcagcaatgtaaaactgaaattaaagagggctataagcagtatagtcagagaaatgcagaaaatacaaaatcaaatgttacacataaacagtctccaagaaacaagatagatgaaaagtgtgtgcaagatgaagaagccaacacagatgaccttacgactctggataggaaagccatcttacagcaaggttatgcagacaactcttgcgataaacaacagagggcaagaaaattggatgcagaaattgtggctgcagagaagaagaaacagattgttgcagagcaagtgatgatagaccacttatctagggctgtcatcagtgatccagagcaaaatttagccattgagcaaaaagaaagtgatcatatccttccagattcaaagatgacacctcttcgatttagaaaaagaacactacatgaaacaaagataagaactcattctacattaactgaaaatgtgctttctc

SEQ ID NO: 113441 - DNA, 969 bp, Homo sapiens
  Payload ID: 2176
  Gene Symbol: CAPSL
  Gene Name: calcyphosine-like
  Uniprot ID: Q8WWF8
  ENST ID: ENST00000397366
  CDS Start-End: 96-722
aaggtggcttgggagggaccagttttcctagatgcaggagacagcgtccatagtttcagttcgaagcaactggtggcaaaaggttagcatttaagatggcagggacagcgcgccatgaccgagagatggcgatccaggccaagaaaaagctcaccacggccaccgaccccattgaaagactccgactgcagtgcctggccaggggctctgctgggatcaaaggacttggcagagtgtttagaattatggatgacgataataatcgaacccttgattttaaagaatttatgaaagggttaaatgattatgctgtggtcatggaaaaagaagaggtggaagaacttttccggaggtttgataaagatggaaatggaacaatagacttcaatgaatttcttctcacattaagacctccaatgtccagagccagaaaagaggtaatcatgcaagcttttagaaagttagacaagactggagatggtgttataacaatcgaagaccttcgtgaagtatataatgcaaaacaccacccaaagtaccagaatggggaatggagtgaggaacaagtatttaggaaatttctggataactttgattcaccctatgacaaagatggattggtgacccctgaggagttcatgaactactatgcaggtgtgagcgcatccattgacactgatgtgtacttcatcatcatgatgagaaccgcctggaagctttaagcacatgacctggggaccaggccctgggacagccatgtggctccaaatgactaaatgtcagctcaaaaaccagaatcgtatttgatttcacactcatcctaatgtttttttctgtgtcaaaatattgcattttctggggccaaaaaacaggcagaaataaaagacattgagtagccaactgtgagtttgccttgcctaagactgtttcctttgttctaaaataggacttaaataaaatgagctctgt

SEQ ID NO: 113442 - DNA, 1004 bp, Homo sapiens
  Payload ID: 2176
  Gene Symbol: CAPSL
  Gene Name: calcyphosine-like
  Uniprot ID: Q8WWF8
  ENST ID: ENST00000397367
  CDS Start-End: 128-754
gagaaaaggcagaaccagagtagagattgacagtgagctgagccaatcaggctgtgaatctgcagcagtgatcccaggtcctccaattaatactaagagagtggaccagggcccctgaggaagacagatggcagggacagcgcgccatgaccgagagatggcgatccaggccaagaaaaagctcaccacggccaccgaccccattgaaagactccgactgcagtgcctggccaggggctctgctgggatcaaaggacttggcagagtgtttagaattatggatgacgataataatcgaacccttgattttaaagaatttatgaaagggttaaatgattatgctgtggtcatggaaaaagaagaggtggaagaacttttccggaggtttgataaagatggaaatggaacaatagacttcaatgaatttcttctcacattaagacctccaatgtccagagccagaaaagaggtaatcatgcaagcttttagaaagttagacaagactggagatggtgttataacaatcgaagaccttcgtgaagtatataatgcaaaacaccacccaaagtaccagaatggggaatggagtgaggaacaagtatttaggaaatttctggataactttgattcaccctatgacaaagatggattggtgacccctgaggagttcatgaactactatgcaggtgtgagcgcatccattgacactgatgtgtacttcatcatcatgatgagaaccgcctggaagctttaagcacatgacctggggaccaggccctgggacagccatgtggctccaaatgactaaatgtcagctcaaaaaccagaatcgtatttgatttcacactcatcctaatgtttttttctgtgtcaaaatattgcattttctggggccaaaaaacaggcagaaataaaagacattgagtagccaactgtgagtttgccttgcctaagactgtttcctttgttctaaaataggacttaaataaaatgagctctgtaaa

SEQ ID NO: 113443 - DNA, 656 bp, Homo sapiens
  Payload ID: 2176
  Gene Symbol: CAPSL
  Gene Name: calcyphosine-like
  ENST ID: ENST00000514524
  CDS Start-End: 96-638
aaggtggcttgggagggaccagttttcctagatgcaggagacagcgtccatagtttcagttcgaagcaactggtggcaaaaggttagcatttaagatggcagggacagcgcgccatgaccgagagatggcgatccaggccaagaaaaagctcaccacggccaccgaccccattgaaagactccgactgcagtgcctggccaggggctctgctgggatcaaaggacttggcagagtgtttagaattatggatgacgataataatcgaacccttgattttaaagaatttatgaaagggttaaatgattatgctgtggtcatggaaaaagaagaggtggaagaacttttccggaggtttgataaagatggaaatggaacaatagacttcaatgaatttcttctcacattaagacctccaatgtccagagccagaaaagaggtaatcatgcaagcttttagaaagttagacaagactggagatggtgttataacaatcgaagaccttcgtgaagtatataatgcaaaacaccacccaaagtaccagaatggggaatggagtgaggaacaagtatttaggaaatttctggataactttgattcaccctatgacaaagatggattggtaagtaaaagagcctaatctaggggaaatttcttc

SEQ ID NO: 113444 - DNA, 665 bp, Homo sapiens
  Payload ID: 2176
  Gene Symbol: CAPSL
  Gene Name: calcyphosine-like
  ENST ID: ENST00000513623
  CDS Start-End: 96-665
aaggtggcttgggagggaccagttttcctagatgcaggagacagcgtccatagtttcagttcgaagcaactggtggcaaaaggttagcatttaagatggcagggacagcgcgccatgaccgagagatggcgatccaggccaagaaaaagctcaccacggccaccgaccccattgaaagactccgactgcagtgcctggccaggggctctgctgggatcaaaggacttggcagagtgtttagaattatggatgacgataataatcgaacccttgattttaaagaatttatgaaagggttaaatgattatgctgtggtcatggaaaaagaagaggtggaagaacttttccggaggtttgataaagatggaaatggaacaatagacttcaatgaatttcttctcacattaagacctccaatgtccagagccagaaaagaggtaatcatgcaagcttttagaaagttagacaagactggagatggtgttataacaatcgaagaccttcgtgaagtatataatgcaaaacaccacccaaagtaccagaatggggaatggagtgaggaacaagtatttaggaaatttctggataactttgattcaccctatgacaaagatggattggtgacccctgaggagttcatgaactactatgcaggtgtgagcgca

SEQ ID NO: 113445 - DNA, 4114 bp, Homo sapiens
  Payload ID: 2177
  Gene Symbol: CALD1
  Gene Name: caldesmon 1
  Uniprot ID: Q05682
  ENST ID: ENST00000361901
  CDS Start-End: 202-1818
ctgtgctcctgcttaaagaaatcagtccttcctttccgacttagtcctcgggaagaagtttcagactacaaggtatcattggaacatttcaagatcatcaaatcaaattccacagggattggtgaccaaccagaaggctcagacatctgattgctgacctgtccagacatcatctggtctccctgaacctgaaatcacaccatggatgattttgagcgtcgcagagaacttagaaggcaaaagagggaggagatgcgactcgaagcagaaagaatcgcctaccagaggaatgacgatgatgaagaggaggcagcccgggaacggcgccgccgagcccgacaggaacggctgcggcagaagcaggaggaagaatccttgggacaggtgaccgaccaggtggaggtgaatgcccagaacagtgtgcctgacgaggaggccaagacaaccaccacaaacactcaagtggaaggggatgatgaggccgcattcctggagcgcctggctcggcgtgaggaaagacgccaaaaacgccttcaggaggctctggagcggcagaaggagttcgacccaacaataacagatgcaagtctgtcgctcccaagcagaagaatgcaaaatgacacagcagaaaatgaaactaccgagaaggaagaaaaaagtgaaagtcgccaagaaagatacgagatagaggaaacagaaacagtcaccaagtcctaccagaagaatgattggagggatgctgaagaaaacaagaaagaagacaaggaaaaggaggaggaggaagaggagaagccaaagcgagggagcattggagaaaatcagatcaaagatgaaaagattaaaaaggacaaagaacccaaagaagaagttaagagcttcatggatcgaaagaagggatttacagaagttaagtcgcagaatggagaattcatgacccacaaacttaaacatactgagaatactttcagccgccctggagggagggccagcgtggacaccaaggaggctgagggcgccccccaggtggaagccggcaaaaggctggaggagcttcgtcgtcgtcgcggggagaccgagagcgaagagttcgagaagctcaaacagaagcagcaggaggcggctttggagctggaggaactcaagaaaaagagggaggagagaaggaaggtcctggaggaggaagagcagaggaggaagcaggaggaagccgatcgaaaactcagagaggaggaagagaagaggaggctaaaggaagagattgaaaggcgaagagcagaagctgctgagaaacgccagaagatgccagaagatggcttgtcagatgacaagaaaccattcaagtgtttcactcctaaaggttcatctctcaagatagaagagcgagcagaatttttgaataagtctgtgcagaaaagcagtggtgtcaaatcgacccatcaagcagcaatagtctccaagattgacagcagactggagcagtataccagtgcaattgagggaacaaaaagcgcaaaacctacaaagccggcagcctcggatcttcctgttcctgctgaaggtgtacgcaacatcaagagtatgtgggagaaagggaatgtgttttcatcccccactgcagcaggcacaccaaataaggaaactgctggcttgaaggtaggggtttctagccgcatcaatgaatggctaactaaaaccccagatggaaacaagtcacctgctcccaaaccttctgacttgagaccaggagacgtatccagcaagcggaacctctgggaaaagcaatctgtggataaggtcacttcccccactaaggtttgagacagttccagaaagaacccaagctcaagacgcaggacgagctcagttgtagagggctaattcgctctgttttgtatttatgttgatttactaaattgggttcattatcttttatttttcaatatcccagtaaacccatgtatattatcactatatttaataatcacagtctagagatgttcatggtaaaagtactgcctttgcacaggagcctgtttctaaagaaacccatgctgtgaaatagagacttttctactgatcatcataactctgtatctgagcagtgataccaaccacatctgaagtcaacagaagatccaagtttaaaattgcctgcggaatgtgtgcagtatctagaaaaatgaaccgtagtttttgtttttttaaatacagaagtcatgttgtttctgcactttataataaagcatggaagaaattatcttagtaggcaattgtaacactttttgaaagtaacccatttcagatttgaaatactgcaataatggttgtctttaaaaaaaaaaaagaaatgtactgttaaggtattactttttttcatgctgatgattcatatctaaattacattattatgttagctgacagtggtactgattttttaggttggttgttttgtggatttctttagtagtgatagtagcctgaaccacattttagataactcaattatgtatgtatgtgcatacacatatacaaacacactaatggtagaatgcttttttatgtgctagactattatatttagtagtatgtcattgtaactagccaatatcacagcttttgaaaaattaaaaaatcacactatattaatattttatatttgccaacagaaacatggcagataggtatcaatatgttttcaatgcctgatgacctataagaagaaagtattgaaaagaagagagattagaactgttagaaggagttgaaattttctaaaagacatagtatttagtttataattaaatgcattcttgaagtccagtgtgaattttattaatgctatcatctcgaccaagctcaaagcctacttattagaaacaatgaagttcacaataggtcataaggtctcttccttttctaaaattgaaagacaagaaatttagtgccaatattgtacagacagaaattccatgtatgagtctcaacaaagactacctttggctaaatgtctagaagcagagaagtaaagtgagcaaaatccagtgttgaggagtcatgacagtactttgatctttatatactctgaagcatttcttcaaacttttctacttttatttgtcattgatacctgtagtaagttgacaatgtggtgaaatttcaaaattatatgtaacttctactagttttactttctcccccaagtcttttttaactcatgatttttacacacacaatccagaacttattatatagcctctaagtctttattcttcacagtagataatgaaagagtcctccagtgtcttggcaaaatgttctagtatagctggatacatacagtggagttctataaactcatacctcagtggacttaaccaaaattgtgttagtctcaattcctaccacactgagggagcctcccaaataactattttcttatctgcagtattcctccagaagagctaaccagggcagggctggcatgagaagtgacatctgcgttacaaagtctatcttcctcataagtctgtaaagagcaattgaatcttctagctttagcaaacctaagccaaaggaaggaaagccatgaagaatgcagaagtcaaaccctcatgacaaagtaggcacaagtctacaataagctaaatcagaatttacaaatacaagtgtcccaggtagcattgactcccgtcattggagtgaaatggatcaaagtttgaattaaggcctatggtaaggtaacattgctttgttgtacttttgaacaagagctcctcctgatcactattacatatttttctagaaaatctaaagttcagaagagaatgtatcactgctgacttttattccaatatttggatggagtaagttttagggtagaattttgttcagtttggatttaatcttttgaaaagtaaattccttgtttactggtttgactataattctctgttatctttacgaggtaaaactgcaagctgactagcatgttctgtgaatctgccattcctaaaaattttataaacacttgatacttttcactgataatggatcgctccaataaacatatattgtgaaaatgcatccacaataaatggaattccttcctgcaaaa

SEQ ID NO: 113446 - DNA, 3612 bp, Homo sapiens
  Payload ID: 2177
  Gene Symbol: CALD1
  Gene Name: caldesmon 1
  Uniprot ID: Q05682
  ENST ID: ENST00000361675
  CDS Start-End: 230-2611
cctgcctgcccgcctgcttgctctctggctgtgctcctgcttaaagaaatcagtccttcctttccgacttagtcctcgggaagaagtttcagactacaaggtatcattggaacatttcaagatcatcaaatcaaattccacagggattggtgaccaaccagaaggctcagacatctgattgctgacctgtccagacatcatctggtctccctgaacctgaaatcacaccatggatgattttgagcgtcgcagagaacttagaaggcaaaagagggaggagatgcgactcgaagcagaaagaatcgcctaccagaggaatgacgatgatgaagaggaggcagcccgggaacggcgccgccgagcccgacaggaacggctgcggcagaagcaggaggaagaatccttgggacaggtgaccgaccaggtggaggtgaatgcccagaacagtgtgcctgacgaggaggccaagacaaccaccacaaacactcaagtggaaggggatgatgaggccgcattcctggagcgcctggctcggcgtgaggaaagacgccaaaaacgccttcaggaggctctggagcggcagaaggagttcgacccaacaataacagatgcaagtctgtcgctcccaagcagaagaatgcaaaatgacacagcagaaaatgaaactaccgagaaggaagaaaaaagtgaaagtcgccaagaaagatacgagatagaggaaacagaaacagtcaccaagtcctaccagaagaatgattggagggatgctgaagaaaacaagaaagaagacaaggaaaaggaggaggaggaagaggagaagccaaagcgagggagcattggagaaaatcaggtagaggtgatggtggaagagaaaacaactgaaagccaggaggaaacagtggtaatgtcattaaaaaatgggcagatcagttcagaagagcctaaacaagaggaggagagggaacaaggttcagatgagatttcccatcatgaaaagatggaagaggaagacaaggaaagagctgaggcagagagggcaaggttggaagcagaagaaagagaaagaattaaagccgagcaagacaaaaagatagcagatgaacgagcaagaattgaagcagaagaaaaagcagctgcccaagaaagagaaaggagagaggcagaagagagggaaaggatgagggaggaagagaaaagggcagcagaggagaggcagaggataaaggaggaagagaaaagggcagcagaggagaggcagaggataaaggaggaagagaaaagggcagcagaggagaggcagaggataaaagaggaagagaaaagggcagcagaggagaggcaaagggccagggcagaggaggaagagaaggctaaggtagaagagcagaaacgtaacaagcagctagaagagaaaaaacatgccatgcaagagacaaagataaaaggggaaaaggtagaacagaaaatagaagggaaatgggtaaatgaaaagaaagcacaagaagataaacttcagacagctgtcctaaagaaacagggagaagagaagggaactaaagtgcaagctaaaagagaaaagctccaagaagacaagcctaccttcaaaaaagaagagatcaaagatgaaaagattaaaaaggacaaagaacccaaagaagaagttaagagcttcatggatcgaaagaagggatttacagaagttaagtcgcagaatggagaattcatgacccacaaacttaaacatactgagaatactttcagccgccctggagggagggccagcgtggacaccaaggaggctgagggcgccccccaggtggaagccggcaaaaggctggaggagcttcgtcgtcgtcgcggggagaccgagagcgaagagttcgagaagctcaaacagaagcagcaggaggcggctttggagctggaggaactcaagaaaaagagggaggagagaaggaaggtcctggaggaggaagagcagaggaggaagcaggaggaagccgatcgaaaactcagagaggaggaagagaagaggaggctaaaggaagagattgaaaggcgaagagcagaagctgctgagaaacgccagaagatgccagaagatggcttgtcagatgacaagaaaccattcaagtgtttcactcctaaaggttcatctctcaagatagaagagcgagcagaatttttgaataagtctgtgcagaaaagcagtggtgtcaaatcgacccatcaagcagcaatagtctccaagattgacagcagactggagcagtataccagtgcaattgagggaacaaaaagcgcaaaacctacaaagccggcagcctcggatcttcctgttcctgctgaaggtgtacgcaacatcaagagtatgtgggagaaagggaatgtgttttcatcccccactgcagcaggcacaccaaataaggaaactgctggcttgaaggtaggggtttctagccgcatcaatgaatggctaactaaaaccccagatggaaacaagtcacctgctcccaaaccttctgacttgagaccaggagacgtatccagcaagcggaacctctgggaaaagcaatctgtggataaggtcacttcccccactaaggtttgagacagttccagaaagaacccaagctcaagacgcaggacgagctcagttgtagagggctaattcgctctgttttgtatttatgttgatttactaaattgggttcattatcttttatttttcaatatcccagtaaacccatgtatattatcactatatttaataatcacagtctagagatgttcatggtaaaagtactgcctttgcacaggagcctgtttctaaagaaacccatgctgtgaaatagagacttttctactgatcatcataactctgtatctgagcagtgataccaaccacatctgaagtcaacagaagatccaagtttaaaattgcctgcggaatgtgtgcagtatctagaaaaatgaaccgtagtttttgtttttttaaatacagaagtcatgttgtttctgcactttataataaagcatggaagaaattatcttagtaggcaattgtaacactttttgaaagtaacccatttcagatttgaaatactgcaataatggttgtctttaaaaaaaaaaaagaaatgtactgttaaggtattactttttttcatgctgatgattcatatctaaattacattattatgttagctgacagtggtactgattttttaggttggttgttttgtggatttctttagtagtgatagtagcctgaaccacattttagataactcaattatgtatgtatgtgcatacacatatacaaacacactaatggtagaatgcttttttatgtgctagactattatatttagtagtatgtcattgtaactagccaatatcacagcttttgaaaaattaaaaaatcacactatattaatattttatatttgccaacagaaacatggcagataggtatcaatatgttttcaatgcctgatgacctataagaagaaagtattgaaaagaagagagattagaactgttagaaggagttgaaattttctaaaagacatagtatttagtttataattaaatgcattcttgaagtcc

SEQ ID NO: 113447 - DNA, 4281 bp, Homo sapiens
  Payload ID: 2177
  Gene Symbol: CALD1
  Gene Name: caldesmon 1
  Uniprot ID: Q05682
  ENST ID: ENST00000393118
  CDS Start-End: 222-1898
aacgggttgggaggagtagatttggctgaggacaagcccagactttcgtcacagggacagaccaacgtgttaacacaaagggagaacacgggagcatcctgcaccgtgcatttcagccacagatcacatggcccctccgcgggcccagcccacgccctgaccgcccggcctggccaggtctccgtatctctctgccccgccgccccttcccaactgcggacatgctgggtggatccggatcgcatggaagacgcagcctggccgcgctctcccaaatcgcctaccagaggaatgacgatgatgaagaggaggcagcccgggaacggcgccgccgagcccgacaggaacggctgcggcagaagcaggaggaagaatccttgggacaggtgaccgaccaggtggaggtgaatgcccagaacagtgtgcctgacgaggaggccaagacaaccaccacaaacactcaagtggaaggggatgatgaggccgcattcctggagcgcctggctcggcgtgaggaaagacgccaaaaacgccttcaggaggctctggagcggcagaaggagttcgacccaacaataacagatgcaagtctgtcgctcccaagcagaagaatgcaaaatgacacagcagaaaatgaaactaccgagaaggaagaaaaaagtgaaagtcgccaagaaagatacgagatagaggaaacagaaacagtcaccaagtcctaccagaagaatgattggagggatgctgaagaaaacaagaaagaagacaaggaaaaggaggaggaggaagaggagaagccaaagcgagggagcattggagaaaatcagggagaagagaagggaactaaagtgcaagctaaaagagaaaagctccaagaagacaagcctaccttcaaaaaagaagagatcaaagatgaaaagattaaaaaggacaaagaacccaaagaagaagttaagagcttcatggatcgaaagaagggatttacagaagttaagtcgcagaatggagaattcatgacccacaaacttaaacatactgagaatactttcagccgccctggagggagggccagcgtggacaccaaggaggctgagggcgccccccaggtggaagccggcaaaaggctggaggagcttcgtcgtcgtcgcggggagaccgagagcgaagagttcgagaagctcaaacagaagcagcaggaggcggctttggagctggaggaactcaagaaaaagagggaggagagaaggaaggtcctggaggaggaagagcagaggaggaagcaggaggaagccgatcgaaaactcagagaggaggaagagaagaggaggctaaaggaagagattgaaaggcgaagagcagaagctgctgagaaacgccagaagatgccagaagatggcttgtcagatgacaagaaaccattcaagtgtttcactcctaaaggttcatctctcaagatagaagagcgagcagaatttttgaataagtctgtgcagaaaagcagtggtgtcaaatcgacccatcaagcagcaatagtctccaagattgacagcagactggagcagtataccagtgcaattgagggaacaaaaagcgcaaaacctacaaagccggcagcctcggatcttcctgttcctgctgaaggtgtacgcaacatcaagagtatgtgggagaaagggaatgtgttttcatcccccactgcagcaggcacaccaaataaggaaactgctggcttgaaggtaggggtttctagccgcatcaatgaatggctaactaaaaccccagatggaaacaagtcacctgctcccaaaccttctgacttgagaccaggagacgtatccagcaagcggaacctctgggaaaagcaatctgtggataaggtcacttcccccactaaggtttgagacagttccagaaagaacccaagctcaagacgcaggacgagctcagttgtagagggctaattcgctctgttttgtatttatgttgatttactaaattgggttcattatcttttatttttcaatatcccagtaaacccatgtatattatcactatatttaataatcacagtctagagatgttcatggtaaaagtactgcctttgcacaggagcctgtttctaaagaaacccatgctgtgaaatagagacttttctactgatcatcataactctgtatctgagcagtgataccaaccacatctgaagtcaacagaagatccaagtttaaaattgcctgcggaatgtgtgcagtatctagaaaaatgaaccgtagtttttgtttttttaaatacagaagtcatgttgtttctgcactttataataaagcatggaagaaattatcttagtaggcaattgtaacactttttgaaagtaacccatttcagatttgaaatactgcaataatggttgtctttaaaaaaaaaaaagaaatgtactgttaaggtattactttttttcatgctgatgattcatatctaaattacattattatgttagctgacagtggtactgattttttaggttggttgttttgtggatttctttagtagtgatagtagcctgaaccacattttagataactcaattatgtatgtatgtgcatacacatatacaaacacactaatggtagaatgcttttttatgtgctagactattatatttagtagtatgtcattgtaactagccaatatcacagcttttgaaaaattaaaaaatcacactatattaatattttatatttgccaacagaaacatggcagataggtatcaatatgttttcaatgcctgatgacctataagaagaaagtattgaaaagaagagagattagaactgttagaaggagttgaaattttctaaaagacatagtatttagtttataattaaatgcattcttgaagtccagtgtgaattttattaatgctatcatctcgaccaagctcaaagcctacttattagaaacaatgaagttcacaataggtcataaggtctcttccttttctaaaattgaaagacaagaaatttagtgccaatattgtacagacagaaattccatgtatgagtctcaacaaagactacctttggctaaatgtctagaagcagagaagtaaagtgagcaaaatccagtgttgaggagtcatgacagtactttgatctttatatactctgaagcatttcttcaaacttttctacttttatttgtcattgatacctgtagtaagttgacaatgtggtgaaatttcaaaattatatgtaacttctactagttttactttctcccccaagtcttttttaactcatgatttttacacacacaatccagaacttattatatagcctctaagtctttattcttcacagtagataatgaaagagtcctccagtgtcttggcaaaatgttctagtatagctggatacatacagtggagttctataaactcatacctcagtggacttaaccaaaattgtgttagtctcaattcctaccacactgagggagcctcccaaataactattttcttatctgcagtattcctccagaagagctaaccagggcagggctggcatgagaagtgacatctgcgttacaaagtctatcttcctcataagtctgtaaagagcaattgaatcttctagctttagcaaacctaagccaaaggaaggaaagccatgaagaatgcagaagtcaaaccctcatgacaaagtaggcacaagtctacaataagctaaatcagaatttacaaatacaagtgtcccaggtagcattgactcccgtcattggagtgaaatggatcaaagtttgaattaaggcctatggtaaggtaacattgctttgttgtacttttgaacaagagctcctcctgatcactattacatatttttctagaaaatctaaagttcagaagagaatgtatcactgctgacttttattccaatatttggatggagtaagttttagggtagaattttgttcagtttggatttaatcttttgaaaagtaaattccttgtttactggtttgactataattctctgttatctttacgaggtaaaactgcaagctgactagcatgttctgtgaatctgccattcctaaaaattttataaacacttgatacttttcactgataatggatcgctccaataaacatatattgtgaaaatgcatccacaataaatggaattccttcctgcaaaatgtctttttctcacttatttttatgtacaatattgatagtgagaggtatgtctattataataaagattatggcacagtaaaacctgt

SEQ ID NO: 113448 - DNA, 525 bp, Homo sapiens
  Payload ID: 2177
  Gene Symbol: CALD1
  Gene Name: caldesmon 1
  ENST ID: ENST00000445569
  CDS Start-End: 130-525
gtatcattggaacatttcaagatcatcaaatcaaattccacagggattggtgaccaaccagaaggctcagacatctgattgctgacctgtccagacatcatctggtctccctgaacctgaaatcacaccatggatgattttgagcgtcgcagagaacttagaaggcaaaagagggaggagatgcgactcgaagcagaaagtgtctacacaaataactcatgcaacatgctgtatcttttgaaaatcgcctaccagaggaatgacgatgatgaagaggaggcagcccgggaacggcgccgccgagcccgacaggaacggctgcggcagaagcaggaggaagaatccttgggacaggtgaccgaccaggtggaggtgaatgcccagaacagtgtgcctgacgaggaggccaagacaaccaccacaaacactcaagtggaaggggatgatgaggccgcattcctggagcgcctggctcggcgtgaggaaagacgccaaaaacgccttcaggaggctctggagcggcag

SEQ ID NO: 113449 - DNA, 2124 bp, Homo sapiens
  Payload ID: 2177
  Gene Symbol: CALD1
  Gene Name: caldesmon 1
  Uniprot ID: Q05682
  ENST ID: ENST00000424922
  CDS Start-End: 12-1610
caactgcggacatgctgggtggatccggatcgcatggaagacgcagcctggccgcgctctcccaaatcgcctaccagaggaatgacgatgatgaagaggaggcagcccgggaacggcgccgccgagcccgacaggaacggctgcggcagaagcaggaggaagaatccttgggacaggtgaccgaccaggtggaggtgaatgcccagaacagtgtgcctgacgaggaggccaagacaaccaccacaaacactcaagtggaaggggatgatgaggccgcattcctggagcgcctggctcggcgtgaggaaagacgccaaaaacgccttcaggaggctctggagcggcagaaggagttcgacccaacaataacagatgcaagtctgtcgctcccaagcagaagaatgcaaaatgacacagcagaaaatgaaactaccgagaaggaagaaaaaagtgaaagtcgccaagaaagatacgagatagaggaaacagaaacagtcaccaagtcctaccagaagaatgattggagggatgctgaagaaaacaagaaagaagacaaggaaaaggaggaggaggaagaggagaagccaaagcgagggagcattggagaaaatcagatcaaagatgaaaagattaaaaaggacaaagaacccaaagaagaagttaagagcttcatggatcgaaagaagggatttacagaagttaagtcgcagaatggagaattcatgacccacaaacttaaacatactgagaatactttcagccgccctggagggagggccagcgtggacaccaaggaggctgagggcgccccccaggtggaagccggcaaaaggctggaggagcttcgtcgtcgtcgcggggagaccgagagcgaagagttcgagaagctcaaacagaagcagcaggaggcggctttggagctggaggaactcaagaaaaagagggaggagagaaggaaggtcctggaggaggaagagcagaggaggaagcaggaggaagccgatcgaaaactcagagaggaggaagagaagaggaggctaaaggaagagattgaaaggcgaagagcagaagctgctgagaaacgccagaagatgccagaagatggcttgtcagatgacaagaaaccattcaagtgtttcactcctaaaggttcatctctcaagatagaagagcgagcagaatttttgaataagtctgtgcagaaaagcagtggtgtcaaatcgacccatcaagcagcaatagtctccaagattgacagcagactggagcagtataccagtgcaattgagggaacaaaaagcgcaaaacctacaaagccggcagcctcggatcttcctgttcctgctgaaggtgtacgcaacatcaagagtatgtgggagaaagggaatgtgttttcatcccccactgcagcaggcacaccaaataaggaaactgctggcttgaaggtaggggtttctagccgcatcaatgaatggctaactaaaaccccagatggaaacaagtcacctgctcccaaaccttctgacttgagaccaggagacgtatccagcaagcggaacctctgggaaaagcaatctgtggataaggtcacttcccccactaaggtttgagacagttccagaaagaacccaagctcaagacgcaggacgagctcagttgtagagggctaattcgctctgttttgtatttatgttgatttactaaattgggttcattatcttttatttttcaatatcccagtaaacccatgtatattatcactatatttaataatcacagtctagagatgttcatggtaaaagtactgcctttgcacaggagcctgtttctaaagaaacccatgctgtgaaatagagacttttctactgatcatcataactctgtatctgagcagtgataccaaccacatctgaagtcaacagaagatccaagtttaaaattgcctgcggaatgtgtgcagtatctagaaaaatgaaccgtagtttttgtttttttaaatacagaagtcatgttgtttctgcactttataataaagcatggaagaaattatcttagtaggcaattgtaacactttttgaaagtaacccatttcagatttgaaatactgcaataatggttgtcttt

SEQ ID NO: 113450 - DNA, 1938 bp, Homo sapiens
  Payload ID: 2177
  Gene Symbol: CALD1
  Gene Name: caldesmon 1
  ENST ID: ENST00000430085
  CDS Start-End: 243-500
gtgtattcggctgcctgcctgcccgcctgcttgctctctggctgtgctcctgcttaaagaaatcagtccttcctttccgacttagtcctcgggaagaagtttcagactacaaggtatcattggaacatttcaagatcatcaaatcaaattccacagggattggtgaccaaccagaaggctcagacatctgattgctgacctgtccagacatcatctggtctccctgaacctgaaatcacaccatggatgattttgagcgtcgcagagaacttagaaggcaaaagagggaggagatgcgactcgaagcagaaagaatcgcctaccagaggaatgacgatgatgaagaggaggcagcccgggaacggcgccgccgagcccgacaggaacggctgcggcagaagcaggaggaagaatccttgggacaggtgaccgaccagcagaaaatgaaactaccgagaaggaagaaaaaagtgaaagtcgccaagaaagatacgagatagaggaaacagaaacagtcaccaagtcctaccagaagaatgattggagggatgctgaagaaaacaagaaagaagacaaggaaaaggaggaggaggaagaggagaagccaaagcgagggagcattggagaaaatcagatcaaagatgaaaagattaaaaaggacaaagaacccaaagaagaagttaagagcttcatggatcgaaagaagggatttacagaagttaagtcgcagaatggagaattcatgacccacaaacttaaacatactgagaatactttcagccgccctggagggagggccagcgtggacaccaaggaggctgagggcgccccccaggtggaagccggcaaaaggctggaggagcttcgtcgtcgtcgcggggagaccgagagcgaagagttcgagaagctcaaacagaagcagcaggaggcggctttggagctggaggaactcaagaaaaagagggaggagagaaggaaggtcctggaggaggaagagcagaggaggaagcaggaggaagccgatcgaaaactcagagaggaggaagagaagaggaggctaaaggaagagattgaaaggcgaagagcagaagctgctgagaaacgccagaagatgccagaagatggcttgtcagatgacaagaaaccattcaagtgtttcactcctaaaggttcatctctcaagatagaagagcgagcagaatttttgaataagtctgtgcagaaaagcagtggtgtcaaatcgacccatcaagcagcaatagtctccaagattgacagcagactggagcagtataccagtgcaattgagggaacaaaaagcgcaaaacctacaaagccggcagcctcggatcttcctgttcctgctgaaggtgtacgcaacatcaagagtatgtgggagaaagggaatgtgttttcatcccccactgcagcaggcacaccaaataaggaaactgctggcttgaaggtaggggtttctagccgcatcaatgaatggctaactaaaaccccagatggaaacaagtcacctgctcccaaaccttctgacttgagaccaggagacgtatccagcaagcggaacctctgggaaaagcaatctgtggataaggtcacttcccccactaaggtttgagacagttccagaaagaacccaagctcaagacgcaggacgagctcagttgtagagggctaattcgctctgttttgtatttatgttgatttactaaattgggttcattatcttttatttttcaatatcccagtaaacccatgtatattatcactatatttaataatcacagtctagagatgttcatggtaaaagtactgcctttgcacaggagcctgtttctaaagaaacccatgctgtgaaatagagacttttctactgatcatcataactctgtatctgagcagtgataccaaccacatctgaagtca

SEQ ID NO: 113451 - DNA, 2665 bp, Homo sapiens
  Payload ID: 2177
  Gene Symbol: CALD1
  Gene Name: caldesmon 1
  Uniprot ID: Q05682
  ENST ID: ENST00000422748
  CDS Start-End: 460-2151
gatttcctgagcatgcctagggaatgacaggcatctccacaggcaggctgcatccaccttggctggggtgtcgtcattggctgcctattagaaaaacgacaggacaatgcataccaccgcctcccgactgtaaacataggggatatgtgttcacttagcatggacttctgggaggggccaaggaagggcggtctggagttttattgaatagagcagtgtgtattcggctgcctgcctgcccgcctgcttgctctctggctgtgctcctgcttaaagaaatcagtccttcctttccgacttagtcctcgggaagaagtttcagactacaaggtatcattggaacatttcaagatcatcaaatcaaattccacagggattggtgaccaaccagaaggctcagacatctgattgctgacctgtccagacatcatctggtctccctgaacctgaaatcacaccatggatgattttgagcgtcgcagagaacttagaaggcaaaagagggaggagatgcgactcgaagcagaaagaatcgcctaccagaggaatgacgatgatgaagaggaggcagcccgggaacggcgccgccgagcccgacaggaacggctgcggcagaagcaggaggaagaatccttgggacaggtgaccgaccaggtggaggtgaatgcccagaacagtgtgcctgacgaggaggccaagacaaccaccacaaacactcaagtggaaggggatgatgaggccgcattcctggagcgcctggctcggcgtgaggaaagacgccaaaaacgccttcaggaggctctggagcggcagaaggagttcgacccaacaataacagatgcaagtctgtcgctcccaagcagaagaatgcaaaatgacacagcagaaaatgaaactaccgagaaggaagaaaaaagtgaaagtcgccaagaaagatacgagatagaggaaacagaaacagtcaccaagtcctaccagaagaatgattggagggatgctgaagaaaacaagaaagaagacaaggaaaaggaggaggaggaagaggagaagccaaagcgagggagcattggagaaaatcagggagaagagaagggaactaaagtgcaagctaaaagagaaaagctccaagaagacaagcctaccttcaaaaaagaagagatcaaagatgaaaagattaaaaaggacaaagaacccaaagaagaagttaagagcttcatggatcgaaagaagggatttacagaagttaagtcgcagaatggagaattcatgacccacaaacttaaacatactgagaatactttcagccgccctggagggagggccagcgtggacaccaaggaggctgagggcgccccccaggtggaagccggcaaaaggctggaggagcttcgtcgtcgtcgcggggagaccgagagcgaagagttcgagaagctcaaacagaagcagcaggaggcggctttggagctggaggaactcaagaaaaagagggaggagagaaggaaggtcctggaggaggaagagcagaggaggaagcaggaggaagccgatcgaaaactcagagaggaggaagagaagaggaggctaaaggaagagattgaaaggcgaagagcagaagctgctgagaaacgccagaagatgccagaagatggcttgtcagatgacaagaaaccattcaagtgtttcactcctaaaggttcatctctcaagatagaagagcgagcagaatttttgaataagtctgtgcagaaaagtggtgtcaaatcgacccatcaagcagcaatagtctccaagattgacagcagactggagcagtataccagtgcaattgagggaacaaaaagcgcaaaacctacaaagccggcagcctcggatcttcctgttcctgctgaaggtgtacgcaacatcaagagtatgtgggagaaagggaatgtgttttcatcccccactgcagcaggcacaccaaataaggaaactgctggcttgaaggtaggggtttctagccgcatcaatgaatggctaactaaaaccccagatggaaacaagtcacctgctcccaaaccttctgacttgagaccaggagacgtatccagcaagcggaacctctgggaaaagcaatctgtggataaggtcacttcccccactaaggtttgagacagttccagaaagaacccaagctcaagacgcaggacgagctcagttgtagagggctaattcgctctgttttgtatttatgttgatttactaaattgggttcattatcttttatttttcaatatcccagtaaacccatgtatattatcactatatttaataatcacagtctagagatgttcatggtaaaagtactgcctttgcacaggagcctgtttctaaagaaacccatgctgtgaaatagagacttttctactgatcatcataactctgtatctgagcagtgataccaaccacatctgaagtcaacagaagatccaagtttaaaattgcctgcggaatgtgtgcagtatctagaaaaatgaaccgtagtttttgtttttttaaatacagaagtcatgttgtttctgcactttataataaagcatggaagaaattatcttagtaggcaattgtaacactttttgaaagtaacccatttcagatttgaaatactgcaataatggttgtcttt

SEQ ID NO: 113452 - DNA, 1915 bp, Homo sapiens
  Payload ID: 2177
  Gene Symbol: CALD1
  Gene Name: caldesmon 1
  Uniprot ID: Q05682
  ENST ID: ENST00000417172
  CDS Start-End: 242-1858
atattcaagcctgctctcaggcctgaaatcttttgacttcattctcaggaggcaagactgggtctacctctagatgtctctgatgggatttagtgtgcagcttgaaatgcaggtatcattggaacatttcaagatcatcaaatcaaattccacagggattggtgaccaaccagaaggctcagacatctgattgctgacctgtccagacatcatctggtctccctgaacctgaaatcacaccatggatgattttgagcgtcgcagagaacttagaaggcaaaagagggaggagatgcgactcgaagcagaaagaatcgcctaccagaggaatgacgatgatgaagaggaggcagcccgggaacggcgccgccgagcccgacaggaacggctgcggcagaagcaggaggaagaatccttgggacaggtgaccgaccaggtggaggtgaatgcccagaacagtgtgcctgacgaggaggccaagacaaccaccacaaacactcaagtggaaggggatgatgaggccgcattcctggagcgcctggctcggcgtgaggaaagacgccaaaaacgccttcaggaggctctggagcggcagaaggagttcgacccaacaataacagatgcaagtctgtcgctcccaagcagaagaatgcaaaatgacacagcagaaaatgaaactaccgagaaggaagaaaaaagtgaaagtcgccaagaaagatacgagatagaggaaacagaaacagtcaccaagtcctaccagaagaatgattggagggatgctgaagaaaacaagaaagaagacaaggaaaaggaggaggaggaagaggagaagccaaagcgagggagcattggagaaaatcagatcaaagatgaaaagattaaaaaggacaaagaacccaaagaagaagttaagagcttcatggatcgaaagaagggatttacagaagttaagtcgcagaatggagaattcatgacccacaaacttaaacatactgagaatactttcagccgccctggagggagggccagcgtggacaccaaggaggctgagggcgccccccaggtggaagccggcaaaaggctggaggagcttcgtcgtcgtcgcggggagaccgagagcgaagagttcgagaagctcaaacagaagcagcaggaggcggctttggagctggaggaactcaagaaaaagagggaggagagaaggaaggtcctggaggaggaagagcagaggaggaagcaggaggaagccgatcgaaaactcagagaggaggaagagaagaggaggctaaaggaagagattgaaaggcgaagagcagaagctgctgagaaacgccagaagatgccagaagatggcttgtcagatgacaagaaaccattcaagtgtttcactcctaaaggttcatctctcaagatagaagagcgagcagaatttttgaataagtctgtgcagaaaagcagtggtgtcaaatcgacccatcaagcagcaatagtctccaagattgacagcagactggagcagtataccagtgcaattgagggaacaaaaagcgcaaaacctacaaagccggcagcctcggatcttcctgttcctgctgaaggtgtacgcaacatcaagagtatgtgggagaaagggaatgtgttttcatcccccactgcagcaggcacaccaaataaggaaactgctggcttgaaggtaggggtttctagccgcatcaatgaatggctaactaaaaccccagatggaaacaagtcacctgctcccaaaccttctgacttgagaccaggagacgtatccagcaagcggaacctctgggaaaagcaatctgtggataaggtcacttcccccactaaggtttgagacagttccagaaagaacccaagctcaagacgcaggacgagctcagttgtagagggc

SEQ ID NO: 113453 - DNA, 558 bp, Homo sapiens
  Payload ID: 2177
  Gene Symbol: CALD1
  Gene Name: caldesmon 1
  ENST ID: ENST00000454108
  CDS Start-End: 341-558
gaatagagcagtgtgtattcggctgcctgcctgcccgcctgcttgctctctggctgtgctcctgcttaaagaaatcagtccttcctttccgacttagtcctcgggaagaagtttcagactacaaggtatcattggaacatttcaagatcatcaaatcaaattccacagggattggtgaccaaccagaaggctcagacatctgattgctgaccttcctggatcaatcatgaagtcttcacttcctgtgaaaaatgctagtgacttgaatcaataaagacaacatgagtcagccttccaaggtccagacatcatctggtctccctgaacctgaaatcacaccatggatgattttgagcgtcgcagagaacttagaaggcaaaagagggaggagatgcgactcgaagcagaaagaatcgcctaccagaggaatgacgatgatgaagaggaggcagcccgggaacggcgccgccgagcccgacaggaacggctgcggcagaagcaggaggaagaatccttgggacaggtgaccgaccaggtggaggtgaatgcccagaacag

SEQ ID NO: 113454 - DNA, 4173 bp, Homo sapiens
  Payload ID: 2177
  Gene Symbol: CALD1
  Gene Name: caldesmon 1
  ENST ID: ENST00000443197
  CDS Start-End: 164-1774
agaccaacgtgttaacacaaagggagaacacgggagcatcctgcaccgtgcatttcagccacagatcacatggcccctccgcgggcccagcccacgccctgaccgcccggcctggccaggtctccgtatctctctgccccgccgccccttcccaactgcggacatgctgggtggatccggatcgcatggaagacgcagcctggccgcgctctcccaaatcgcctaccagaggaatgacgatgatgaagaggaggcagcccgggaacggcgccgccgagcccgacaggaacggctgcggcagaagcaggaggaagaatccttgggacaggtgaccgaccaggtggaggtgaatgcccagaacagtgtgcctgacgaggaggccaagacaaccaccacaaacactcaagtggaaggggatgatgaggccgcattcctggagcgcctggctcggcgtgaggaaagacgccaaaaacgccttcaggaggctctggagcggcagaaggagttcgacccaacaataacagatgcaagtctgtcgctcccaagcagaagaatgcaaaatgacacagcagaaaatgaaactaccgagaaggaagaaaaaagtgaaagtcgccaagaaagatacgagatagaggaaacagaaacagtcaccaagtcctaccagaagaatgattggagggatgctgaagaaaacaagaaagaagacaaggaaaaggaggaggaggaagaggagaagccaaagcgagggagcattggagaaaatcagatcaaagatgaaaagattaaaaaggacaaagaacccaaagaagaagttaagagcttcatggatcgaaagaagggatttacagaagttaagtcgcagaatggagaattcatgacccacaaacttaaacatactgagaatactttcagccgccctggagggagggccagcgtggacaccaaggaggctgagggcgccccccaggtggaagccggcaaaaggctggaggagcttcgtcgtcgtcgcggggagaccgagagcgaagagttcgagaagctcaaacagaagcagcaggaggcggctttggagctggaggaactcaagaaaaagagggaggagagaaggaaggtcctggaggaggaagagcagaggaggaagcaggaggaagccgatcgaaaactcagagaggaggaagagaagaggaggctaaaggaagagattgaaaggcgaagagcagaagctgctgagaaacgccagaagatgccagaagatggcttgtcagatgacaagaaaccattcaagtgtttcactcctaaaggttcatctctcaagatagaagagcgagcagaatttttgaataagtctgtgcagaaaagcagtggtgtcaaatcgacccatcaagcagcaatagtctccaagattgacagcagactggagcagtataccagtgcaattgagggaacaaaaagcgcaaaacctacaaagccggcagcctcggatcttcctgttcctgctgaaggtgtacgcaacatcaagagtatgtgggagaaagggaatgtgttttcatcccccactgcagcaggcacaccaaataaggaaactgctggcttgaaggtaggggtttctagccgcatcaatgaatggctaactaaaaccccagatggaaacaagtcacctgctcccaaaccttctctgaccttctgttcctcactctttggtctctggttgattggaaacctgcttctcctgccttcatttctccctcttcttccggagtgggtctttctctaaaatgtagtctggtcaggacttgagaccaggagacgtatccagcaagcggaacctctgggaaaagcaatctgtggataaggtcacttcccccactaaggtttgagacagttccagaaagaacccaagctcaagacgcaggacgagctcagttgtagagggctaattcgctctgttttgtatttatgttgatttactaaattgggttcattatcttttatttttcaatatcccagtaaacccatgtatattatcactatatttaataatcacagtctagagatgttcatggtaaaagtactgcctttgcacaggagcctgtttctaaagaaacccatgctgtgaaatagagacttttctactgatcatcataactctgtatctgagcagtgataccaaccacatctgaagtcaacagaagatccaagtttaaaattgcctgcggaatgtgtgcagtatctagaaaaatgaaccgtagtttttgtttttttaaatacagaagtcatgttgtttctgcactttataataaagcatggaagaaattatcttagtaggcaattgtaacactttttgaaagtaacccatttcagatttgaaatactgcaataatggttgtctttaaaaaaaaaaaagaaatgtactgttaaggtattactttttttcatgctgatgattcatatctaaattacattattatgttagctgacagtggtactgattttttaggttggttgttttgtggatttctttagtagtgatagtagcctgaaccacattttagataactcaattatgtatgtatgtgcatacacatatacaaacacactaatggtagaatgcttttttatgtgctagactattatatttagtagtatgtcattgtaactagccaatatcacagcttttgaaaaattaaaaaatcacactatattaatattttatatttgccaacagaaacatggcagataggtatcaatatgttttcaatgcctgatgacctataagaagaaagtattgaaaagaagagagattagaactgttagaaggagttgaaattttctaaaagacatagtatttagtttataattaaatgcattcttgaagtccagtgtgaattttattaatgctatcatctcgaccaagctcaaagcctacttattagaaacaatgaagttcacaataggtcataaggtctcttccttttctaaaattgaaagacaagaaatttagtgccaatattgtacagacagaaattccatgtatgagtctcaacaaagactacctttggctaaatgtctagaagcagagaagtaaagtgagcaaaatccagtgttgaggagtcatgacagtactttgatctttatatactctgaagcatttcttcaaacttttctacttttatttgtcattgatacctgtagtaagttgacaatgtggtgaaatttcaaaattatatgtaacttctactagttttactttctcccccaagtcttttttaactcatgatttttacacacacaatccagaacttattatatagcctctaagtctttattcttcacagtagataatgaaagagtcctccagtgtcttggcaaaatgttctagtatagctggatacatacagtggagttctataaactcatacctcagtggacttaaccaaaattgtgttagtctcaattcctaccacactgagggagcctcccaaataactattttcttatctgcagtattcctccagaagagctaaccagggcagggctggcatgagaagtgacatctgcgttacaaagtctatcttcctcataagtctgtaaagagcaattgaatcttctagctttagcaaacctaagccaaaggaaggaaagccatgaagaatgcagaagtcaaaccctcatgacaaagtaggcacaagtctacaataagctaaatcagaatttacaaatacaagtgtcccaggtagcattgactcccgtcattggagtgaaatggatcaaagtttgaattaaggcctatggtaaggtaacattgctttgttgtacttttgaacaagagctcctcctgatcactattacatatttttctagaaaatctaaagttcagaagagaatgtatcactgctgacttttattccaatatttggatggagtaagttttagggtagaattttgttcagtttggatttaatcttttgaaaagtaaattccttgtttactggtttgactataattctctgttatctttacgaggtaaaactgcaagctgactagcatgttctgtgaatctgccattcctaaaaattttataaacacttgatacttttcactgataatggatcgctccaataaacatatattgtgaaaatgcatccacaataaatggaattccttcctgcaaaa

SEQ ID NO: 113455 - DNA, 1614 bp, Homo sapiens
  Payload ID: 2177
  Gene Symbol: CALD1
  Gene Name: caldesmon 1
  ENST ID: ENST00000436461
  CDS Start-End: 236-1614
aagaattctggattaaactccctcccttgcattgtattcaggggtgccttccttgaagaattgaaagcagaaagatttgggagctgagagttaagctgaacaaaaggtatcattggaacatttcaagatcatcaaatcaaattccacagggattggtgaccaaccagaaggctcagacatctgattgctgacctgtccagacatcatctggtctccctgaacctgaaatcacaccatggatgattttgagcgtcgcagagaacttagaaggcaaaagagggaggagatgcgactcgaagcagaaagaatcgcctaccagaggaatgacgatgatgaagaggaggcagcccgggaacggcgccgccgagcccgacaggaacggctgcggcagaagcaggaggaagaatccttgggacaggtgaccgaccaggtggaggtgaatgcccagaacagtgtgcctgacgaggaggccaagacaaccaccacaaacactcaagtggaaggggatgatgaggccgcattcctggagcgcctggctcggcgtgaggaaagacgccaaaaacgccttcaggaggctctggagcggcagaaggagttcgacccaacaataacagatgcaagtctgtcgctcccaagcagaagaatgcaaaatgacacagcagaaaatgaaactaccgagaaggaagaaaaaagtgaaagtcgccaagaaagatacgagatagaggaaacagaaacagtcaccaagtcctaccagaagaatgattggagggatgctgaagaaaacaagaaagaagacaaggaaaaggaggaggaggaagaggagaagccaaagcgagggagcattggagaaaatcagatcaaagatgaaaagattaaaaaggacaaagaacccaaagaagaagttaagagcttcatggatcgaaagaagggatttacagaagttaagtcgcagaatggagaattcatgacccacaaacttaaacatactgagaatactttcagccgccctggagggagggccagcgtggacaccaaggaggctgagggcgccccccaggtggaagccggcaaaaggctggaggagcttcgtcgtcgtcgcggggagaccgagagcgaagagttcgagaagctcaaacagaagcagcaggaggcggctttggagctggaggaactcaagaaaaagagggaggagagaaggaaggtcctggaggaggaagagcagaggaggaagcaggaggaagccgatcgaaaactcagagaggaggaagagaagaggaggctaaaggaagagattgaaaggcgaagagcagaagctgctgagaaacgccagaagatgccagaagatggcttgtcagatgacaagaaaccattcaagtgtttcactcctaaaggttcatctctcaagatagaagagcgagcagaatttttgaataagtctgtgcagaaaagcagtggtgtcaaatcgacccatcaagcagcaatagtctccaagattgacagcagactggagcagtataccagtgcaattgagggaacaaaaagcgcaaaacctacaaagccggcagcctcggatcttcctgttcctgctgaaggtgtacgcaacatcaagagtat

SEQ ID NO: 113456 - DNA, 458 bp, Homo sapiens
  Payload ID: 2177
  Gene Symbol: CALD1
  Gene Name: caldesmon 1
  ENST ID: ENST00000435928
  CDS Start-End: 241-458
aaccactgacagctctgtaaacaaagcaaggacaaaaagagcccgcttccccctttctggtagtcattttgggtttgggggctgcaggggaattctggaatacttgactccatggcacagaaacgcaggggaaacgggctcctcatttaaagagctggaaggggaaggtctttccggaattaaaaccatcacagaggaggtccagacatcatctggtctccctgaacctgaaatcacaccatggatgattttgagcgtcgcagagaacttagaaggcaaaagagggaggagatgcgactcgaagcagaaagaatcgcctaccagaggaatgacgatgatgaagaggaggcagcccgggaacggcgccgccgagcccgacaggaacggctgcggcagaagcaggaggaagaatccttgggacaggtgaccgaccaggtggaggtgaatgcccagaacag

SEQ ID NO: 113457 - DNA, 2199 bp, Homo sapiens
  Payload ID: 2177
  Gene Symbol: CALD1
  Gene Name: caldesmon 1
  ENST ID: ENST00000495522
  CDS Start-End: 12-1685
caactgcggacatgctgggtggatccggatcgcatggaagacgcagcctggccgcgctctcccaaatcgcctaccagaggaatgacgatgatgaagaggaggcagcccgggaacggcgccgccgagcccgacaggaacggctgcggcagaagcaggaggaagaatccttgggacaggtgaccgaccaggtggaggtgaatgcccagaacagtgtgcctgacgaggaggccaagacaaccaccacaaacactcaagtggaaggggatgatgaggccgcattcctggagcgcctggctcggcgtgaggaaagacgccaaaaacgccttcaggaggctctggagcggcagaaggagttcgacccaacaataacagatgcaagtctgtcgctcccaagcagaagaatgcaaaatgacacagcagaaaatgaaactaccgagaaggaagaaaaaagtgaaagtcgccaagaaagatacgagatagaggaaacagaaacagtcaccaagtcctaccagaagaatgattggagggatgctgaagaaaacaagaaagaagacaaggaaaaggaggaggaggaagaggagaagccaaagcgagggagcattggagaaaatcagggagaagagaagggaactaaagtgcaagctaaaagagaaaagctccaagaagacaagcctaccttcaaaaaagaagagatcaaagatgaaaagattaaaaaggacaaagaacccaaagaagaagttaagagcttcatggatcgaaagaagggatttacagaagttaagtcgcagaatggagaattcatgacccacaaacttaaacatactgagaatactttcagccgccctggagggagggccagcgtggacaccaaggaggctgagggcgccccccaggtggaagccggcaaaaggctggaggagcttcgtcgtcgtcgcggggagaccgagagcgaagagttcgagaagctcaaacagaagcagcaggaggcggctttggagctggaggaactcaagaaaaagagggaggagagaaggaaggtcctggaggaggaagagcagaggaggaagcaggaggaagccgatcgaaaactcagagaggaggaagagaagaggaggctaaaggaagagattgaaaggcgaagagcagaagctgctgagaaacgccagaagatgccagaagatggcttgtcagatgacaagaaaccattcaagtgtttcactcctaaaggttcatctctcaagatagaagagcgagcagaatttttgaataagtctgtgcagaaaagtggtgtcaaatcgacccatcaagcagcaatagtctccaagattgacagcagactggagcagtataccagtgcaattgagggaacaaaaagcgcaaaacctacaaagccggcagcctcggatcttcctgttcctgctgaaggtgtacgcaacatcaagagtatgtgggagaaagggaatgtgttttcatcccccactgcagcaggcacaccaaataaggaaactgctggcttgaaggtaggggtttctagccgcatcaatgaatggctaactaaaaccccagatggaaacaagtcacctgctcccaaaccttctgacttgagaccaggagacgtatccagcaagcggaacctctgggaaaagcaatctgtggataaggtcacttcccccactaaggtttgagacagttccagaaagaacccaagctcaagacgcaggacgagctcagttgtagagggctaattcgctctgttttgtatttatgttgatttactaaattgggttcattatcttttatttttcaatatcccagtaaacccatgtatattatcactatatttaataatcacagtctagagatgttcatggtaaaagtactgcctttgcacaggagcctgtttctaaagaaacccatgctgtgaaatagagacttttctactgatcatcataactctgtatctgagcagtgataccaaccacatctgaagtcaacagaagatccaagtttaaaattgcctgcggaatgtgtgcagtatctagaaaaatgaaccgtagtttttgtttttttaaatacagaagtcatgttgtttctgcactttataataaagcatggaagaaattatcttagtaggcaattgtaacactttttgaaagtaacccatttcagatttgaaatactgcaataatggttgtcttt

SEQ ID NO: 113458 - DNA, 1941 bp, Homo sapiens
  Payload ID: 2178
  Gene Symbol: CCIN
  Gene Name: calicin
  Uniprot ID: Q13939
  ENST ID: ENST00000335119
  CDS Start-End: 110-1876
tctccctggtcaaccgctctgcaaacaaccatcaatctgatcccacaggcctgagaaagtctgctctccagtacctgctgctgatctgtttcagccgacaagaggcaccatgaaattggaattcacggagaaaaactacaatagcttcgtgctgcagaacctgaacagacagaggaaacgcaaagagtactgggacatggccctgagtgtggacaaccacgtcttctttgcacatcgcaatgtgctggctgctgtctccccactggtgaggagcctcatctccagcaatgacatgaagaccgctgatgagcttttcatcaccattgacaccagttacctgagcccggtcacagtggaccagcttctggactacttctatagcggcaaggtggtgatctccgagcaaaatgtggaggagctgcttcgtggggctcagtatttcaacacaccacgccttcgagttcactgtaacgacttccttattaagtccatctgccgtgccaactgcttgcgctacctcttcttggctgagctgtttgagctcaaagaggtatcagacgtagcttactctggcattcgggacaacttccactactgggccagtcctgagggctccatgcacttcatgcgctgtccacctgttatctttggccgcctgctccgtgatgaaaaccttcacgtgctcaatgaagaccaggcgctcagcgcactcatcaattgggtgtacttccggaaggaggatcgggagaagtatttcaagaagttcttcaattacatcaatctcaatgctgtctccaataagacgctggtgtttgccagcaacaagctggtgggcatggagaacacctcatcccatacaaccctgattgagagtgtcctgatggaccgcaagcaggagcggccatgcagcctgctggtctaccagcggaaaggggccctgcttgattccgtggtcatcctcggtggccagaaggcccacggccagttcaatgatggagtgtttgcttatatcatccaggagaacctgtggatgaagctctcagacatgccctatcgggcagcagcacttagtgccacctctgctggtcgctacatctacatctctggtggcaccactgagcagatttcagggctgaagacagcctggcggtatgacatggatgacaactcctggaccaagttgcctgacctgcccatcgggcttgtcttccacaccatggtgacctgtggggggacagtgtactcagtgggcgggagcattgccccaaggcggtatgtctccaacatctatcgctatgatgagcggaaggaagtctggtgcctggcaggaaagatgagcatccccatggatggcaccgccgtgatcactaaaggagacaggcatctgtacattgtcactggacggtgcttggtgaaaggttatatctcccgggtcggggtagtggactgctttgacaccagcactggggacgtggtccagtgtatcaccttccccattgagttcaaccatcggcccctgctctctttccaacaggacaacatcctctgcgtgcacagccaccggcagagtgtggaaatcaatctgcagaaggtgaaggcaagcaagacgaccacctcagtgcctgtcttgcccaacagctgccccttggatgtgtcccatgctatatgctccattggagacagcaaggtgtttgtatgtgggggtgtcaccactgccagcgatgtccagacaaaggactacaccatcaatccaaatgccttcttgctggaccaaaagacaggcaagtggaagaccctggctcctccaccagaggcactggactgtcctgcctgctgtctagccaagctaccttgcaagattcttcaaaggatttaaacattttaagtgggagaataagtaaatgcattattattcacgatttaatgagagaaagagaggaa

SEQ ID NO: 113459 - DNA, 3043 bp, Homo sapiens
  Payload ID: 2179
  Gene Symbol: CLGN
  Gene Name: calmegin
  Uniprot ID: O14967
  ENST ID: ENST00000325617
  CDS Start-End: 442-2274
taatcttgctgcacttattactggacgttgttcataaatatgatttacataaaattcaggacccaatcattgcgcaacaggaggtagcacggtctgcagagagggcgggagctcagaggaggaaaagtcttcggacttgcagggggaattcctcctgggctaacccgggagcggggtccaggccacaaccggccggcggcggcacaggctccatgtgcggctccccctggaggcggttgagcccctcggagcaggagcgcgtagcacacacctcgggccgccaccgcctcccgcccgccaccgcacgcgcacgcgcggttagtagtcgctgctgcgcggccgccggcgggactggtctgaagagacgcggggaccaagtggcaacgacttggacatctgagctgtcactgccgaaaacaggccgcaagagagataatcaatatgcatttccaagccttttggctatgtttgggtcttctgttcatctcaattaatgcagaatttatggatgatgatgttgagacggaagactttgaagaaaattcagaagaaattgatgttaatgaaagtgaactttcctcagagattaaatataagacacctcaacctataggagaagtatattttgcagaaacttttgatagtggaaggttggctggatgggtcttatcaaaagcaaagaaagatgacatggatgaggaaatttcaatatacgatggaagatgggaaattgaagagttgaaagaaaaccaggtacctggtgacagaggactggtattaaaatctagagcaaagcatcatgcaatatctgctgtattagcaaaaccattcatttttgctgataaacccttgatagttcaatatgaagtaaattttcaagatggtattgattgtggaggtgcatacattaaactcctagcagacactgatgatttgattctggaaaacttttatgataaaacatcctatatcattatgtttggaccagataaatgtggagaagattataaacttcattttatcttcagacataaacatcccaaaactggagttttcgaagagaaacatgccaaacctccagatgtagaccttaaaaagttctttacagacaggaagactcatctttatacccttgtgatgaatccagatgacacatttgaggtgttagttgatcaaacagttgtaaacaaaggaagcctcctagaggatgtggttcctcctatcaaacctcccaaagaaattgaagatcccaatgataaaaaacctgaggaatgggatgaaagagcaaaaattcctgatccttctgccgtcaaaccagaagactgggatgaaagtgaacctgcccaaatagaagattcaagtgttgttaaacctgctggctggcttgatgatgaaccaaaatttatccctgatcctaatgctgaaaaacctgatgactggaatgaagacacggatggagaatgggaggcacctcagattcttaatccagcatgtcggattgggtgtggtgagtggaaacctcccatgatagataacccaaaatacaaaggagtatggagacctccactggtcgataatcctaactatcagggaatctggagtcctcgaaaaattcctaatccagattatttcgaagatgatcatccatttcttctgacttctttcagtgctcttggtttagagctttggtctatgacctctgatatctactttgataattttattatctgttcggaaaaggaagtagcagatcactgggctgcagatggttggagatggaaaataatgatagcaaatgctaataagcctggtgtattaaaacagttaatggcagctgctgaagggcacccatggctttggttgatttatcttgtgacagcaggagtgccaatagcattaattacttcattttgttggccaagaaaagtaaagaaaaaacataaagatacagagtataaaaaaaccgacatatgtataccacaaacaaaaggagtactagagcaagaagaaaaggaagagaaagcagccctggaaaaaccaatggacctggaagaggaaaaaaagcaaaatgatggtgaaatgcttgaaaaagaagaggaaagtgaacctgaggaaaagagtgaagaagaaattgaaatcatagaagggcaagaagaaagtaatcaatcaaataagtctgggtcagaggatgagatgaaagaagcagatgagagcacaggatctggagatgggccgataaagtcagtacgcaaaagaagagtacgaaaggactaaactagattgaaatatttttaattcccgagagggatgtttggcattgtaaaaatcagcatgccagacctgaactttaatcagtctgcacatcctgtttctaatatctagcaacattatattctttcagacatttattttagtccttcatttcagaggaaaaagaagcaactttgaagttacctcatctttgaatttagaataaaagtggcacattacatatcggatctaagagattaataccattagaagttacacagttttagttgtttggagatagttttggtttgtacagaacaaaataatatgtagcagcttcattgctattggaaaaatcagttattggaatttccacttaaatggctatacaacaatataactggtagttctataataaaaatgagcatatgttctgttgtgaagagctaaatgcaataaagtttctgtatggttgtttgattctatcaacaattgaaagtgttgtatatgacccacatttacctagtttgtgtcaaattatagttacagtgagttgtttgcttaaattatagattcctttaaggacatgccttgttcataaaatcactggattatattgcagcatattttacatttgaatacaaggataatgggttttatcaaaacaaaatgatgtacagattttttttcaagtttttatagttgctttatgccagagtggtttaccccattcacaaaatttcttatgcatacattgctattgaaaataaaatttaaatattttttcatcctg

SEQ ID NO: 113460 - DNA, 2820 bp, Homo sapiens
  Payload ID: 2179
  Gene Symbol: CLGN
  Gene Name: calmegin
  Uniprot ID: O14967
  ENST ID: ENST00000414773
  CDS Start-End: 219-2051
cgcacgcgcggttagtagtcgctgctgcgcggccgccggcgggactggtctgaagagacgcggggaccaagtggcaacgacttggacatctgagctgtcactgccgaaaacaggccgcaagagagcatctgcccaagcaacaaagaggaggtgtttgcttgggagttaaaagcaaatggcaaccaaagctcaggactgggagagaaaagataatcaatatgcatttccaagccttttggctatgtttgggtcttctgttcatctcaattaatgcagaatttatggatgatgatgttgagacggaagactttgaagaaaattcagaagaaattgatgttaatgaaagtgaactttcctcagagattaaatataagacacctcaacctataggagaagtatattttgcagaaacttttgatagtggaaggttggctggatgggtcttatcaaaagcaaagaaagatgacatggatgaggaaatttcaatatacgatggaagatgggaaattgaagagttgaaagaaaaccaggtacctggtgacagaggactggtattaaaatctagagcaaagcatcatgcaatatctgctgtattagcaaaaccattcatttttgctgataaacccttgatagttcaatatgaagtaaattttcaagatggtattgattgtggaggtgcatacattaaactcctagcagacactgatgatttgattctggaaaacttttatgataaaacatcctatatcattatgtttggaccagataaatgtggagaagattataaacttcattttatcttcagacataaacatcccaaaactggagttttcgaagagaaacatgccaaacctccagatgtagaccttaaaaagttctttacagacaggaagactcatctttatacccttgtgatgaatccagatgacacatttgaggtgttagttgatcaaacagttgtaaacaaaggaagcctcctagaggatgtggttcctcctatcaaacctcccaaagaaattgaagatcccaatgataaaaaacctgaggaatgggatgaaagagcaaaaattcctgatccttctgccgtcaaaccagaagactgggatgaaagtgaacctgcccaaatagaagattcaagtgttgttaaacctgctggctggcttgatgatgaaccaaaatttatccctgatcctaatgctgaaaaacctgatgactggaatgaagacacggatggagaatgggaggcacctcagattcttaatccagcatgtcggattgggtgtggtgagtggaaacctcccatgatagataacccaaaatacaaaggagtatggagacctccactggtcgataatcctaactatcagggaatctggagtcctcgaaaaattcctaatccagattatttcgaagatgatcatccatttcttctgacttctttcagtgctcttggtttagagctttggtctatgacctctgatatctactttgataattttattatctgttcggaaaaggaagtagcagatcactgggctgcagatggttggagatggaaaataatgatagcaaatgctaataagcctggtgtattaaaacagttaatggcagctgctgaagggcacccatggctttggttgatttatcttgtgacagcaggagtgccaatagcattaattacttcattttgttggccaagaaaagtaaagaaaaaacataaagatacagagtataaaaaaaccgacatatgtataccacaaacaaaaggagtactagagcaagaagaaaaggaagagaaagcagccctggaaaaaccaatggacctggaagaggaaaaaaagcaaaatgatggtgaaatgcttgaaaaagaagaggaaagtgaacctgaggaaaagagtgaagaagaaattgaaatcatagaagggcaagaagaaagtaatcaatcaaataagtctgggtcagaggatgagatgaaagaagcagatgagagcacaggatctggagatgggccgataaagtcagtacgcaaaagaagagtacgaaaggactaaactagattgaaatatttttaattcccgagagggatgtttggcattgtaaaaatcagcatgccagacctgaactttaatcagtctgcacatcctgtttctaatatctagcaacattatattctttcagacatttattttagtccttcatttcagaggaaaaagaagcaactttgaagttacctcatctttgaatttagaataaaagtggcacattacatatcggatctaagagattaataccattagaagttacacagttttagttgtttggagatagttttggtttgtacagaacaaaataatatgtagcagcttcattgctattggaaaaatcagttattggaatttccacttaaatggctatacaacaatataactggtagttctataataaaaatgagcatatgttctgttgtgaagagctaaatgcaataaagtttctgtatggttgtttgattctatcaacaattgaaagtgttgtatatgacccacatttacctagtttgtgtcaaattatagttacagtgagttgtttgcttaaattatagattcctttaaggacatgccttgttcataaaatcactggattatattgcagcatattttacatttgaatacaaggataatgggttttatcaaaacaaaatgatgtacagattttttttcaagtttttatagttgctttatgccagagtggtttaccccattcacaaaatttcttatgcatacattgctattgaaaataaaatttaaatattttttcatcctg

SEQ ID NO: 113461 - DNA, 706 bp, Homo sapiens
  Payload ID: 2179
  Gene Symbol: CLGN
  Gene Name: calmegin
  ENST ID: ENST00000509477
  CDS Start-End: 168-706
gaagagacgcggggaccaagtggcaacgacttggacatctgagctgtcactgccgaaaacaggccgcaagagagcatctgcccaagcaacaaagaggaggtgtttgcttgggagttaaaagcaaatggcaaccaaagctcaggactgggagagaaaagataatcaatatgcatttccaagccttttggctatgtttgggtcttctgttcatctcaattaatgcagaatttatggatgatgatgttgagacggaagactttgaagaaaattcagaagaaattgatgttaatgaaagtgaactttcctcagagattaaatataagacacctcaacctataggagaagtatattttgcagaaacttttgatagtggaaggttggctggatgggtcttatcaaaagcaaagaaagatgacatggatgaggaaatttcaatatacgatggaagatgggaaattgaagagttgaaagaaaaccaggtacctggtgacagaggactggtattaaaatctagagcaaagcatcatgcaatatctgctgtattagcaaaaccattcatttttgctgataaacccttgatagttcaatatgaagtaaattttcaagatggtattgattgtggaggtgcatacattaaactcctagcagacactgatgatttgattctggaaaacttttatgataaaacatcctatatcattatgtt

SEQ ID NO: 113462 - DNA, 12747 bp, Homo sapiens
  Payload ID: 2180
  Gene Symbol: CLMN
  Gene Name: calmin (calponin-like, transmembrane)
  Uniprot ID: Q96JQ2
  ENST ID: ENST00000298912
  CDS Start-End: 115-3123
gactccagctccgcggcgccctcgccgggtgcgtgccgctcgcgcgcccgccagccaggctctccgcgcccgccgcccgcgccgcgctggcccgggctctcccgcccgcgcttcatggctgcacacgagtgggactggttccaacgcgaggagctcatcgggcagattagcgacatccgagtgcagaacctgcaagttgagagggaaaatgtgcagaagaggacctttacacgatggataaatctacatctagaaaagtgcaacccacctctagaagttaaagatttattcgtcgatatacaagatggcaaaatcctaatggctttgttagaagtcctgtctgggcggaatctgctgcacgaatacaaatcctcgtcgcatcgtatttttcggttgaacaacatagcgaaagcacttaagtttttggaagatagcaatgtaaaactggttagcattgatgcagcagaaatagcagatggcaacccttctttggttcttgggctgatatggaacataatcctcttcttccagattaaggagctcacaggcaacctcagcagaaactctccatcttccagcttgtcccctggctcagggggcacagactcagactcatccttcccacccacacccactgcagagaggagcgtggcaatatcggtgaaagaccagaggaaggctatcaaggccctgttggcgtgggtgcagaggaaaacgagaaagtatggcgtggcggtgcaggactttgcgggcagttggaggagtgggctggctttcctggcggtgatcaaggccattgaccccagcctggtggacatgaaacaggccctggaaaattccacacgagaaaatctagagaaggctttcagcatcgcacaggatgccctgcacatccccaggctcctggagccagaagacatcatggttgacacaccagacgagcagtctatcatgacttacgtggcacagtttctagaacgttttccggagttggaagccgaagatattttcgattcagataaagaagttcctatcgaatccacttttgttcgcatcaaagaaactccttctgaacaggagagcaaagtcttcgttctgactgaaaatggggagcgtacctacactgttaaccatgaaaccagccacccaccaccctccaaagtctttgtctgtgacaagcccgagagcatgaaggaattccgcctggatggtgtttccagccatgcgctgtcagacagctccaccgagttcatgcaccagattattgaccaggtcctgcaagggggcccaggtaagaccagcgacatcagtgagccatctccagaatcctccattttatcatccagaaaggagaacgggaggtccaactctttgccgatcaagaaaacagttcactttgaggctgacacctacaaggatcctttctgcagtaagaacctgtccctttgctttgaagggagcccaagagtggcaaaggaatcattgaggcaggatggacatgtcttggcagttgaggttgctgaggaaaaggaacagaaacaggaatcctcgaagattccagaatcctcctctgacaaggtcgctggtgacatttttttggtggagggcacaaacaataattctcagtcttcttcctgtaatggtgctttagagagtacagcccgccacgatgaagaaagtcactctctttcacccccaggagaaaatactgtgatggccgattccttccagatcaaggttaacctgatgactgtagaagctttagaggagggagactattttgaagccatcccattaaaagcctcaaaatttaacagcgacctaatagattttgcttctaccagccaggctttcaacaaagttccttcacctcatgagacaaaacctgacgaggatgctgaggcttttgagaatcatgctgaaaaactaggtaaaaggagtattaaatctgctcacaaaaagaaggattcgccagagcctcaagttaagatggacaaacatgaacctcatcaggactccggagaagaagctgaaggctgtccttcagccccagaagagacaccagtggataaaaagccagaggtgcatgaaaaggccaagagaaagtccacccgtcctcattatgaggaagagggagaagacgatgacctccagggtgtgggcgaggaattatcttccagccccccaagcagctgtgtcagcttggagacccttgggagtcacagcgaagaaggcctggatttcaagccctccccacccctctcaaaggtttccgtcattccccacgacctcttctatttcccacactatgaggttcccctggctgcagttttggaggcttatgtagaagacccggaggatctaaaaaatgaagaaatggatctcgaagagccagagggctatatgccagacctggactccagggaggaggaggccgatggctctcagagcagctccagttcctcggtgccaggagagagcctccccagtgccagcgaccaggtgctgtatctcagcaggggtggtgtgggtaccacaccagcctcagaacccgctccactggccccccatgaggaccaccagcaaagggagaccaaagagaatgaccccatggacagccatcagtcccaggaatccccaaacctggaaaacatagcaaaccccctagaagaaaatgtaacgaaagaatcaatcagtagtaaaaaaaaggaaaaaaggaaacatgtggaccacgtagaaagttcactatttgtagcaccaggaagtgttcaatcctcagatgacctagaagaagacagtagcgactacagcattccttccaggactagtcacagtgactccagcatttaccttcgacgacatactcataggtcttcggaatcggatcattttagctatgttcagttgaggaacgcagcagatctggatgacagaagaaaccgaatattaaccaggaaggccaacagctcaggagaagccatgtcactggggagccacagcccgcagagtgactccctgacacagcttgtccagcagccggatatgatgtattttattctcttcctgtggctcctggtgtactgcttgctgctcttcccacaactggatgttagcaggctctgatacgtgtgtctggataataaaaaagacaggaccctgaccaggggcggggttacttcattttattttgggttctgggtggggcacttctacagacagttgaggacctccgaggaaacttagaccccctttctcgctattgtggtttttttttttttttcaggtttccttttttttctggacaacctgagcatgcttttttctttggctgtgtactcaaaactcaggcatgcagctggatccgtaggtggggttttgtccttgtgtgccttgctgggttggatagggagcattgttagtgatcattagcccgcctggatcttagcacaccccacattgcaggttcacacgctggatgaacttgagtttcttacctctcagatgaagggctgcttaatgagaaagagggtgggcaccccaggccaagccccagctggggagagagctgccacgttttcctccaagcgtgggtgtttgagagaaggtgctggggtccatgcacctgtcgcagtccggtaactggttgcattcactaggggaaatccgagcagccagctctgtgtaagcacatccaggaatggcagaatccagggaggaaggtgaaagctgtgttgagagccactgtgtgctctttttcaccctgttttttttgttgtttttttgttttgttttttgtttgaggggagataacacttgaaattcagttttccattgattggattgagatagaaccatgattttcaaaccagatcgccagggcccagcagggccatataaaagccatgaggagtggctgggctggaatcagctcccagcagtgctggagctgggtggtggggtagcttcctgcccactaaagctttggtgcacacctccctcagaatgcatgtcttggaacgggcattctttgtggtcacttgtaatgggtttcttgaagaggctttctggacagcactccgggagcaggccagcacaggaggtttgtgaaagaagagaggcatctctagcacccctgcccccagtcttcctcagccccaggctccctctgctctctcctccctgccaagactcaggtccgtggtgagtctctgcattggttcctcctccccttgctctccccttcagaaagcatgtaccaggcaacccttataaaatcacaaatgagtcaggaggggactcagtgagcatcttgtctagctggacccagagagacagagcagcttgaccaagatcatatagccgaccaggggcagacttgcagtgagcacacaggcacctgatgccctgtccagagctgtcaccccttgtaggaaacttccactgggcacaccaatgtcctgagaaaaagataaaatgactagattaaaatgtccacattcaagcaaaaccaaaaagtttagaccaactatcgacatttgttttgttcttgtatttttcccatgaggaattcttactcaccttcaagctcatccccaattccttctgaaatacccttgacagctgcaacagcttgtcatttgacataccagcgtcgctcttactccaggaatcacgtttctttctttgctagccaaggacttgctcatttcaagcagtgggtttcaagtttacagaattccagcatggccagaagaatttacatagcacatctgagtcgatgacagccaaaatctggcctctaaaccagtctgattatagtctgtctcccctcctgaaagaatttcagccttccaaccagaaagctgctgggagcttggagtgattccatctggaaggccaagagccccatggaaaatgagctaattaatgagctccctggcatcaatgaaagctcaaaggtacagataataaagattatgtgatagtttataactctgggcaccatgcagtccttgcctaaattagatgctcgaagagcctgggaagagccaacccaaatgtgaatcatttcattttatgggtctagaccttgttcagaaaaacctctgcaagatacttctctcacctattacaacttgtaatattgtttaaaacatctactggcaagatgcctgaaagtcatttggttcaggttggcagtcaactgatattttgcaaaggaaaaaaaaatctcatttgagtataggcttctatggaagaagctggatatagaaaatggatgtggaagtctgcaggacaaaccaccccattgcttgtaaattttttttaaattaaaagaaatacaataaggcttttaacaagaactagcagtcccctaagtctcgctgcttagaagtaaccactttcaactctcttatgtttgcatttctacataacgtgcttacactttattttttaatttagaaacatctactggcttgctgtcacagtagaggaggatttcactcttaccataccgtgctttggttttccagtatagctagatcacatcatttagtacatttctattaggtgttgacattacctggagcacttaaggattgttgactcccaagcccagcagtgtgttatggttacatgtcctttctcctccaaatgtccccattaatttgctattctctctctttactttttttttttttttggtgtggcacattctttaataacttcctgaggaagagaacatgggaagtaaatatggttgtaaatattttgagatttttgcatgacttaagatgtctgtattctgcccttaacagaaatgtggctgagcatagaatgacaggtggaaaataataccctcccctagcccctcccaagcgtgctggttgagatttctgatgccattctgattcccgtacctttatatgtgacttaggtttttttatccacccttcctggaaacatttaagatctctttattcttggtgttctgaactgtcatgatggtgttgtatcccgggtgttaaaccttgtgctgggccttcatgggaaatttcttaaattttcttgtgattatttacattctttctttctggaccacctattatttcaatgttggaccctcccctacacccaggctgatgctctaatattttttatcttttctatttttcgtctatgtttctgatctgctttcaggaagaattattcatttttatcttcccaatctgaatgttttattgaatttttattttccaagttaataaaacctttggttattatcctgtctttgttttacagtgtcctgctcttgatgcgtggatgcagattttgtctctctgtggacgttaatgattgtggtctgaggggaagtcttttctgctccctgtgttgccctcattttctctgagttctctttattttggtggtctcagtctctatctttcacgttgtgaatttttctcaaatatatggtgatcctatggatctgttcatgttttaagagtgaggcatccaaaagctgattggaagttgtgtgtgccaactggtgagcttttccactagggtcaccaggtgggcacctggactcatcattggagaacactgcctgtcagtatttgcacgtgttttctctggggctcattctgtttcttgagagatattcccactactctccttcctgggaaacgggcatacacagggcttttagcctatgctgagtactcatgtggtttcaaaaatggtgtcccatctgggcagaagtccccatgagcacttggcttgactggcaaaggacaccttttgccccttcctccagacatacccagctctgagcttggacaatgctcgaggaacaatgaaaaggctagattttaactcctaattgccctctttagccaagtgcctctgtgcaatgcacaactgtaggaccatatccagagaccctggtctatactcagtgtgcccgagtcctgaccgctgagcaggcagcctcatcacccgtgagtatttagactttcattaagttgcttcaacctttgctgtgcctggtgtccctgagttggagctgctctgatttctccatggagtaggagcacagtggtcatctggctgcatgggaaggacaggggacctcagagccaataaatgccctggtcttcagccccatgtctcaccccatccctcctattccaatccccaagcctctcctggaggccacagggcatctctgctgaccactctgtggcctcccctctgcaggcatgtggttttaggatccccctccctgctcacttttccatcagttccattcctgcataaataggttgctagctcttgcttactgttctcttctgtattctgtgttcatggttgtattaatataactttcattcctctgctcctattttcatggggtttcatgagggaagaaacaggctcatgtgttcagtataccatcttgatccataaaccccatttgagttatctcacaggttgcttagggggcttgctgctctgactggtttgtgaacgtgccctgagtccagctgggactgcagcaacatccatcctgttgagctgtggtctgctaagtgattttgtgtaatgctgtgccaagtgcaggagagggatacatagcatggctaagctctgcttgaatgccatgattagttattaccttccttccttccccctggttttgctgcctattgtcagtaaatgatcttagatctcctgcctccccaaagatatagtctatgtggtggtctgggttctaggttttctttaccacccttgcttcacttaagaaacagaaaactggctaggcacagtagtggctcacacctataatcccagccctttgggaggccaaggcaggaggatcgcttgaggccaggaattcaagaccagcctgcacaacatagcaagactccatctctacaaaaagttaaatttaaattagtggtggcatacacttatagtcccagctactcaggaggatgaggcaggagaattgtttgagcccatgactttgaggttactgtgagctatgatcctgctattttactccacctgagtgacagagcgagacgctgtctcaaaaataaagaaacaagtagtccacacaggtgtttgccagcaaacaaacagcgcggattctctgttgaacgtggccaacattgcctcgtcgaagtttgtatcttgccatagttgatgatcaggtggtcggggcttcctggtcagacctgacctttgtggggagatgttctcccaccaaggctcagaagcaggacactcttgctgcccctcgggcagccacccagaacatgggcgtctccatttctgaggttcagcatagttccccccaccctcttcccatgcagtgcatgcctgctctttatcaggatggaacagagggaaggcagaggcactgggggcagcctgtgttgttgatctctgtaagtcacagactgttcgaaaacctcaggaattatgtaagcgttcagtgcctcatttaagagatgaaaaactgaagattagaaagaggaaacgactagtcgccctgctagttgatgacctccagatagccatcttcattcccagttaagtttactacaaaaccacagcctcagctgctgaagctaacctccctacccaccatcgctagggactcagaacaccatggagctcatctctccaacaaaagtcagaattagcaagtacagatgtgtcttacgaaaatgtcagaatccatcatggctgctttggtgaggagctgttctccttccgtggtcatgccattggaaggcagttgtatgacaagaatgctttcacatgagctccgattttcttaactctccagaaggacttcagaagcctctggagttttgagacacggcctctctctcccttctgcttggagacaccttcctgggggtctccactgcattccccgccggtattcctctgtggagccttgcgccctcaggtcccagaaatgggctgtgtgggagcttccagtcagcctggtatctcgggaccttctcagccaggaaatgagactgcacaaagccctgtgaggcccagctgtgttatttctccttccccgacattgcataatcactgctgacacagcatttggggaagatttaacgtcttgggccagcagctgccatctggaaccatcaccacatagcaggttgttctgtcccatccaactgatgagggggctgccctaatgacaaggtccaggacctgggttgggtggtggaaggctgggagctggagtgggcattattgtgcttctgtgctgaaaattgctatggctcttttcccctaacagccagcgtgggagaaccaaacatgagacacaagcatccccttgagctccacagatcttgcgccttgctctcatcaggcatttccttggaaaacagcagtcagcagctcatggaagtgagcccggtgcacagactttgcatggactttgcacaggttccatttccatcgtgtgcagacacctgtatctttgggctccacgtgagcacctgccctcttcactctgattttttttttaagagacagcatcttactctgtcaccgaggctggagtacagtggtgtgatcacagctcactgcagcctgaaactcctgggctcaggcaatcctcctgcctcagcctcccaagtagctggtagtacaggtgcatgccaccacgcccacctaatttttttatcttttatagatacaggtctcactgttgctcaggctggtctcgaactcctggcctcaagtgatcctcctgccttggcctaccaaaatgctgggattataggcatgaaccactgtgcctggccttcactctgatttttcttaagagtcctacaggaccttcaggtcttgtcacttctctaccattgtgtgtgagacagggcatggggtgagcttggtcaggtgtgggtcaaaagcctggagactcagagctgctggttccccaagagcccacaaaagttatcagagtttctgagctgagtgttctgcagttgccagaccccacaatgctgggaatactggcttctttgtgtttagaacttgttctgagaaccttgatgagaacacatcaagcaagcagttcctcccagccagggctggagcaacatgccaaaaaacattcttgtctatgggaaaaagacaaccagtattttgtactgtttgaccaagttgtttttaaatatacacatgcctcaacaatccacggcctcaatcgcactgctaatttgtttaaatccctgacactcagatgtcaagaatagcttcatctagcagtgttctctttaaaggaacccttttttttgttttcattttaatcactgccttcttctctgggaggtattgtgggctagagaaagaagtcaggtttgggagtcagccagatttagattggagtcccagctctgtcaccagatctctgggtgatcttggcaaactaacttctgagcttctgtgcattataggcattcagcacatatttgttggatgaaaaatacttttcttgaaagtttatgaagttgtaggatgcccagcagcccccttttctctatttccttcctcttgaagcaagcgttgactatacctctttccctaacccttagtgtaccatagcttcttccaacctctctccaatccattacttttttctgagctaccctgtctcaaatctaactcaggcctttttgcaagaggaagtttaagccattgtttactcattaactcacttgacccttagaacaatcgtgggaggtgtttatttcggaaaggaagctaaagcacaggacagaaaaataaggtcatagcgtgaactagtaagtagcagaactgggaacataggactgttattttcaaacactctaaacttcactgcagttgcaaatttgcaaccaaaatggccgccttgaaagggtcttttgcagtaaaatctcagtgtccaacatcaaagacagttcttcagggcctccaattaactatacatcctgcccccagctgctcatctctgcacctctaacacgtacttcacagagtaggaaattgggctttctccttcaaaaagaaaagtagagaaggcctgagggcagtgtaattaaaatggagaagtagagaccacgaattacttggatgaattcataactggttggtctctgaggcagggattattatttttcctgtattttaagcttaaaagtagtgatttttgcattgttacaaaaaacaaaatagcaaaatatcatttgatacttgtattctgtttgcaatagctaccacttcctttagccccagcaaaaatcaataggtgtgtattctctacaagcccatgctgtgccagaatgccagtattgctaaatgtcatgcaaggatttagacacttttttaaaggaaactctgggagtgcctgttgtctggagagttgacattgtccaaagcaggccaacactggtatgggtatggagaacccacgtcctagctgtggctcacctgcagatgccttgaatttacctctctgggttggaagtgggaagacttcttttaaaagtcctttctaagtttaaaaatccaaaggttacgaaggtagtttttatttatctcaataagtggcctatttgcttaaagcaagtgtacctctgtatatcagcccaaagcttagggcagtgcttcttggctttagtatctgagaaaggtgcctttgggaagagtttggtcagacagaaggtagtctgaatcttaaaggtttcagatgaatgtttgaagtagaacctgggaaatctgcttcctagggctgttagaaggaaattggtctccttaaattacgtcagcatctgaggcagtttcctaagggaatttcttttaaattcaaaagttcaactgcaggaataaatagctgtacaggactagatcttcccatccctcatcttttccccttccccgagtaacgactcaaaaaggcttctgaaattctactcagaatcggagccgtttgcattccaacaaggatcccttaagccaaatgctggtgtgtttgtgtagaatgtccctggggtaggggcggtagctgtggggagggaatgtggtgcaggggacacctgccctctgcccttgaaattgcaccataagatgctgcctatgtcactcacagtggtgctgatactatccgccaaagacaaattgtgaacacggaaaaatggtcgttccctactgtacatcctcaggacagacttaactaaacttggagacaggagattgttcagaccatattgtagtgggtggtgatcattgttttattttgggggagtctggtctattgagcagattgaatgtttccttattgtgcagggcttaattgactatgtctgaaagtttttactgagagctctaagaaaactattgaggaaaatgaaatgttattttgtagtacaaggattatttttgtctatttaggatatacatagctgtagctttgtaaaaaaaaagatctttataaacaatatatgaatgtgccgtcttatttattgattactgtaaattaagatataaatggctatttgaataatttatacctgtgggaattaactggagtatttgttatttgactgttttctattaaggaatattaggcttggtgctatgatgaatgatcttgtaaaatcatgtgtattcttaagaaaatttttgaatataaatttcttgaactga

SEQ ID NO: 113463 - DNA, 565 bp, Homo sapiens
  Payload ID: 2180
  Gene Symbol: CLMN
  Gene Name: calmin (calponin-like, transmembrane)
  ENST ID: ENST00000553733
  CDS Start-End: 87-380
gtgcgtgccgctcgcgcgcccgccagccaggctctccgcgcccgccgcccgcgccgcgctggcccgggctctcccgcccgcgcttcatggctgcacacgagtgggactggttccaacgcgaggagctcatcgggcagattagcgacatccgagtgcagaacctgcaagttgagagggaaaatgtgcagaagaggacctttacacgatggataaatctacatctagaaaagtgcaacccacctctagaagttaaagatttattcgtcgatatacaagatggcaaaatcctaatggctttgttagaagtcctgtctgggcggaatctgagccctggtcaccagctgctgtgtccttggtgggcctccacggggagtctttgattctggagcccagccaagaacaggcctccacttccccatgagcgtggcctggcacttcacacctggtggagctgacccactggtttgccttgtaatgccatcttcccccaacctggaggagcgtcagtgtgcttcagttcaggctgcacgaatacaaatcctcgtcgcatcgtatttttcggttg

SEQ ID NO: 113464 - DNA, 718 bp, Homo sapiens
  Payload ID: 2180
  Gene Symbol: CLMN
  Gene Name: calmin (calponin-like, transmembrane)
  ENST ID: ENST00000555336
  CDS Start-End: 321-718
cccccttcctctctgtcttgtgtggtctcttgcccttttgccttccactatgggatgatgcaccagcagattccagtgctgtgttcttggactgcccagcctctagaaatccttctgttattgtgtgtcaaaatcacaagctccctgaagactaaggatgtgtctaagataacgtctccactcatagcaggcaatattttgagagggaaaatgtgcagaagaggacctttacacgatggataaatctacatctagaaaagtgcaacccacctctagaagttaaagatttattcgtcgatatacaagatggcaaaatcctaatggctttgttagaagtcctgtctgggcggaatctgctgcacgaatacaaatcctcgtcgcatcgtatttttcggttgaacaacatagcgaaagcacttaagtttttggaagatagcaatgtaaaactggttagcattgatgcagcagaaatagcagatggcaacccttctttggttcttgggctgatatggaacataatcctcttcttccagattaaggagctcacaggcaacctcagcagaaactctccatcttccagcttgtcccctggctcagggggcacagactcagactcatccttcccacccacacccactgcagagaggagcgtggcaatatcggtgaaagaccagaggaaggctatcaaggccctgttggcgtgggtgcagaggaaaac

SEQ ID NO: 113465 - DNA, 452 bp, Homo sapiens
  Payload ID: 2180
  Gene Symbol: CLMN
  Gene Name: calmin (calponin-like, transmembrane)
  ENST ID: ENST00000556441
  CDS Start-End: 216-419
taaaaacgcacccaaaacgcctcacctggaccccgcgcgcacccagaaggatcacgttcagagacagaggtgcaacatgagtcaaggatcattttagctatgttcagttgaggaacgcagcagatctggatgacagaagaaaccgaatattaaccaggtacagtactcagaagcttactgagctgattttacagttttatggcatcagagcagacatgaagagggaaagcaaacatgccaggatgtctatgaaagccaacagctcaggagaagccatgtcactggggagccacagcccgcagagtgactccctgacacagcttgtccagcagccggatatgatgtattttattctcttcctgtggctcctggtgtactgcttgctgctcttcccacaactggatgttagcaggctctgatacgtgtgtctggataataaaaaagacaggacc

SEQ ID NO: 113466 - DNA, 685 bp, Homo sapiens
  Payload ID: 2180
  Gene Symbol: CLMN
  Gene Name: calmin (calponin-like, transmembrane)
  ENST ID: ENST00000555615
  CDS Start-End: 383-685
tgtacacaagcgtggagctctctcttggagagctggctctctccaagagagagctggcctggcctgtgagtttaactctgatctaaaacaaaccaaacgtgttacctcccgattcaaagccaagggccttgggtgccgaaagcaggaggttgccccgggcaatggcctgtattgagttcccaggagtaccttgggcaagggccatgaagtggcacgtgattgctgacccgtaggggacagagacatcgcaatgccatgagttgagagggaaaatgtgcagaagaggacctttacacgatggataaatctacatctagaaaagtgcaacccacctctagaagttaaagatttattcgtcgatatacaagatggcaaaatcctaatggctttgttagaagtcctgtctgggcggaatctgctgcacgaatacaaatcctcgtcgcatcgtatttttcggttgaacaacatagcgaaagcacttaagtttttggaagatagcaatgtaaaactggttagcattgatgcagcagaaatagcagatggcaacccttctttggttcttgggctgatatggaacataatcctcttcttccagattaaggagctcacaggcaacctcagcagaaactctccatcttccagcttgtcccctggctcagggggcacagactcagactcatccttc

SEQ ID NO: 113467 - DNA, 4242 bp, Homo sapiens
  Payload ID: 2181
  Gene Symbol: CALM1
  Gene Name: calmodulin 1 (phosphorylase kinase, delta)
  Uniprot ID: P62158
  ENST ID: ENST00000356978
  CDS Start-End: 249-698
gatacggcgcaccatatatatatcgcggggcgcagactcgcgctccggcagtggtgctgggagtgtcgtggacgccgtgccgttactcgtagtcaggcggcggcgcaggcggcggcggcggcatagcgcacagcgcgccttagcagcagcagcagcagcagcggcatcggaggtacccccgccgtcgcagcccccgcgctggtgcagccaccctcgctccctctgctcttcctcccttcgctcgcaccatggctgatcagctgaccgaagaacagattgctgaattcaaggaagccttctccctatttgataaagatggcgatggcaccatcacaacaaaggaacttggaactgtcatgaggtcactgggtcagaacccaacagaagctgaattgcaggatatgatcaatgaagtggatgctgatggtaatggcaccattgacttccccgaatttttgactatgatggctagaaaaatgaaagatacagatagtgaagaagaaatccgtgaggcattccgagtctttgacaaggatggcaatggttatatcagtgcagcagaactacgtcacgtcatgacaaacttaggagaaaaactaacagatgaagaagtagatgaaatgatcagagaagcagatattgatggagacggacaagtcaactatgaagaattcgtacagatgatgactgcaaaatgaagacctactttcaactcctttttcccccctctagaagaatcaaattgaatcttttacttacctcttgcaaaaaaaagaaaaaagaaaaaagttcatttattcattctgtttctatatagcaaaactgaatgtcaaaagtaccttctgtccacacacacaaaatctgcatgtattggttggtggtcctgtcccctaaagatcaagctacacatcagttttacaatataaatacttgtactaccttaatgataaggactccttaaagttccatttgctaatgattaatacactgtttgggctggccagtttttcatgcatgcagcttgacgattgagcacagtcaggcctttgtattaaaaatgaaaaatgaaaaaacaaattcaaaacctattcaaatgggttctagttcaatttgtttagtataaattgtcatagctggtttactgaaaacaaacacatttaaaattggtttacctcaggatgacgtgcagaaaaatgggtgaaggataaaccgttgagacgtggccccactggtaggatggtcctcttgtacttcgtgtgctccgacccatggtgacgatgacacaccctggtggcatgcccgtgtatgttggtttagcgttgtctgcattgttctagagtgaaacaggtgtcaggctgtcactgttcacacaaatttttaataagaaacatttaccaagggagcatctttggactctctgtttttaaaaccttctgaaccatgacttggagccggcagagtaggctgtggctgtggacttcagcacaaccatcaacattgctgttcaaagaaattacagtttacgtccattccaagttgtaaatgctagtctttttttttttttttccaataaaaagaccattaacttaaagtggtgttaaatgctttgtaaagctgagatctaaatggggacaaggcaggtggaggggaggccagtgtacatgtaaatgcccacagcccagcattgggtttccctcccaaggccccagcaccaacctctgagcccaagaccttgcctgaaaacaagcagataccgattgcttcatcctatttatggacatgtaggtctagttgcattttcactggggggaggggggaaggtgaattatggtaacttttaatgatctattcaggcagtagagctcttaaggaaaaaaaaaaacccactttctctcaagcatgtatttaggggttgttctcaattgtgctgctgattacctgtcttatgtaactacttgagaccatctgcaagagacatgatttagtgtgtctgtaattcaatcttcgctgtgtgtggtagaagcagtagtcacttttgtaagccagtctcttcatgcctaaaagacactaccagtcacctttgattcgcgacttttaatttatgattatacttagcctcctcctcctttttttttttttcccaagttgacttgactttgcttttttccccccaagtagaactaatgctagcttccagcttgaaagtaaaactccagtgtggagtgaattttgtgtctaattataaacctgtaaccaaaactcagacatctggtactggtctttgcattgagattggtccctgtaaaaccccctttaaaagcatattgcatttagtacagagctcttttttgaaatgaaggctggagatgtgcatttttcacggtgttaactggttgtatcttattagcaaggagattggggttttgagtgtttgcgtgggtggtttcaatttgccagggaacagtggcaggctgctagcaaggcagtgagaagctcttggcagccaaatgggtgcattcagggctgatttatagagacccttggcttctccttctcctactccctgtctttctggcattttgtagcttgttagattttctgccagaggggtgggtcagagcagtggaggggagacatcgcccatgtgcttctgctactggtccttgggctgggtggttggtagaggagatgttgacactatgagctaagggttggcttttgtaattacctgaatctgaaaggaatgcctaaggttaccttggggtttctcttctggtgagatagggttcctggtttgagtaagttaatgtcctggatatttcttgtggcagggggtggtcaaagagcctgattgctgacccagtctcaggcctgtggtcgatgacctctcggtagtttcaaagggggctggagggggatatttgacttgttttttcgaaatgtagccttctaaccctcaagtctttagaagctgggtggactcttagtggtcctgcagcgtatcctaaaagactacctttgaaacaggattcttgtatggccaggatcctgtctgggaaccagaaaccctacaccctccccctccagggaatgctgagttccagttttgagcagaggtgaggcagaatccactgtagccttccgccctggtatttggggggatgaccagcccaggcgttgggtgttagtctgcatgagtttgtgagaggaaatagctgggtgtcctggcagtgcccttgaagttggttaggaccttcctgtaaactcttgcccctacttctaactactctataaatatatacatatatttatatataaagtgattagttgaactggcatcctgctttagcctgagacttgccataagaaactgctgagtacttggcaaaccctttcatagttttgttctccatctgtttggggtaggtgttgagcgaggcaaatggatctcgatatttcagatgggcttttgatgcactgttgccaaggaaggctttttctgattttttgacaaatgaatttttgcacactttcattggtgtctttcggcaacttacacacattgaaaatgagctattgtacatatttttatattctctttataaatgcatgtctgattgtacttgtaacaatattgtaatgaacggctgtgcagtaggcccagcgctgctgtgtctcgtcagaggaatagcttaccacgaacccctcagcatactgggaatctcttcctgaacaacgaatgtaaatttggtcaagtctactcttccgttcattcaattattttaagcatttgaattatttattgtatatcctaaatatatttctcctttggcagtgactagatttccactaatgtgtcttaatctatccctccagctggcagttactgtttttttaatcccctgaagttgtcctgtaggagacagaaattctttgctgtctgtatcccttggagtaagaaggtagtggcatgggtggagtgtgtgttctttctccaaatctattatgatgtttattaaacacttctgtagcaaagatggtggtagttcttttgttactgaagttgcccttcaccatggctatttgaaaaggagatgtacttggacgtttctgtaaatcttgagataaactgtttggagatttaaccacctctctgatgggggaccaactctatggaaattgtaaatacgttttatttataaacctggcactgtattcaataaacatttctgcagcctttca

SEQ ID NO: 113468 - DNA, 1104 bp, Homo sapiens
  Payload ID: 2181
  Gene Symbol: CALM1
  Gene Name: calmodulin 1 (phosphorylase kinase, delta)
  ENST ID: ENST00000447653
  CDS Start-End: 297-749
ggcagtggtgctgggagtgtcgtggacgccgtgccgttactcgtagtcaggcggcggcgcaggcggcggcggcggcatagcgcacagcgcgccttagcagcagcagcagcagcagcggcatcggaggtacccccgccgtcgcagcccccgcgctggtgcagccaccctcgctccctctgctcttcctcccttcgctcgcaccatggcatccttctttaaaagagaaatccacgttagctctccttgaggtctcgagttccctcggctggaggcacaggttcagtggagaccaaataatgcaggctgatcagctgaccgaagaacagattgctgaattcaaggaagccttctccctatttgataaagatggcgatggcaccatcacaacaaaggaacttggaactgtcatgaggtcactgggtcagaacccaacagaagctgaattgcaggatatgatcaatgaagtggatgctgatggtaatggcaccattgacttccccgaatttttgactatgatggctagaaaaatgaaagatacagatagtgaagaagaaatccgtgaggcattccgagtctttgacaaggatggcaatggttatatcagtgcagcagaactacgtcacgtcatgacaaacttaggagaaaaactaacagatgaagaagtagatgaaatgatcagagaagcagatattgatggagacggacaagtcaactatgaagaattcgtacagatgatgactgcaaaatgaagacctactttcaactcctttttcccccctctagaagaatcaaattgaatcttttacttacctcttgcaaaaaaaagaaaaaagaaaaaagttcatttattcattctgtttctatatagcaaaactgaatgtcaaaagtaccttctgtccacacacacaaaatctgcatgtattggttggtggtcctgtcccctaaagatcaagctacacatcagttttacaatataaatacttgtactaccttaatgataaggactccttaaagttccatttgctaatgattaatacactgtttgggctggccagtttttcatgcatgcagcttgacgattgagcacagtcaggcctttgtatt

SEQ ID NO: 113469 - DNA, 1064 bp, Homo sapiens
  Payload ID: 2181
  Gene Symbol: CALM1
  Gene Name: calmodulin 1 (phosphorylase kinase, delta)
  ENST ID: ENST00000544280
  CDS Start-End: 333-674
cctcagccctggtgcgcgggggccgggggtggtgaccctcctggccgaggaggggcggcgtccagacgcccgctcgggggccgccttcccccccacgcctgcccccgggcacgcgccctgcccggtccctcgccccgcgccacttccagtccgcagagagatgccctccacgtttctgctttctctgcagcctctagattgccagatgcgactgtgcgcctcgctgggctgatcagctgaccgaagaacagattgctgaattcaaggaagccttctccctatttgataaagatggcgatggcaccatcacaacaaaggaacttggaactgtcatgaggtcactgggtcagaacccaacagaagctgaattgcaggatatgatcaatgaagtggatgctgatggtaatggcaccattgacttccccgaatttttgactatgatggctagaaaaatgaaagatacagatagtgaagaagaaatccgtgaggcattccgagtctttgacaaggatggcaatggttatatcagtgcagcagaactacgtcacgtcatgacaaacttaggagaaaaactaacagatgaagaagtagatgaaatgatcagagaagcagatattgatggagacggacaagtcaactatgaagaattcgtacagatgatgactgcaaaatgaagacctactttcaactcctttttcccccctctagaagaatcaaattgaatcttttacttacctcttgcaaaaaaaagaaaaaagaaaaaagttcatttattcattctgtttctatatagcaaaactgaatgtcaaaagtaccttctgtccacacacacaaaatctgcatgtattggttggtggtcctgtcccctaaagatcaagctacacatcagttttacaatataaatacttgtactaccttaatgataaggactccttaaagttccatttgctaatgattaatacactgtttgggctggccagtttttcatgcatgcagcttgacgattgagcacagtcaggcctttgtattaaaaatgaaaaatgaaaaaacaaattcaaaaccta

SEQ ID NO: 113470 - DNA, 438 bp, Homo sapiens
  Payload ID: 2181
  Gene Symbol: CALM1
  Gene Name: calmodulin 1 (phosphorylase kinase, delta)
  ENST ID: ENST00000553422
  CDS Start-End: 1-231
atgaggtcactgggtcagaacccaacagaagctgaattgcaggatatgatcaatgaagtggatgctgatggtaatggcaccattgacttccccgaatttttgactatgatggctagaaaaatgaaagatacagatagtgaagaagaaatccgtgaggcattccgagtctttgacaagtgcagcagaactacgtcacgtcatgacaaacttaggagaaaaactaacagatgaagaagtagatgaaatgatcagagaagcagatattgatggagacggacaagtcaactatgaagaattcgtacagatgatgactgcaaaatgaagacctactttcaactcctttttcccccctctagaagaatcaaattgaatcttttacttacctcttgcaaaaaaaagaaaaaagaaaaaagttcatttattcattctgtttctata

SEQ ID NO: 113471 - DNA, 877 bp, Homo sapiens
  Payload ID: 2181
  Gene Symbol: CALM1
  Gene Name: calmodulin 1 (phosphorylase kinase, delta)
  ENST ID: ENST00000553542
  CDS Start-End: 205-546
gccgtgccgttactcgtagtcaggcggcggcgcaggcggcggcggcggcatagcgcacagcgcgccttagcagcagcagcagcagcagcggcatcggaggctgatcagctgaccgaagaacagattgctgaattcaaggaagccttctccctatttgataaagatggcgatggcaccatcacaacaaaggaacttggaactgtcatgaggtcactgggtcagaacccaacagaagctgaattgcaggatatgatcaatgaagtggatgctgatggtaatggcaccattgacttccccgaatttttgactatgatggctagaaaaatgaaagatacagatagtgaagaagaaatccgtgaggcattccgagtctttgacaaggatggcaatggttatatcagtgcagcagaactacgtcacgtcatgacaaacttaggagaaaaactaacagatgaagaagtagatgaaatgatcagagaagcagatattgatggagacggacaagtcaactatgaagaattcgtacagatgatgactgcaaaatgaagacctactttcaactcctttttcccccctctagaagaatcaaattgaatcttttacttacctcttgcaaaaaaaagaaaaaagaaaaaagttcatttattcattctgtttctatatagcaaaactgaatgtcaaaagtaccttctgtccacacacacaaaatctgcatgtattggttggtggtcctgtcccctaaagatcaagctacacatcagttttacaatataaatacttgtactaccttaatgataaggactccttaaagttccatttgctaatgattaatacactgtttgggctggccagtttttcatgcatgcagcttgacgat

SEQ ID NO: 113472 - DNA, 557 bp, Homo sapiens
  Payload ID: 2181
  Gene Symbol: CALM1
  Gene Name: calmodulin 1 (phosphorylase kinase, delta)
  ENST ID: ENST00000557020
  CDS Start-End: 263-557
agctgaaggagtgtggccaatctgcctccacctccccgcggaccccctactctcaggacctcctgcagcaccccaaactggaagtggccgctgcagacccaaggacgaggggcacgcgggagccggcagccctagtggagcggttggagatgttgaggctgatcagctgaccgaagaacagattgctgaattcaaggaagccttctccctatttgataaagatggcgatggcaccatcacaacaaaggaacttggaactgtcatgaggtcactgggtcagaacccaacagaagctgaattgcaggatatgatcaatgaagtggatgctgatggtaatggcaccattgacttccccgaatttttgactatgatggctagaaaaatgaaagatacagatagtgaagaagaaatccgtgaggcattccgagtctttgacaaggatggcaatggttatatcagtgcagcagaactacgtcacgtcatgacaaacttaggagaaaaactaacagatgaagaagtagatgaaatgatcagagaagcagatattgatggagacg

SEQ ID NO: 113473 - DNA, 1420 bp, Homo sapiens
  Payload ID: 2181
  Gene Symbol: CALM1
  Gene Name: calmodulin 1 (phosphorylase kinase, delta)
  ENST ID: ENST00000553630
  CDS Start-End: 192-443
tgggagtgtcgtggacgccgtgccgttactcgtagtcaggcggcggcgcaggcggcggcggcggcatagcgcacagcgcgccttagcagcagcagcagcagcagcggcatcggaggtacccccgccgtcgcagcccccgcgctggtgcagccaccctcgctccctctgctcttcctcccttcgctcgcaccatggctgatcagctgaccgaagaacagattgctgaattcaaggaagccttctccctatttgataaagatggcgatggcaccatcacaacaaaggaacttggaactgtcatgaggtcactgggtcagaacccaacagaagctgaattgcaggatatgatcaatgaagtggatgctgatggatggcaatggttatatcagtgcagcagaactacgtcacgtcatgacaaacttaggagaaaaactaacagatgaagaagtagatgaaatgatcagagaagcagatattgatggagacggacaagtcaactatgaagaattcgtacagatgatgactgcaaaatgaagacctactttcaactcctttttcccccctctagaagaatcaaattgaatcttttacttacctcttgcaaaaaaaagaaaaaagaaaaaagttcatttattcattctgtttctatatagcaaaactgaatgtcaaaagtaccttctgtccacacacacaaaatctgcatgtattggttggtggtcctgtcccctaaagatcaagctacacatcagttttacaatataaatacttgtactaccttaatgataaggactccttaaagttccatttgctaatgattaatacactgtttgggctggccagtttttcatgcatgcagcttgacgattgagcacagtcaggcctttgtattaaaaatgaaaaatgaaaaaacaaattcaaaacctattcaaatgggttctagttcaatttgtttagtataaattgtcatagctggtttactgaaaacaaacacatttaaaattggtttacctcaggatgacgtgcagaaaaatgggtgaaggataaaccgttgagacgtggccccactggtaggatggtcctcttgtacttcgtgtgctccgacccatggtgacgatgacacaccctggtggcatgcccgtgtatgttggtttagcgttgtctgcattgttctagagtgaaacaggtgtcaggctgtcactgttcacacaaatttttaataagaaacatttaccaagggagcatctttggactctctgtttttaaaaccttctgaaccatgacttggagccggcagagtaggctgtggctgtggacttcagcacaaccatcaacattgctgttcaaagaaattacagtttacgtccattccaagttgtaaatgctagtctttttttttttttttccaataaaaagaccatta

SEQ ID NO: 113474 - DNA, 1341 bp, Homo sapiens
  Payload ID: 2181
  Gene Symbol: CALM1
  Gene Name: calmodulin 1 (phosphorylase kinase, delta)
  ENST ID: ENST00000626705
  CDS Start-End: 200-451
agtggtgctgggagtgtcgtggacgccgtgccgttactcgtagtcaggcggcggcgcaggcggcggcggcggcatagcgcacagcgcgccttagcagcagcagcagcagcagcggcatcggaggtacccccgccgtcgcagcccccgcgctggtgcagccaccctcgctccctctgctcttcctcccttcgctcgcaccatggctgatcagctgaccgaagaacagattgctgaattcaaggaagccttctccctatttgataaagatggcgatggcaccatcacaacaaaggaacttggaactgtcatgaggtcactgggtcagaacccaacagaagctgaattgcaggatatgatcaatgaagtagatgaaatgatcagagaagcagatattgatggagacggacaagtcaactatgaagaattcgtacagatgatgactgcaaaatgaagacctactttcaactcctttttcccccctctagaagaatcaaattgaatcttttacttacctcttgcaaaaaaaagaaaaaagaaaaaagttcatttattcattctgtttctatatagcaaaactgaatgtcaaaagtaccttctgtccacacacacaaaatctgcatgtattggttggtggtcctgtcccctaaagatcaagctacacatcagttttacaatataaatacttgtactaccttaatgataaggactccttaaagttccatttgctaatgattaatacactgtttgggctggccagtttttcatgcatgcagcttgacgattgagcacagtcaggcctttgtattaaaaatgaaaaatgaaaaaacaaattcaaaacctattcaaatgggttctagttcaatttgtttagtataaattgtcatagctggtttactgaaaacaaacacatttaaaattggtttacctcaggatgacgtgcagaaaaatgggtgaaggataaaccgttgagacgtggccccactggtaggatggtcctcttgtacttcgtgtgctccgacccatggtgacgatgacacaccctggtggcatgcccgtgtatgttggtttagcgttgtctgcattgttctagagtgaaacaggtgtcaggctgtcactgttcacacaaatttttaataagaaacatttaccaagggagcatctttggactctctgtttttaaaaccttctgaaccatgacttggagccggcagagtaggctgtggctgtggacttcagcacaaccatcaacattgctgttcaaagaaattacagtttacgtccattccaagttgtaaatgctagtctttttttttttttttccaataaaaagaccattaactt

SEQ ID NO: 113475 - DNA, 1302 bp, Homo sapiens
  Payload ID: 2182
  Gene Symbol: CALM2
  Gene Name: calmodulin 2 (phosphorylase kinase, delta)
  Uniprot ID: P62158
  ENST ID: ENST00000272298
  CDS Start-End: 159-608
ctcgtttgcgatgttccgttatctggatgcggcggagggatctggcggagggaggtgtttatgaggcgctgggggcggaggaggcgaattagtccgagtggagagagcgagctgagtggttgtgtggtcgcgtctcggaaaccggtagcgcttgcagcatggctgaccaactgactgaagagcagattgcagaattcaaagaagctttttcactatttgacaaagatggtgatggaactataacaacaaaggaattgggaactgtaatgagatctcttgggcagaatcccacagaagcagagttacaggacatgattaatgaagtagatgctgatggtaatggcacaattgacttccctgaatttctgacaatgatggcaagaaaaatgaaagacacagacagtgaagaagaaattagagaagcattccgtgtgtttgataaggatggcaatggctatattagtgctgcagaacttcgccatgtgatgacaaaccttggagagaagttaacagatgaagaagttgatgaaatgatcagggaagcagatattgatggtgatggtcaagtaaactatgaagagtttgtacaaatgatgacagcaaagtgaagaccttgtacagaatgtgttaaatttcttgtacaaaattgtttatttgccttttctttgtttgtaacttatctgtaaaaggtttctccctactgtcaaaaaaatatgcatgtatagtaattaggacttcattcctccatgttttcttcccttatcttactgtcattgtcctaaaaccttattttagaaaattgatcaagtaacatgttgcatgtggcttactctggatatatctaagcccttctgcacatctaaacttagatggagttggtcaaatgagggaacatctgggttatgccttttttaaagtagttttctttaggaactgtcagcatgttgttgttgaagtgtggagttgtaactctgcgtggactatggacagtcaacaatatgtacttaaaagttgcactattgcaaaacgggtgtattatccaggtactcgtacactatttttttgtactgctggtcctgtaccagaaacattttcttttattgttacttgctttttaaactttgtttagccacttaaaatctgcttatggcacaatttgcctcaaaatccattccaagttgtatatttgttttccaataaaaaaattacaatttacccaatggttgctctgcatctgagtcatttaactgttgaagtctaataattttgaaaataaaatatggcattggtttctgcttggta

SEQ ID NO: 113476 - DNA, 770 bp, Homo sapiens
  Payload ID: 2182
  Gene Symbol: CALM2
  Gene Name: calmodulin 2 (phosphorylase kinase, delta)
  ENST ID: ENST00000409563
  CDS Start-End: 143-733
agtccgagtggagagagcgagctgagtggttgtgtggtcgcgtctcggaaaccggtagcgcttgcagcatggctgaccaactgactgaagagcagattgcagacggagcttcactctcttgcccaggctggagtgcagtagcatgatcttggctcactgcaacctttgctgtccaacttcaagcaattctcctggctcagtctcccaagtagctgggattacaggcgtgcaccaccacacccggctagtttttgtatttttaggagagatggggtttcaccatgttggccaggctggtcttgaactgctgacgtcagaattcaaagaagctttttcactatttgacaaagatggtgatggaactataacaacaaaggaattgggaactgtaatgagatctcttgggcagaatcccacagaagcagagttacaggacatgattaatgaagtagatgctgatggtaatggcacaattgacttccctgaatttctgacaatgatggcaagaaaaatgaaagacacagacagtgaagaagaaattagagaagcattccgtgtgtttgataaggatggcaatggctatattagtgctgcagaacttcgccatgtgatgacaaaccttggagagaagttaacagatgaagaagttgatgaaatgatcagggaagcagatattgatggtgatggtcaagtaaactatgaagagtttgtacaaatgatgacagcaaagtgaagaccttgtacagaatgtgttaaatttcttgtacaaa

SEQ ID NO: 113477 - DNA, 1004 bp, Homo sapiens
  Payload ID: 2182
  Gene Symbol: CALM2
  Gene Name: calmodulin 2 (phosphorylase kinase, delta)
  ENST ID: ENST00000432899
  CDS Start-End: 58-255
agagagcgagctgagtggttgtgtggtcgcgtctcggaaaccggtagcgcttgcagcatggctgaccaactgactgaagagcagattgcagaattcaaagaagctttttcactatttgacaaagatggtgatggaactataacaacaaaggaattgggaactgtaatgagatctcttgggcagaatcccacagaagcagagttacaggacatgattaatgaagtagatgctgatggatggcaatggctatattagtgctgcagaacttcgccatgtgatgacaaaccttggagagaagttaacagatgaagaagttgatgaaatgatcagggaagcagatattgatggtgatggtcaagtaaactatgaagagtttgtacaaatgatgacagcaaagtgaagaccttgtacagaatgtgttaaatttcttgtacaaaattgtttatttgccttttctttgtttgtaacttatctgtaaaaggtttctccctactgtcaaaaaaatatgcatgtatagtaattaggacttcattcctccatgttttcttcccttatcttactgtcattgtcctaaaaccttattttagaaaattgatcaagtaacatgttgcatgtggcttactctggatatatctaagcccttctgcacatctaaacttagatggagttggtcaaatgagggaacatctgggttatgccttttttaaagtagttttctttaggaactgtcagcatgttgttgttgaagtgtggagttgtaactctgcgtggactatggacagtcaacaatatgtacttaaaagttgcactattgcaaaacgggtgtattatccaggtactcgtacactatttttttgtactgctggtcctgtaccagaaacattttcttttattgttacttgctttttaaactttgtttagccacttaaaatctgcttatggcacaatttgcctcaaaatccattccaagttgtatatttgttttccaataaaaaaattacaat

SEQ ID NO: 113478 - DNA, 703 bp, Homo sapiens
  Payload ID: 2182
  Gene Symbol: CALM2
  Gene Name: calmodulin 2 (phosphorylase kinase, delta)
  ENST ID: ENST00000456319
  CDS Start-End: 1-564
agtccgagtggagagagcgagctgagtggttgtgtggtcgcgtctcggaaaccggtagcgcttgcagcatggttagctttgtacatagcatctcactttgcacaacaaccctgcaaggctgaccaactgactgaagagcagattgcagaattcaaagaagctttttcactatttgacaaagatggtgatggaactataacaacaaaggaattgggaactgtaatgagatctcttgggcagaatcccacagaagcagagttacaggacatgattaatgaagtagatgctgatggtaatggcacaattgacttccctgaatttctgacaatgatggcaagaaaaatgaaagacacagacagtgaagaagaaattagagaagcattccgtgtgtttgataaggatggcaatggctatattagtgctgcagaacttcgccatgtgatgacaaaccttggagagaagttaacagatgaagaagttgatgaaatgatcagggaagcagatattgatggtgatggtcaagtaaactatgaagagtttgtacaaatgatgacagcaaagtgaagaccttgtacagaatgtgttaaatttcttgtacaaaattgtttatttgccttttctttgtttgtaacttatctgtaaaaggtttctccctactgtcaaaaaaatatgcatgtatagtaattaggacttcattcctcca

SEQ ID NO: 113479 - DNA, 1103 bp, Homo sapiens
  Payload ID: 2182
  Gene Symbol: CALM2
  Gene Name: calmodulin 2 (phosphorylase kinase, delta)
  ENST ID: ENST00000628793
  CDS Start-End: 159-410
ctcgtttgcgatgttccgttatctggatgcggcggagggatctggcggagggaggtgtttatgaggcgctgggggcggaggaggcgaattagtccgagtggagagagcgagctgagtggttgtgtggtcgcgtctcggaaaccggtagcgcttgcagcatggctgaccaactgactgaagagcagattgcagaattcaaagaagctttttcactatttgacaaagatggtgatggaactataacaacaaaggaattgggaactgtaatgagatctcttgggcagaatcccacagaagcagagttacaggacatgattaatgaagttgatgaaatgatcagggaagcagatattgatggtgatggtcaagtaaactatgaagagtttgtacaaatgatgacagcaaagtgaagaccttgtacagaatgtgttaaatttcttgtacaaaattgtttatttgccttttctttgtttgtaacttatctgtaaaaggtttctccctactgtcaaaaaaatatgcatgtatagtaattaggacttcattcctccatgttttcttcccttatcttactgtcattgtcctaaaaccttattttagaaaattgatcaagtaacatgttgcatgtggcttactctggatatatctaagcccttctgcacatctaaacttagatggagttggtcaaatgagggaacatctgggttatgccttttttaaagtagttttctttaggaactgtcagcatgttgttgttgaagtgtggagttgtaactctgcgtggactatggacagtcaacaatatgtacttaaaagttgcactattgcaaaacgggtgtattatccaggtactcgtacactatttttttgtactgctggtcctgtaccagaaacattttcttttattgttacttgctttttaaactttgtttagccacttaaaatctgcttatggcacaatttgcctcaaaatccattccaagttgtatatttgttttccaataaaaaaattacaatttacccaatggttgctctgcatctgagtcatttaactgttgaagtctaataattttgaaaataaaatatggcattggtttctgcttggt

SEQ ID NO: 113480 - DNA, 2289 bp, Homo sapiens
  Payload ID: 2183
  Gene Symbol: CALM3
  Gene Name: calmodulin 3 (phosphorylase kinase, delta)
  Uniprot ID: P62158
  ENST ID: ENST00000291295
  CDS Start-End: 200-649
gtggggcggggccgagcgaggcggggcgcgcgcggcggccgttgagggaccgttggggcgggaggcggcggcggcggcggcgcgcgctgcgggcagtgagtgtggaggcgcggacgcgcggcggagctggaactgctgcagctgctgccgccgccggaggaaccttgatccccgtgctccggacaccccgggcctcgccatggctgaccagctgactgaggagcagattgcagagttcaaggaggccttctccctctttgacaaggatggagatggcactatcaccaccaaggagttggggacagtgatgagatccctgggacagaaccccactgaagcagagctgcaggatatgatcaatgaggtggatgcagatgggaacgggaccattgacttcccggagttcctgaccatgatggccagaaagatgaaggacacagacagtgaggaggagatccgagaggcgttccgtgtctttgacaaggatgggaatggctacatcagcgccgcagagctgcgtcacgtaatgacgaacctgggggagaagctgaccgatgaggaggtggatgagatgatcagggaggctgacatcgatggagatggccaggtcaattatgaagagtttgtacagatgatgactgcaaagtgaaggccccccgggcagctggcgatgcccgttctcttgatctctctcttctcgcgcgcgcactctctcttcaacactcccctgcgtaccccggttctagcaaacaccaattgattgactgagaatctgataaagcaacaaaagatttgtcccaagctgcatgattgctctttctccttcttccctgagtctctctccatgcccctcatctcttccttttgccctcgcctcttccatccatgtcttccaaggcctgatgcattcataagttgaagccctccccagatccccttggggagcctctgccctcctccagcccggatggctctcctccattttggtttgtttcctcttgtttgtcatcttattttgggtgctggggtggctgccagccctgtcccgggacctgctgggagggacaagaggccctcccccaggcagaagagcatgccctttgccgttgcatgcaaccagccctgtgattccacgtgcagatcccagcagcctgttggggcaggggtgccaagagaggcattccagaaggactgagggggcgttgaggaattgtggcgttgactggatgtggcccaggagggggtcgagggggccaactcacagaaggggactgacagtgggcaacactcacatcccactggctgctgttctgaaaccatctgattggctttctgaggtttggctgggtggggactgctcatttggccactctgcaaattggacttgcccgcgttcctgaagcgctctcgagctgttctgtaaatacctggtgctaacatcccatgccgctccctcctcacgatgcacccaccgccctgagggcccgtcctaggaatggatgtggggatggtcgctttgtaatgtgctggttctctttttttttctttcccctctatggcccttaagactttcattttgttcagaaccatgctgggctagctaaagggtggggagagggaagatgggccccaccacgctctcaagagaacgcacctgcaataaaacagtcttgtcggccagctgcccaggggacggcagctacagcagcctctgcgtcctggtccgccagcacctcccgcttctccgtggtgacttggcgccgcttcctcacatctgtgctccgtgccctcttccctgcctcttccctcgcccacctgcctgcccccatactcccccagcggagagcatgatccgtgcccttgcttctgactttcgcctctgggacaagtaagtcaatgtgggcagttcagtcgtctgggttttttccccttttctgttcatttcatctggctccccccaccacctccccaccccaccccccaccccctgcttcccctcactgcccaggtcgatcaagtggcttttcctgggacctgcccagctttgagaatctcttctcatccaccctctggcacccagcctctgagggaaggagggatggggcatagtgggagacccagccaagagctgagggtaagggcaggtaggcgtgaggctgtggacattttcggaatgttttggttttgttttttttaaaccgggcaatattgtgttcagttcaagctgtgaagaaaaatatatatcaatgttttccaataaaatacagtgactacctgatttggctcctc

SEQ ID NO: 113481 - DNA, 702 bp, Homo sapiens
  Payload ID: 2183
  Gene Symbol: CALM3
  Gene Name: calmodulin 3 (phosphorylase kinase, delta)
  ENST ID: ENST00000391918
  CDS Start-End: 209-550
gcggcgagggaaagtagtccggcgacgggagcgagcgcgcgcgcgcccggcggcaaacccaattcctgtgcagggtggggacgagagattcgcgggcccgtaggctgaccagctgactgaggagcagattgcagagttcaaggaggccttctccctctttgacaaggatggagatggcactatcaccaccaaggagttggggacagtgatgagatccctgggacagaaccccactgaagcagagctgcaggatatgatcaatgaggtggatgcagatgggaacgggaccattgacttcccggagttcctgaccatgatggccagaaagatgaaggacacagacagtgaggaggagatccgagaggcgttccgtgtctttgacaaggatgggaatggctacatcagcgccgcagagctgcgtcacgtaatgacgaacctgggggagaagctgaccgatgaggaggtggatgagatgatcagggaggctgacatcgatggagatggccaggtcaattatgaagagtttgtacagatgatgactgcaaagtgaaggccccccgggcagctggcgatgcccgttctcttgatctctctcttctcgcgcgcgcactctctcttcaacactcccctgcgtaccccggttctagcaaacaccaattgattgactgagaatctgataaagcaacaaaagatttgtcccaa

SEQ ID NO: 113482 - DNA, 540 bp, Homo sapiens
  Payload ID: 2183
  Gene Symbol: CALM3
  Gene Name: calmodulin 3 (phosphorylase kinase, delta)
  ENST ID: ENST00000594523
  CDS Start-End: 170-511
aactgctgcagctgctgccgccgccggaggaaccttgatccccgtgctccggacaccccgggcctcgccatggctgaccagctgactgaggagcagattgcaggaggccttctccctctttgacaaggatggagatggcactatcaccaccaaggagttggggacagtgatgagatccctgggacagaaccccactgaagcagagctgcaggatatgatcaatgaggtggatgcagatgggaacgggaccattgacttcccggagttcctgaccatgatggccagaaagatgaaggacacagacagtgaggaggagatccgagaggcgttccgtgtctttgacaaggatgggaatggctacatcagcgccgcagagctgcgtcacgtaatgacgaacctgggggagaagctgaccgatgaggaggtggatgagatgatcagggaggctgacatcgatggagatggccaggtcaattatgaagagtttgtacagatgatgactgcaaagtgaaggccccccgggcagctggcgatgcccgt

SEQ ID NO: 113483 - DNA, 577 bp, Homo sapiens
  Payload ID: 2183
  Gene Symbol: CALM3
  Gene Name: calmodulin 3 (phosphorylase kinase, delta)
  ENST ID: ENST00000597743
  CDS Start-End: 160-411
gttgagggaccgttggggcgggaggcggcggcggcggcggcgcgcgctgcgggcagtgagtgtggaggcgcggacgcgcggcggagctggaactgctgcagctgctgccgccgccggaggaaccttgatccccgtgctccggacaccccgggcctcgccatggctgaccagctgactgaggagcagattgcagagttcaaggaggccttctccctctttgacaaggatggagatggcactatcaccaccaaggagttggggacagtgatgagatccctgggacagaaccccactgaagcagagctgcaggatatgatcaatgaggtggatgagatgatcagggaggctgacatcgatggagatggccaggtcaattatgaagagtttgtacagatgatgactgcaaagtgaaggccccccgggcagctggcgatgcccgttctcttgatctctctcttctcgcgcgcgcactctctcttcaacactcccctgcgtaccccggttctagcaaacaccaattgattgactgagaatctgataaagcaacaaaagatttgtcccaagctgcatgattgct

SEQ ID NO: 113484 - DNA, 561 bp, Homo sapiens
  Payload ID: 2183
  Gene Symbol: CALM3
  Gene Name: calmodulin 3 (phosphorylase kinase, delta)
  ENST ID: ENST00000598871
  CDS Start-End: 183-524
agtgagtgtggaggcgcggacgcgcggcggagctggaactgctgcagctgctgccgccgccggaggaaccttgatccccgtgctccggacaccccgggcctcgccatgagttcaaggaggccttctccctctttgacaaggatggagatggcactatcaccaccaaggagttggggacagtgatgagatccctgggacagaaccccactgaagcagagctgcaggatatgatcaatgaggtggatgcagatgggaacgggaccattgacttcccggagttcctgaccatgatggccagaaagatgaaggacacagacagtgaggaggagatccgagaggcgttccgtgtctttgacaaggatgggaatggctacatcagcgccgcagagctgcgtcacgtaatgacgaacctgggggagaagctgaccgatgaggaggtggatgagatgatcagggaggctgacatcgatggagatggccaggtcaattatgaagagtttgtacagatgatgactgcaaagtgaaggccccccgggcagctggcgatgcccgttctcttga

SEQ ID NO: 113485 - DNA, 1355 bp, Homo sapiens
  Payload ID: 2183
  Gene Symbol: CALM3
  Gene Name: calmodulin 3 (phosphorylase kinase, delta)
  ENST ID: ENST00000599839
  CDS Start-End: 171-512
agcactgcagaggaggaggagggaagaacgcggctgggtggaagacaccggggcagtgggagcaggctgaccagctgactgaggagcagattgcagagttcaaggaggccttctccctctttgacaaggatggagatggcactatcaccaccaaggagttggggacagtgatgagatccctgggacagaaccccactgaagcagagctgcaggatatgatcaatgaggtggatgcagatgggaacgggaccattgacttcccggagttcctgaccatgatggccagaaagatgaaggacacagacagtgaggaggagatccgagaggcgttccgtgtctttgacaaggatgggaatggctacatcagcgccgcagagctgcgtcacgtaatgacgaacctgggggagaagctgaccgatgaggaggtggatgagatgatcagggaggctgacatcgatggagatggccaggtcaattatgaagagtttgtacagatgatgactgcaaagtgaaggccccccgggcagctggcgatgcccgttctcttgatctctctcttctcgcgcgcgcactctctcttcaacactcccctgcgtaccccggttctagcaaacaccaattgattgactgagaatctgataaagcaacaaaagatttgtcccaagctgcatgattgctctttctccttcttccctgagtctctctccatgcccctcatctcttccttttgccctcgcctcttccatccatgtcttccaaggcctgatgcattcataagttgaagccctccccagatccccttggggagcctctgccctcctccagcccggatggctctcctccattttggtttgtttcctcttgtttgtcatcttattttgggtgctggggtggctgccagccctgtcccgggacctgctgggagggacaagaggccctcccccaggcagaagagcatgccctttgccgttgcatgcaaccagccctgtgattccacgtgcagatcccagcagcctgttggggcaggggtgccaagagaggcattccagaaggactgagggggcgttgaggaattgtggcgttgactggatgtggcccaggagggggtcgagggggccaactcacagaaggggactgacagtgggcaacactcacatcccactggctgctgttctgaaaccatctgattggctttctgaggtttggctgggtggggactgctcatttggccactctgcaaattggacttgcccgcgttcctgaagcgctctcgagctgttctgtaaatacctggtgctaacatcccatgccgctccctcctcacgatgcacccaccgccctgagggcccgtccta

SEQ ID NO: 113486 - DNA, 1203 bp, Homo sapiens
  Payload ID: 2183
  Gene Symbol: CALM3
  Gene Name: calmodulin 3 (phosphorylase kinase, delta)
  Uniprot ID: P62158
  ENST ID: ENST00000596362
  CDS Start-End: 137-586
actgcagaggaggaggagggtgaggtgcaagcttatgggaggaagagcctggggtgggtggcagcggagattagaagatactcttgaaggcttccgggacggagaaggatcagggtcgtggaggtggtgaaaagggatggctgaccagctgactgaggagcagattgcagagttcaaggaggccttctccctctttgacaaggatggagatggcactatcaccaccaaggagttggggacagtgatgagatccctgggacagaaccccactgaagcagagctgcaggatatgatcaatgaggtggatgcagatgggaacgggaccattgacttcccggagttcctgaccatgatggccagaaagatgaaggacacagacagtgaggaggagatccgagaggcgttccgtgtctttgacaaggatgggaatggctacatcagcgccgcagagctgcgtcacgtaatgacgaacctgggggagaagctgaccgatgaggaggtggatgagatgatcagggaggctgacatcgatggagatggccaggtcaattatgaagagtttgtacagatgatgactgcaaagtgaaggccccccgggcagctggcgatgcccgttctcttgatctctctcttctcgcgcgcgcactctctcttcaacactcccctgcgtaccccggttctagcaaacaccaattgattgactgagaatctgataaagcaacaaaagatttgtcccaagctgcatgattgctctttctccttcttccctgagtctctctccatgcccctcatctcttccttttgccctcgcctcttccatccatgtcttccaaggcctgatgcattcataagttgaagccctccccagatccccttggggagcctctgccctcctccagcccggatggctctcctccattttggtttgtttcctcttgtttgtcatcttattttgggtgctggggtggctgccagccctgtcccgggacctgctgggagggacaagaggccctcccccaggcagaagagcatgccctttgccgttgcatgcaaccagccctgtgattccacgtgcagatcccagcagcctgttggggcaggggtgccaagagaggcattccagaaggactgagggggcgttgaggaattgtggcgttgactggatgtggcccaggagggggtcgagggggccaactcacagaa

SEQ ID NO: 113487 - DNA, 8444 bp, Homo sapiens
  Payload ID: 2184
  Gene Symbol: CAMTA1
  Gene Name: calmodulin binding transcription activator 1
  Uniprot ID: Q9Y6Y1
  ENST ID: ENST00000303635
  CDS Start-End: 208-5229
gacgctcctcccggagagtagtgagacccctggtgcggggcgattggcggcgggagcgatgagtggcagccgcacggcccaacgggagctgtgcgtgggccgcggggcggggccagggcgggtgcgcggcggcggcggggtggctgggccggcggcggcggcggtacgaggcgcgcgctcggggtcccggtcgcgaggaggaggaggatgtggcgcgcggaggggaaatggctgccgaaaacaagccggaagagcgtttcccaaagtgtattctgcggaactagcacctactgtgttctcaacaccgtgccacctatagaagatgatcatgggaacagcaatagtagtcatgtaaaaatctttttaccgaaaaagctgcttgaatgtctgccgaaatgttcaagtttaccaaaagagaggcaccgctggaacactaatgaggaaattgcagcttatttaataacatttgagaaacacgaagaatggctaaccacctcccctaagacaagaccacagaatggctcaatgatactctacaacaggaagaaagtgaaatacaggaaagatgggtattgctggaaaaagaggaaagatgggaaaacgaccagagaggaccacatgaaactcaaggtccagggagtggagtgcttgtacggctgctatgtccattcctccatcatccccaccttccaccggaggtgctactggctccttcagaaccccgacatcgtcctggtgcactacctgaacgtgccggccatcgaggactgcggcaagccttgcggccccatcctctgctccatcaacaccgacaagaaggagtgggcgaaatggacgaaagaagagctcatcgggcagctgaaacccatgttccatggcatcaagtggacctgcagcaatgggaacagcagctcaggcttctcggtggaacagctggtgcagcagatcctcgacagccaccagaccaagccccagccgcggacccacaactgcctctgcaccggcagcctgggagctggcggcagcgtgcatcacaagtgtaacagcgccaaacaccgcatcatctcgcccaaggtggagccacggacaggggggtacgggagccactcggaggtgcagcacaatgacgtgtcggagggcaagcacgagcacagccacagcaagggctccagccgtgagaagaggaacggcaaggtggccaagcccgtgctcctgcaccagagcagcaccgaggtctcctccaccaaccaggtggaagtccccgacaccacccagagctcccctgtgtccatcagcagcgggctcaacagcgacccggacatggtggacagcccggtggtcacaggtgtgtccggtatggcggtggcctctgtgatggggagcttgtcccagagcgccacggtgttcatgtcagaggtcaccaatgaggccgtgtacaccatgtcccccaccgctggccccaaccaccacctcctctcacctgacgcctctcagggcctcgtcctggccgtgagctctgatggccacaagttcgcctttcccaccacgggcagctcggagagcctgtccatgctgcccaccaacgtgtccgaagagctggtcctctccaccaccctcgacggtggccggaagattccagaaaccaccatgaactttgaccccgactgtttccttaataacccaaagcagggccagacgtacgggggtggaggcctgaaagccgagatggtcagctccaacatccggcactcgccacccggggagcggagcttcagctttaccaccgtcctcaccaaggagatcaagaccgaggacacctccttcgagcagcagatggccaaagaagcgtactcctcctccgcggcggctgtggcagccagctccctcaccctgaccgccggctccagcctcctgccgtcgggcggcggcctgagtcccagcaccaccctggagcagatggacttcagcgccatcgactccaacaaggactacacgtccagcttcagccagacgggccacagcccccacatccaccagaccccctccccgagcttcttcctgcaggacgccagcaaacccctccccgtcgagcagaacacccacagcagcctgagtgactctgggggcaccttcgtgatgcccacggtgaaaacggaggcctcgtcccaaaccagctcctgcagcggtcacgtggagacgcggatcgagtccacttcctccctccacctcatgcagttccaggccaacttccaggccatgacggcagaaggggaggtcaccatggagacctcgcaggcggcggaagggagcgaggtcctgctcaagtctggggagctgcaggcttgcagctctgagcactacctgcagccggagaccaacggggtaatccgaagcgccggcggcgtccccatcctcccgggcaacgtggtgcagggactctaccccgtggcccagcccagcctcggcaacgcctccaacatggagctcagcctggaccactttgacatctccttcagcaaccagttctccgacctgatcaacgacttcatctccgtggaggggggcagcagcaccatctatgggcaccagctggtgtcgggggacagcacggcgctctcacagtcagaggacggggcgcgggcccccttcacccaggcagagatgtgcctcccctgctgtagcccccagcagggtagcctgcagctgagcagctcggagggcggggccagcaccatggcctacatgcacgtcgccgaggtggtctcggccgcctcggcccagggcaccctaggcatgctgcagcagagcggacgggtgttcatggtgaccgactactccccagagtggtcttacccagagggaggagtgaaggtcctcatcacaggcccgtggcaagaagccagcaataactacagctgcctgtttgaccagatctcagtgcctgcatccctgattcagcctggggtgctgcgctgctactgcccagcccatgacactggtcttgtgaccctacaagttgccttcaacaaccagatcatctccaactcggtggtgtttgagtacaaagcccgggctctgcccacgctcccttcctcccagcacgactggctgtcgttggacgataaccagttcaggatgtccatcctggaacgactggagcagatggagaggaggatggccgagatgacggggtcccagcagcacaaacaggcgagcggaggcggcagcagtggaggcggcagcgggagcgggaatggagggagccaggcacagtgtgcttctgggactggggccttggggagctgctttgagagccgtgtggtcgtggtatgcgagaagatgatgagccgagcctgctgggcgaagtccaagcacttgatccactcaaagactttccgcggaatgaccctactccacctggccgctgcccagggctatgccaccctaatccagaccctcatcaaatggcgtacaaagcacgcggatagcattgacctggaactggaagttgaccccttgaatgtggaccacttctcctgtactcctctgatgtgggcgtgtgccctagggcacttggaagctgccgtcgtgctgtacaagtgggaccgtcgggccatctcgattcccgactctctaggaaggctgcctttgggaattgccaggtcacggggtcatgtgaaattagcagagtgtctggagcacctgcagagagatgagcaggctcagctgggacagaaccccagaatccactgtcctgcaagcgaagagcccagcacagagagctggatggcccagtggcacagcgaagccatcagctctccagaaatacccaagggagtcactgttattgcaagcaccaacccagagctgagaagacctcgttctgaaccctctaattactacagcagtgagagccacaaagattatccggctcccaaaaagcataaattgaaccctgagtacttccagacaaggcaggagaagctgcttcccactgcactgagtctggaagagccaaatatcaggaagcaaagccctagttctaagcagtctgtccccgagacactcagccccagtgaaggagtgagggacttcagccgggaactctcccctcccactccagagactgcagcatttcaagcctctggatctcagcctgtaggaaagtggaattccaaagatctttacattggtgtgtctacagtacaggtgactggaaatccgaaggggaccagtgtaggaaaggaggcagcaccttcacaggtgcgtccacgggaaccaatgagtgtcctgatgatggctaacagagaggtggtgaatacagagctggggtcctaccgtgatagtgcagaaaatgaagaatgcggccagcccatggatgacatacaggtgaacatgatgaccttggcagaacacattattgaagccacacctgaccgaatcaagcaggagaattttgtgcccatggagtcctcaggattggaaagaacagaccctgccaccattagcagtacaatgagctggctggccagttatctagcggatgctgactgccttcccagtgctgcccagatccgaagtgcatataacgagcctctaaccccttcttctaataccagcttgagccctgttggctctcccgtcagtgaaatcgctttcgagaaacctaaccttccctccgccgcggattggtcagaattcctgagtgcatctaccagtgagaaggtagagaatgagtttgctcagctcactctgtctgatcatgaacagagagaactctatgaggctgccaggcttgtccagacagctttccggaaatacaagggccgacccttgcgggaacagcaagaagtagctgctgctgttattcagcgttgttacagaaaatataaacagtacgcactttataaaaagatgacacaggctgccatccttatccagagcaaattccgaagttactatgaacaaaaaaaattccagcagagccgacgggctgctgtgctcatccaaaagtactaccgaagttataagaaatgtggcaaaagacggcaggctcgccggacggctgtgattgtacaacagaaactcaggagcagtttgctaaccaaaaagcaggatcaagctgctcgaaaaataatgaggtttcttcgccgctgtcgccacagccccctggtggaccataggctgtacaaaaggagtgaaagaattgaaaaaggccaaggaacttgaagacatacagcagcatcccttagcaatgtgacattgcttttcagactgttttcatttctgtttttagcagagacatgcaacaacaacacacacgcacacacgcacacacacacacgtacacacacatacaaaatccctctgcagttttggggagatcagctgcaggattttaacaggaatgttttggtcattgcatttgcactttcatggacaacttttaatttgatcagcaagacatcttggaactcaatcttctgttggatcacgggaaatcaagacacccaggaggaattgaaagaggcttcctcttctcaggaagaagccatttccttctcatatagggctgtattcaaacatcgtgtggaactgtacaaatatttataccaaaaatatagataagaaaaggtggggctatactagcaacaaaaaaagaatgctgttcctgcacctgccggttatttccaagaagctgaatctttgggactgattctcagtggagggcttagatcatacaaaaatctttattgggtccgtgtgttctcatttccttcactgtttatttttgtttgtttgtttgtttgttttaatctctacagcacatttaatgcaacttttgaaatctgcaggtttttaatgtcttgtggaaatttgcagaggggcaggtgtgtggtaaacgggtaatgcatgggaaataatgagaagcagctcacagagtttaaactattttcttgtccccaccaccttccaagaacctgcgagggtagtaatcatcttgtcccctttttcatgttcagcactttaatttttttgccttactttcatgtgcaatgagaattacttaagaattggtaacgcatgtagccttttttagtaaccttggaagctgtagtaattctaaggaatcatgaaccttgcctggacatttgccacctaaacgatcagtgtggtgctgcgttctggccagtaaattccatgtttttggctatatctcatccaaactgagcagtttctgtgtatatatagaaggtagaaatgaaaagtgagaaaatatttgaaagggattatattaattgctaaatattttattcacaaaggtcaataacatggcaagataaaattatttgtatagttttgtctgaatgagcgagaaaaatgtggatgtactgtttgtatatattgtatatattaaaacagagatatgtgcatgaaatcaagaaaaaagaaatgaacaaaagcaaagcattagtggctatggtctgtaaaatgaaacaaaaaaactttatttcactataagagtactttattttaaatgttctttaggagaacattttgctaaagcatgactaaactgcaaaaaaaaaaaaagagctactgtatttagacttaggaaaaaaggcagagtaacattacttaaaaaaaaaaggatatgtttacatttaattttggctaccaggagtttagtttattttatttaaaatttttttgccaatggtgccaagtaatgtgaatgctaatactgcttaagaaaattaagttacttttgcaaaacagataatcataagatgaatcagtatgtagcttaacaccatccactcactccaacaaagaacacttagaatgataaaaaaaaaaaaaaaaaacctgacaaaagaaatagtatgaaaagtagaaaaatgtcacgtttccatatctcctgctggaaatcagaaaatataataaaattgcacaaaaaaaaaaatgaaaaagatgcagactggtcttttagagacggcatggtatattactatttccacataatgaggagccaaagaaatctgatgtttttaacaattaaactgctaatgttaaattgagagaataaagttcgtatttgctgatgccagtttaaaattcccaggttacgtctgaggatcagttggtgtaaagctgagatgttttttcttggttctggctgccaactgtgagttaaaactcaaggcttgttgtgaagcctaaaaatattcacaaataagcttttaaactggtgtctttggaaggaaggtagatacaaaaagattgtggtaaaaactggggtcagtgctcttggtgccttttctataattgtacttgttttttaattacttcctttcactgccaacctcgaattactgtacagtatatgtctttctgcttgtgatcagctttgacaacagtgacagccccacaactagtagccacctgtacatttgtaaactgacctgactccattttgtttttaaatgtgtgggttatgttgcagctgttgcagtcccccagatacctattattttacacaatttgacctataggaggacactgagtaatttacaaacacaactgcattcataaatgggaatagaacgtgaaagccagctctttcagaatatcctctattaatactgaatttagatatctttattccatttattatggtacaaataactgatgttttaaccagagtaatgacctcagtggatttgctttaaccctcacattttttttttaatgtttcacatgttacattattagctgaatacgttagaaaatgacagatggtagagacttccatagaattaagagggttctcatggaggggataggaagtaggtttaaagcctaccagtgtaacctaccagtacaactgtgaatcctaggcgaggcaaaaatgcacttccactgaaacgaagcatttctgaccgctttttcttggttatgaatcttaatttcgaatataagatgataggtaagcgcagctttcttggataatctgaattcccaagtgccaggagtaggatttcattataaaattaatagctaatcttattctatctcctgaagatttaattgctattgttacccattcgaaatcagctgtactgtgtgaacgaaataaagacaataatacgaacccctctctggctgcacggtcgcttatggcagttccacacagtagttggcgcccaatggggggtccctgagacttgcatgtaaaactagtctagatgtcttctttttttgtaagttttatttttgtaattgtgcatgtaaagcatcattgaatcaatggatctgttgaagaactcagctgctggaaaccatgcaaaatgttttgaattgcccttaaaatatggaaaatgttttctgaatgctttatattctttctgctgtaaattaaaaatgaagaaaatttccccata

SEQ ID NO: 113488 - DNA, 546 bp, Homo sapiens
  Payload ID: 2184
  Gene Symbol: CAMTA1
  Gene Name: calmodulin binding transcription activator 1
  ENST ID: ENST00000467404
  CDS Start-End: 14-292
gaggaggaggaggatgtggcgcgcggaggggaaatggctgccgaaaacaagccggaaggcacaaggaaggacagacccagtctctgtccttatggagctaagggggagacggacattaatcaagatgccatatgaaatttcagctgggactcagtgctgtgaagatgatcatgggaacagcaatagtagtcatgtaaaaatctttttaccgaaaaagctgcttgaatgtctgccgaaatgttcaagtttaccaaaagagaggcaccgctggaacactaatgagagatcatgatgcagccgtccttttggatttctttttaataatgtgtgacccttcacctttgatcccctgacctgcattaccttggtaaccatttcattttttaatttaatttcattttttaattttggtgtacaagctgtaacatttcatctttcaaagtgtaacacgctgatttcctcaaatagagatacccctttgagtgataaatttgcaaaatgctgtcttcattttctgtattaaaattcatttcagttttaaaataa

SEQ ID NO: 113489 - DNA, 567 bp, Homo sapiens
  Payload ID: 2184
  Gene Symbol: CAMTA1
  Gene Name: calmodulin binding transcription activator 1
  Uniprot ID: Q9Y6Y1
  ENST ID: ENST00000473578
  CDS Start-End: 52-294
ggcggcggtacgaggcgcgcgctcggggtcccggtcgcgaggaggaggaggatgtggcgcgcggaggggaaatggctgccgaaaacaagccggaagagcgtttcccaaagtgtattctgcggaactagcacctactgtgttctcaacaccgtgccacctatagaagatgatcatgggaacagcaatagtagtcatgtaaaaatctttttaccgaaaaagctgcttgaatgtctgccgaaatgttcaagtttaccaaaagagaggcaccgctggaacactaatgagagatcatgatgcagccgtccttttggatttctttttaataatgtgtgacccttcacctttgatcccctgacctgcattaccttggtaaccatttcattttttaatttaatttcattttttaattttggtgtacaagctgtaacatttcatctttcaaagtgtaacacgctgatttcctcaaatagagatacccctttgagtgataaatttgcaaaatgctgtcttcattttctgtattaaaattcatttcagttttaaaataaagtgtaatctgtgttttca

SEQ ID NO: 113490 - DNA, 743 bp, Homo sapiens
  Payload ID: 2184
  Gene Symbol: CAMTA1
  Gene Name: calmodulin binding transcription activator 1
  ENST ID: ENST00000482934
  CDS Start-End: 1-119
atagtagtcatgtaaaaatctttttaccgaaaaagctgcttgaatgtctgccgaaatgttcaagtttaccaaaagagaggcaccgctggaacactaatgaggtcttaaaattttggtagcagaaagcaaatgtgcaaagagcaatggaaaacaagtcagaagctgctgtctgattccagaggaactcgtattttatgttaaaaaaaatgctctcaccacacacttgttcatgggcgcagcaaagaagagggatccacagagctggagccatgagggctgacacattggaatgaaagctggcagaattcgtagggagagctttcccatcctgccagccccatgtctggctttaagacagttctattagtgaattaactgttctcaaaaccccaaattaatttgaaccgaatgttactaaaaatgaaatagaataaagtgacctactcttgcctcatccggagttattacgaaggagctccgcagcctgactgagctctggagagcagggctctgtgcacacgcctcctggtccagaggcctccgtgaccatccatgatgccactctgtcccctcagcaagctgcctttttcttcctagcacctgccccagcggtggtatgttttccagtcagttaccacctgtctcatcagaatggaagctccatgagagcagggcctttgtcttgtccccttgtatcttcagtgcataggacagtgctgacacagtgcagagtctaaataaac

SEQ ID NO: 113491 - DNA, 486 bp, Homo sapiens
  Payload ID: 2184
  Gene Symbol: CAMTA1
  Gene Name: calmodulin binding transcription activator 1
  Uniprot ID: Q9Y6Y1
  ENST ID: ENST00000557126
  CDS Start-End: 41-346
gaggcgcgcgctcggggtcccggtcgcgaggaggaggaggatgtggcgcgcggaggggaaatggctgccgaaaacaagccggaagagcgtttcccaaagtgtattctgcggaactagcacctactgtgttctcaacaccgtgccacctatagaagatgatcatgggaacagcaatagtagtcatgtaaaaatctttttaccgaaaaagctgcttgaatgtctgccgaaatgttcaagtttaccaaaagagaggcaccgctggaacactaatgaggctctcaccacacacttgttcatgggcgcagcaaagaagagggatccacagagctggagccatgagggctgacacattggaatgaaagctggcagaattcgtagggagagctttcccatcctgccagccccatgtctggctttaagacagttctattagtgaattaactgttctcaaaaccccaaattaatttgaaccgaatgttactaaaa

SEQ ID NO: 113492 - DNA, 3247 bp, Homo sapiens
  Payload ID: 2184
  Gene Symbol: CAMTA1
  Gene Name: calmodulin binding transcription activator 1
  ENST ID: ENST00000495233
  CDS Start-End: 1-1913
agatgatgagccgagcctgctgggcgaagtccaagcacttgatccactcaaagactttccgcggaatgaccctactccacctggccgctgcccagggctatgccaccctaatccagaccctcatcaaatggcgtacaaagcacgcggatagcattgacctggaactggaagttgaccccttgaatgtggaccacttctcctgtactcctctgatgtgggcgtgtgccctagggcacttggaagctgccgtcgtgctgtacaagtgggaccgtcgggccatctcgattcccgactctctaggaaggctgcctttgggaattgccaggtcacggggtcatgtgaaattagcagagtgtctggagcacctgcagagagatgagcaggctcagctgggacagaaccccagaatccactgtcctgcaagcgaagagcccagcacagagagctggatggcccagtggcacagcgaagccatcagctctccagaaatacccaagggagtcactgttattgcaagcaccaacccagagctgagaagacctcgttctgaaccctctaattactacagcagtgagagccacaaagattatccggctcccaaaaagcataaattgaaccctgagtacttccagacaaggcaggagaagctgcttcccactgcactgagtctggaagagccaaatatcaggaagcaaagccctagttctaagcagtctgtccccgagacactcagccccagtgaaggagtgagggacttcagccgggaactctcccctcccactccagagactgcagcatttcaagcctctggatctcagcctgtaggaaagtggaattccaaagatctttacattggtgtgtctacagtacaggtgactggaaatccgaaggggaccagtgtaggaaaggaggcagcaccttcacaggtgcgtccacgggaaccaatgagtgtcctgatgatggctaacagagaggtggtgaatacagagctggggtcctaccgtgatagtgcagaaaatgaagaatgcggccagcccatggatgacatacaggtgaacatgatgaccttggcagaacacattattgaagccacacctgaccgaatcaagcaggagaattttgtgcccatggagtcctcaggattggaaagaacagaccctgccaccattagcagtacaatgagctggctggccagttatctagcggatgctgactgccttcccagtgctgcccagatccgaagtgcatataacgagcctctaaccccttcttctaataccagcttgagccctgttggctctcccgtcagtgaaatcgctttcgagaaacctaaccttccctccgccgcggattggtcagaattcctgagtgcatctaccagtgagaaggtagagaatgagtttgctcagctcactctgtctgatcatgaacagagagaactctatgaggctgccaggcttgtccagacagctttccggaaatacaagggccgacccttgcgggaacagcaagaagtagctgctgctgttattcagcgttgttacagaaaatataaacagctgacatggatagccttgaagtacgcactttataaaaagatgacacaggctgccatccttatccagagcaaattccgaagttactatgaacaaaaaaaattccagcagagccgacgggctgctgtgctcatccaaaagtactaccgaagttataagaaatgtggcaaaagacggcaggctcgccggacggctgtgattgtacaacagaaactcaggagcagtttgctaaccaaaaagcaggatcaagctgctcgaaaaataatgaggtttcttcgccgctgtcgccacagagtgaaagaattgaaaaaggccaaggaacttgaagacatacagcagcatcccttagcaatgtgacattgcttttcagactgttttcatttctgtttttagcagagacatgcaacaacaacacacacgcacacacgcacacacacacacgtacacacacatacaaaatccctctgcagttttggggagatcagctgcaggattttaacaggaatgttttggtcattgcatttgcactttcatggacaacttttaatttgatcagcaagacatcttggaactcaatcttctgttggatcacgggaaatcaagacacccaggaggaattgaaagaggcttcctcttctcaggaagaagccatttccttctcatatagggctgtattcaaacatcgtgtggaactgtacaaatatttataccaaaaatatagataagaaaaggtggggctatactagcaacaaaaaaagaatgctgttcctgcacctgccggttatttccaagaagctgaatctttgggactgattctcagtggagggcttagatcatacaaaaatctttattgggtccgtgtgttctcatttccttcactgtttatttttgtttgtttgtttgtttgttttaatctctacagcacatttaatgcaacttttgaaatctgcaggtttttaatgtcttgtggaaatttgcagaggggcaggtgtgtggtaaacgggtaatgcatgggaaataatgagaagcagctcacagagtttaaactattttcttgtccccaccaccttccaagaacctgcgagggtagtaatcatcttgtcccctttttcatgttcagcactttaatttttttgccttactttcatgtgcaatgagaattacttaagaattggtaacgcatgtagccttttttagtaaccttggaagctgtagtaattctaaggaatcatgaaccttgcctggacatttgccacctaaacgatcagtgtggtgctgcgttctggccagtaaattccatgtttttggctatatctcatccaaactgagcagtttctgtgtatatatagaaggtagaaatgaaaagtgagaaaatatttgaaagggattatattaattgctaaatattttattcacaaaggtcaataacatggcaagataaaattatttgtatagttttgtctgaatgagcgagaaaaatgtggatgtactgtttgtatatattgtatatattaaaacagagatatgtgcatgaaatcaagaaaaaagaaatgaacaaaagcaaagcattagtggctatggtctgtaaaatgaaacaaaaaaactttatttcactataagagtactttattttaaatgttctttaggagaacattttgctaaagcatgactaaactgcaaaaaaaaaaaaa

SEQ ID NO: 113493 - DNA, 2053 bp, Homo sapiens
  Payload ID: 2184
  Gene Symbol: CAMTA1
  Gene Name: calmodulin binding transcription activator 1
  ENST ID: ENST00000490905
  CDS Start-End: 1-719
agtcctcaggattggaaagaacagaccctgccaccattagcagtacaatgagctggctggccagttatctagcggatgctgactgccttcccagtgctgcccagatccgcttgagccctgttggctctcccgtcagtgaaatcgctttcgagaaacctaaccttccctccgccgcggattggtcagaattcctgagtgcatctaccagtgagaaggtagagaatgagtttgctcagctcactctgtctgatcatgaacagagagaactctatgaggctgccaggcttgtccagacagctttccggaaatacaagggccgacccttgcgggaacagcaagaagtagctgctgctgttattcagcgttgttacagaaaatataaacagtacgcactttataaaaagatgacacaggctgccatccttatccagagcaaattccgaagttactatgaacaaaaaaaattccagcagagccgacgggctgctgtgctcatccaaaagtactaccgaagttataagaaatgtggcaaaagacggcaggctcgccggacggctgtgattgtacaacagaaactcaggagcagtttgctaaccaaaaagcaggatcaagctgctcgaaaaataatgaggtttcttcgccgctgtcgccacagagtgaaagaattgaaaaaggccaaggaacttgaagacatacagcagcatcccttagcaatgtgacattgcttttcagactgttttcatttctgtttttagcagagacatgcaacaacaacacacacgcacacacgcacacacacacacgtacacacacatacaaaatccctctgcagttttggggagatcagctgcaggattttaacaggaatgttttggtcattgcatttgcactttcatggacaacttttaatttgatcagcaagacatcttggaactcaatcttctgttggatcacgggaaatcaagacacccaggaggaattgaaagaggcttcctcttctcaggaagaagccatttccttctcatatagggctgtattcaaacatcgtgtggaactgtacaaatatttataccaaaaatatagataagaaaaggtggggctatactagcaacaaaaaaagaatgctgttcctgcacctgccggttatttccaagaagctgaatctttgggactgattctcagtggagggcttagatcatacaaaaatctttattgggtccgtgtgttctcatttccttcactgtttatttttgtttgtttgtttgtttgttttaatctctacagcacatttaatgcaacttttgaaatctgcaggtttttaatgtcttgtggaaatttgcagaggggcaggtgtgtggtaaacgggtaatgcatgggaaataatgagaagcagctcacagagtttaaactattttcttgtccccaccaccttccaagaacctgcgagggtagtaatcatcttgtcccctttttcatgttcagcactttaatttttttgccttactttcatgtgcaatgagaattacttaagaattggtaacgcatgtagccttttttagtaaccttggaagctgtagtaattctaaggaatcatgaaccttgcctggacatttgccacctaaacgatcagtgtggtgctgcgttctggccagtaaattccatgtttttggctatatctcatccaaactgagcagtttctgtgtatatatagaaggtagaaatgaaaagtgagaaaatatttgaaagggattatattaattgctaaatattttattcacaaaggtcaataacatggcaagataaaattatttgtatagttttgtctgaatgagcgagaaaaatgtggatgtactgtttgtatatattgtatatattaaaacagagatatgtgcatgaaatcaagaaaaaagaaatgaacaaaagcaaagcattagtggctatggtctgtaaaatgaaacaaaaaaactttatttcactataagagtactttattttaaatgttctttaggagaacattttgctaaagcatgactaaactgcaaaaaaaaaaaaa

SEQ ID NO: 113494 - DNA, 431 bp, Homo sapiens
  Payload ID: 2184
  Gene Symbol: CAMTA1
  Gene Name: calmodulin binding transcription activator 1
  ENST ID: ENST00000461311
  CDS Start-End: 1-222
tggctgccgaaaacaagccggaagagcgtttcccaaagtgtattctgcggaactagcacctactgtgttctcaacaccgtgccacctatagaagatgatcatgggaacagcaatagtagtcatgtaaaaatctttttaccgaaaaagctgcttgaatgtctgccgaaatgttcaagtttaccaaaagagaggcaccgctggaacactaatgagagatcatgatgcagccgtccttttggatttctttttaataatgtgtgacccttcacctttgatcccctgacctgcattaccttggctctcaccacacacttgttcatgggcgcagcaaagaagagggatccacagagctggagccatgagggctgacacattggaatgaaagctggcagaattcgtagggagagctttcccatcctgccagccccatg

SEQ ID NO: 113495 - DNA, 714 bp, Homo sapiens
  Payload ID: 2184
  Gene Symbol: CAMTA1
  Gene Name: calmodulin binding transcription activator 1
  ENST ID: ENST00000476864
  CDS Start-End: 1-714
atgagctggctggccagttatctagcggatgctgactgccttcccagtgctgcccagatccgaagtgcatataacgagcctctaaccccttcttctaataccagcttgagccctgttggctctcccgtcagtgaaatcgctttcgagaaacctaaccttccctccgccgcggattggtcagaattcctgagtgcatctaccagtgagaaggtagagaatgagtttgctcagctcactctgtctgatcatgaacagagagaactctatgaggctgccaggcttgtccagacagctttccggaaatacaagggccgacccttgcgggaacagcaagaagtagctgctgctgttattcagcgttgttacagaaaatataaacagtacgcactttataaaaagatgacacaggctgccatccttatccagagcaaattccgaagttactatgaacaaaaaaaattccagcagagccgacgggctgctgtgctcatccaaaagtactaccgaagttataagaaatgtggcaaaagacggcaggctcgccggacggctgtgattgtacaacagaaactcaggagcagtttgctaaccaaaaagcaggatcaagctgctcgaaaaataatgaggtttcttcgccgctgtcgccacagagtgaaagaattgaaaaaggccaaggaacttgaagacatacagcagcatcccttagcaatgtga

SEQ ID NO: 113496 - DNA, 392 bp, Homo sapiens
  Payload ID: 2184
  Gene Symbol: CAMTA1
  Gene Name: calmodulin binding transcription activator 1
  ENST ID: ENST00000486138
  CDS Start-End: 1-133
aggaaggacagacccagtctctgtccttatggagctaagggggagacggacattaatcaagatgccatatgaaatttcagctgggactcagtgctgtgaagagcgtttcccaaagtgtattctgcggaactagcacctactgtgttctcaacaccgtgccacctatagaagatgatcatgggaacagcaatagtagtcatgtaaaaatctttttaccgaaaaagctgcttgaatgtctgccgaaatgttcaagtttaccaaaagagaggcaccgctggaacactaatgagagatcatgatgcagccgtccttttggatttctttttaataatgtgtgacccttcacctttgatcccctgacctgcattaccttggtaaccatttcatttttt

SEQ ID NO: 113497 - DNA, 4491 bp, Homo sapiens
  Payload ID: 2185
  Gene Symbol: CAMTA2
  Gene Name: calmodulin binding transcription activator 2
  Uniprot ID: O94983
  ENST ID: ENST00000348066
  CDS Start-End: 125-3733
ggggggggtcggtgtggggtagaatggccgctgccgccgtcacccgcgggaccccgggagcacagactccccctccccccggcccctcaggccgggggtgaccttgccccctggagccctcaccatgaataccaaggacaccaccgaggttgctgaaaacagccaccacctgaagatctttctccccaagaagctgctggagtgtcttcctcgctgcccgctgctgcctccagagaggctacggtggaatacaaatgaggagattgcatcctacctgatcacctttgagaagcatgatgagtggctgtcttgtgccccaaagacaaggcctcagaatggctccatcatcctctacaatcgcaagaaggtgaaatatcggaaggatggttacctctggaagaagcggaaggatgggaagaccacccgagaggaccacatgaagctgaaggtccagggcatggagtgtctctatggctgctacgttcactcttccatcgtccccacattccatcggcgctgctactggctgctccagaaccctgacatcgtccttgtgcactacctgaacgtcccagccctggaggactgtggaaagggctgcagccccatcttttgttccatcagcagcgaccgtcgagagtggctgaagtggtcccgggaggagttgttgggacagctgaagcccatgtttcatggcatcaagtggagctgcgggaatggaacagaagagttctctgtagaacacctggtgcagcagattttggacacccacccaaccaagcctgctccccgaacccacgcctgtctctgcagtggggggcttggttctgggagccttacccacaaatgcagcagcacgaaacaccgcatcatctctcccaaagtggagccccgagctttaaccctgacctctatcccccacgctcaccccccagagcctcctccactgatagccccacttcccccagagctccccaaggcacacacctccccatcttcttcctcttcttcctcctcatcaggttttgcagagcccctagaaatcagacctagccctcccacttctcgagggggttcttcaagaggaggcactgctatcctcctcctgacaggactggagcagcgggctggaggcttgacgcccaccaggcacttggctccacaggctgatcctaggccttccatgagtttggcagtggttgtaggcactgagccttctgccccaccagctcctcccagtcctgcctttgaccctgatcgttttctcaacagcccccagaggggccagacatatggaggggggcagggagtaagcccagacttccccgaggcagaggccgctcataccccctgttctgccctagagcctgctgctgccctggagccccaggcagctgctcggggtcccccaccacagtcagtagcaggtgggagaagaggaaactgcttcttcatccaagatgatgacagtggggaggagctcaagggtcacggggctgccccacccataccttcaccccctccctcacccccaccctcacctgcccccttggagccgtcaagcagggtaggaagaggagaggccttgtttggaggacctgttggggccagtgaactggagcccttcagtctttcatcattcccagaccttatgggagaactcatcagtgacgaagctccaagcatccctgctccgaccccccagctgtctcctgctcttagcaccatcacagacttctccccagagtggtcctacccagagggtggggtcaaggtgctcatcacaggtccttggaccgaagccgccgagcattactcctgtgtctttgatcacatcgcagtgccagcctcacttgtccagcctggtgtcttacgctgctactgtcccgcccatgaggtagggctggtgtctttgcaggtggcagggcgggaggggcccctttctgcttctgtgctctttgagtatcgagcccgccgattcctgtctctgcctagtactcaacttgactggctgtcactggacgacaaccagttccggatgtccatactagagcgactggagcagatggagaagcggatggcagagatcgcagcagctgggcaggtgccttgccagggtcctgatgctcctccagttcaggatgaaggccaggggcctgggttcgaagcacgggtagtggtcttggtagaaagcatgatcccacgctccacctggaagggtcctgaacgtctggcccatggaagccccttccggggcatgagccttctgcacctggctgctgcccagggctatgcccgcctcatcgagaccctgagccagtggcggagtgtggagactggaagcttggacttagagcaggaggttgacccgctcaacgtggatcatttctcttgcacccctctgatgtgggcttgtgccctgggacacctggaagctgctgtgctccttttccgttggaaccgacaggcactgagcattcccgactctctgggccgtctgccattgtctgtggctcattcccggggtcatgtgcgccttgcccgctgccttgaggaactacagagacaggagccttcggtggagcccccatttgccctatcgccaccctcctccagcccagacactggtctgagcagcgtctcctcgccctcggagctgtcggatggcaccttttccgtcacgtcagcctattctagtgccccagatggcagtcccccccctgcacctctgccagcctctgagatgactatggaggacatggccccaggccagctttcctctggtgtcccagaagcccccctactcctcatggactatgaggctaccaactccaaggggcccctctcctcccttcctgccctcccaccagcttcagatgatggggctgctccagaggacgctgacagcccacaggctgtggatgtgatcccggtggacatgatctcactagccaagcagatcatcgaagccacaccggagcggattaaacgagaggacttcgtggggctgcccgaggctggagcctcaatgcgggagcggacaggggctgtggggctcagtgagaccatgtcctggctggccagctacctggagaatgtggaccatttccccagctcaacccctcccagcgaactgccctttgagcgaggtcgcctggctgtcccttcagcaccctcctgggcagagtttctctctgcatccaccagtggcaagatggaaagtgattttgccctgctgacactatcagatcacgagcagcgggaactgtatgaggctgcccgagtcatccagacggccttccgaaagtacaagggccggcggctgaaggagcagcaggaggtagcagcagctgtaatccagcgctgttaccggaagtacaagcagctgacctggattgcacttaagtttgcactctataagaagatgacccaggcggccatcctgatccagagcaagttccgaagctactatgaacagaagcgatttcagcagagccgccgagcggctgtgctcatccagcagcactaccgctcctaccgccgcaggcccggccctccccaccggacttcggccaccctgcctgcccgcaacaaaggctcctttctcaccaagaagcaggaccaggcagcccggaagatcatgagattcctgcggcgctgccgacacaggatgagggaactgaagcagaaccaggagctggaagggcttccccagccgggactggccacatgacctggccaccgcctttctcaccaccctgggggcgcctcgtgcagtcttaacagggagagggctttctggggcagggggagcccctgtcggcagctttcctgttcacctttgttggagccctctgtaggcctcctccctcctccccacgccttgctcccacacccctctcctcgtccctcctggtcgtgccccgtctcttttggtcctggctccagaaaacccgcgccccacatacctgcatcttccgctgtgacctccggagccctgcctgcccctgctccccagctcctcctgcctgcacccgactcggccccctcctgacttgccttatttatttgttcgacgcgtctctgaatgtatccgcctcggttcccaccactgccttcgctgcgcacgcccctcgtgtttcagggctgaccgtgtccccacccgactccgcatgtttgcgtctgtttcctccctctctggccctgtcttaccccatcacccgactctggccactgacctcagggccgaaggggaggtggtgtacataggaacgcgttgcggagtccgccccgtcccccgaggggaggggtcttgtacatactgtaacatacagagtatagtgaagaatctatttaaggcgccgcggggagggctgcacggccgggcttgtggttctctagcgcggcgggggcctcctgccggctccacgggcactttctacttgtgcatgggcttggtttatacgaattgccattaaacatcgctgcacc

SEQ ID NO: 113498 - DNA, 4777 bp, Homo sapiens
  Payload ID: 2185
  Gene Symbol: CAMTA2
  Gene Name: calmodulin binding transcription activator 2
  Uniprot ID: O94983
  ENST ID: ENST00000361571
  CDS Start-End: 413-4018
ccggcacctgcactgtccctcgcccaccgcgtgcccgcggactctgctcccggcttctccagaacatccctctatgcgggcgggaccctcccacctcggaggttctcctgggaccaccactccgccggggggccgcccagagtgccaagcgtccgatccggcgccgcccaagtgcagcccaaggacccgctcccgctccgcaccctggcaggctgcctagccaggactgcgcacctgcgccctggggcggagtccttaccccaaccccagcttcactgcacatagccgagcccgacgggcctcctcccatctccatcctggacacctggcggagcccgtgctgagagcctccgccagctcccatctgttccccgaggagggcggggggctcaggctggagccagagcggtagatgggcacagactccccctccccccggcccctcaggccgggggtgaccttgccccctggagccctcaccatgaataccaaggacaccaccgaggttgctgaaaacagccaccacctgaagatctttctccccaagaagctgctggagtgtcttcctcgctgcccgctgctgcctccagagaggctacggtggaatacaaatgaggagattgcatcctacctgatcacctttgagaagcatgatgagtggctgtcttgtgccccaaagacaaggcctcagaatggctccatcatcctctacaatcgcaagaaggtgaaatatcggaaggatggttacctctggaagaagcggaaggatgggaagaccacccgagaggaccacatgaagctgaaggtccagggcatggagaaccctgacatcgtccttgtgcactacctgaacgtcccagccctggaggactgtggaaagggctgcagccccatcttttgttccatcagcagcgaccgtcgagagtggctgaagtggtcccgggaggagttgttgggacagctgaagcccatgtttcatggcatcaagtggagctgcgggaatggaacagaagagttctctgtagaacacctggtgcagcagattttggacacccacccaaccaagcctgctccccgaacccacgcctgtctctgcagtggggggcttggttctgggagccttacccacaaatgcagcagcacgaaacaccgcatcatctctcccaaagtggagccccgagctttaaccctgacctctatcccccacgctcaccccccagagcctcctccactgatagccccacttcccccagagctccccaaggcacacacctccccatcttcttcctcttcttcctcctcatcaggttttgcagagcccctagaaatcagacctagccctcccacttctcgagggggttcttcaagaggaggcactgctatcctcctcctgacaggactggagcagcgggctggaggcttgacgcccaccaggcacttggctccacaggctgatcctaggccttccatgagtttggcagtggttgtaggcactgagccttctgccccaccagctcctcccagtcctgcctttgaccctgatcgttttctcaacagcccccagaggggccagacatatggaggggggcagggagtaagcccagacttccccgaggcagaggccgctcataccccctgttctgccctagagcctgctgctgccctggagccccaggcagctgctcggggtcccccaccacagtcagtagcaggtgggagaagaggaaactgcttcttcatccaagatgatgacagtggggaggagctcaagggtcacggggctgccccacccataccttcaccccctccctcacccccaccctcacctgcccccttggagccgtcaagcagggtaggaagaggagaggccttgtttggaggacctgttggggccagtgaactggagcccttcagtctttcatcattcccagaccttatgggagaactcatcagtgacgaagctccaagcatccctgctccgaccccccagctgtctcctgctcttagcaccatcacagacttctccccagagtggtcctacccagagggtggggtcaaggtgctcatcacaggtccttggaccgaagccgccgagcattactcctgtgtctttgatcacatcgcagtgccagcctcacttgtccagcctggtgtcttacgctgctactgtcccgcccatgaggtagggctggtgtctttgcaggtggcagggcgggaggggcccctttctgcttctgtgctctttgagtatcgagcccgccgattcctgtctctgcctagtactcaacttgactggctgtcactggacgacaaccagttccggatgtccatactagagcgactggagcagatggagaagcggatggcagagatcgcagcagctgggcaggtgccttgccagggtcctgatgctcctccagttcaggatgaaggccaggggcctgggttcgaagcacgggtagtggtcttggtagaaagcatgatcccacgctccacctggaagggtcctgaacgtctggcccatggaagccccttccggggcatgagccttctgcacctggctgctgcccagggctatgcccgcctcatcgagaccctgagccagtggcggagtgtggagactggaagcttggacttagagcaggaggttgacccgctcaacgtggatcatttctcttgcacccctctgatgtgggcttgtgccctgggacacctggaagctgctgtgctccttttccgttggaaccgacaggcactgagcattcccgactctctgggccgtctgccattgtctgtggctcattcccggggtcatgtgcgccttgcccgctgccttgaggaactacagagacaggagccttcggtggagcccccatttgccctatcgccaccctcctccagcccagacactggtctgagcagcgtctcctcgccctcggagctgtcggatggcaccttttccgtcacgtcagcctattctagtgccccagatggcagtcccccccctgcacctctgccagcctctgagatgactatggaggacatggccccaggccagctttcctctggtgtcccagaagcccccctactcctcatggactatgaggctaccaactccaaggggcccctctcctcccttcctgccctcccaccagcttcagatgatggggctgctccagaggacgctgacagcccacaggctgtggatgtgatcccggtggacatgatctcactagccaagcagatcatcgaagccacaccggagcggattaaacgagaggacttcgtggggctgcccgaggctggagcctcaatgcgggagcggacaggggctgtggggctcagtgagaccatgtcctggctggccagctacctggagaatgtggaccatttccccagctcaacccctcccagcgaactgccctttgagcgaggtcgcctggctgtcccttcagcaccctcctgggcagagtttctctctgcatccaccagtggcaagatggaaagtgattttgccctgctgacactatcagatcacgagcagcgggaactgtatgaggctgcccgagtcatccagacggccttccgaaagtacaagggccggcggctgaaggagcagcaggaggtagcagcagctgtaatccagcgctgttaccggaagtacaagcagctgacctggattgcacttaagtttgcactctataagaagatgacccaggcggccatcctgatccagagcaagttccgaagctactatgaacagaagcgatttcagcagagccgccgagcggctgtgctcatccagcagcactaccgctcctaccgccgcaggcccggccctccccaccggacttcggccaccctgcctgcccgcaacaaaggctcctttctcaccaagaagcaggaccaggcagcccggaagatcatgagattcctgcggcgctgccgacacaggatgagggaactgaagcagaaccaggagctggaagggcttccccagccgggactggccacatgacctggccaccgcctttctcaccaccctgggggcgcctcgtgcagtcttaacagggagagggctttctggggcagggggagcccctgtcggcagctttcctgttcacctttgttggagccctctgtaggcctcctccctcctccccacgccttgctcccacacccctctcctcgtccctcctggtcgtgccccgtctcttttggtcctggctccagaaaacccgcgccccacatacctgcatcttccgctgtgacctccggagccctgcctgcccctgctccccagctcctcctgcctgcacccgactcggccccctcctgacttgccttatttatttgttcgacgcgtctctgaatgtatccgcctcggttcccaccactgccttcgctgcgcacgcccctcgtgtttcagggctgaccgtgtccccacccgactccgcatgtttgcgtctgtttcctccctctctggccctgtcttaccccatcacccgactctggccactgacctcagggccgaaggggaggtggtgtacataggaacgcgttgcggagtccgccccgtcccccgaggggaggggtcttgtacatactgtaacatacagagtatagtgaagaatctatttaaggcgccgcggggagggctgcacggccgggcttgtggttctctagcgcggcgggggcctcctgccggctccacgggcactttctacttgtgcatgggcttggtttatacgaattgccattaaacatcgctgcacca

SEQ ID NO: 113499 - DNA, 4374 bp, Homo sapiens
  Payload ID: 2185
  Gene Symbol: CAMTA2
  Gene Name: calmodulin binding transcription activator 2
  Uniprot ID: O94983
  ENST ID: ENST00000381311
  CDS Start-End: 22-3615
ggggggtcggtgtggggtagaatggccgctgccgccgtcacccgcgggaccccgggagaaaacagccaccacctgaagatctttctccccaagaagctgctggagtgtcttcctcgctgcccgctgctgcctccagagaggctacggtggaatacaaatgaggagattgcatcctacctgatcacctttgagaagcatgatgagtggctgtcttgtgccccaaagacaaggcctcagaatggctccatcatcctctacaatcgcaagaaggtgaaatatcggaaggatggttacctctggaagaagcggaaggatgggaagaccacccgagaggaccacatgaagctgaaggtccagggcatggagtgtctctatggctgctacgttcactcttccatcgtccccacattccatcggcgctgctactggctgctccagaaccctgacatcgtccttgtgcactacctgaacgtcccagccctggaggactgtggaaagggctgcagccccatcttttgttccatcagcagcgaccgtcgagagtggctgaagtggtcccgggaggagttgttgggacagctgaagcccatgtttcatggcatcaagtggagctgcgggaatggaacagaagagttctctgtagaacacctggtgcagcagattttggacacccacccaaccaagcctgctccccgaacccacgcctgtctctgcagtggggggcttggttctgggagccttacccacaaatgcagcagcacgaaacaccgcatcatctctcccaaagtggagccccgagctttaaccctgacctctatcccccacgctcaccccccagagcctcctccactgatagccccacttcccccagagctccccaaggcacacacctccccatcttcttcctcttcttcctcctcatcaggttttgcagagcccctagaaatcagacctagccctcccacttctcgagggggttcttcaagaggaggcactgctatcctcctcctgacaggactggagcagcgggctggaggcttgacgcccaccaggcacttggctccacaggctgatcctaggccttccatgagtttggcagtggttgtaggcactgagccttctgccccaccagctcctcccagtcctgcctttgaccctgatcgttttctcaacagcccccagaggggccagacatatggaggggggcagggagtaagcccagacttccccgaggcagaggccgctcataccccctgttctgccctagagcctgctgctgccctggagccccaggcagctgctcggggtcccccaccacagtcagtagcaggtgggagaagaggaaactgcttcttcatccaagatgatgacagtggggaggagctcaagggtcacggggctgccccacccataccttcaccccctccctcacccccaccctcacctgcccccttggagccgtcaagcagggtaggaagaggagaggccttgtttggaggacctgttggggccagtgaactggagcccttcagtctttcatcattcccagaccttatgggagaactcatcagtgacgaagctccaagcatccctgctccgaccccccagctgtctcctgctcttagcaccatcacagacttctccccagagtggtcctacccagagggtggggtcaaggtgctcatcacaggtccttggaccgaagccgccgagcattactcctgtgtctttgatcacatcgcagtgccagcctcacttgtccagcctggtgtcttacgctgctactgtcccgcccatgaggtagggctggtgtctttgcaggtggcagggcgggaggggcccctttctgcttctgtgctctttgagtatcgagcccgccgattcctgtctctgcctagtactcaacttgactggctgtcactggacgacaaccagttccggatgtccatactagagcgactggagcagatggagaagcggatggcagagatcgcagcagctgggcaggtgccttgccagggtcctgatgctcctccagttcaggatgaaggccaggggcctgggttcgaagcacgggtagtggtcttggtagaaagcatgatcccacgctccacctggaagggtcctgaacgtctggcccatggaagccccttccggggcatgagccttctgcacctggctgctgcccagggctatgcccgcctcatcgagaccctgagccagtggcggagtgtggagactggaagcttggacttagagcaggaggttgacccgctcaacgtggatcatttctcttgcacccctctgatgtgggcttgtgccctgggacacctggaagctgctgtgctccttttccgttggaaccgacaggcactgagcattcccgactctctgggccgtctgccattgtctgtggctcattcccggggtcatgtgcgccttgcccgctgccttgaggaactacagagacaggagccttcggtggagcccccatttgccctatcgccaccctcctccagcccagacactggtctgagcagcgtctcctcgccctcggagctgtcggatggcaccttttccgtcacgtcagcctattctagtgccccagatggcagtcccccccctgcacctctgccagcctctgagatgactatggaggacatggccccaggccagctttcctctggtgtcccagaagcccccctactcctcatggactatgaggctaccaactccaaggggcccctctcctcccttcctgccctcccaccagcttcagatgatggggctgctccagaggacgctgacagcccacaggctgtggatgtgatcccggtggacatgatctcactagccaagcagatcatcgaagccacaccggagcggattaaacgagaggacttcgtggggctgcccgaggctggagcctcaatgcgggagcggacaggggctgtggggctcagtgagaccatgtcctggctggccagctacctggagaatgtggaccatttccccagctcaacccctcccagcgaactgccctttgagcgaggtcgcctggctgtcccttcagcaccctcctgggcagagtttctctctgcatccaccagtggcaagatggaaagtgattttgccctgctgacactatcagatcacgagcagcgggaactgtatgaggctgcccgagtcatccagacggccttccgaaagtacaagggccggcggctgaaggagcagcaggaggtagcagcagctgtaatccagcgctgttaccggaagtacaagcagtttgcactctataagaagatgacccaggcggccatcctgatccagagcaagttccgaagctactatgaacagaagcgatttcagcagagccgccgagcggctgtgctcatccagcagcactaccgctcctaccgccgcaggcccggccctccccaccggacttcggccaccctgcctgcccgcaacaaaggctcctttctcaccaagaagcaggaccaggcagcccggaagatcatgagattcctgcggcgctgccgacacaggatgagggaactgaagcagaaccaggagctggaagggcttccccagccgggactggccacatgacctggccaccgcctttctcaccaccctgggggcgcctcgtgcagtcttaacagggagagggctttctggggcagggggagcccctgtcggcagctttcctgttcacctttgttggagccctctgtaggcctcctccctcctccccacgccttgctcccacacccctctcctcgtccctcctggtcgtgccccgtctcttttggtcctggctccagaaaacccgcgccccacatacctgcatcttccgctgtgacctccggagccctgcctgcccctgctccccagctcctcctgcctgcacccgactcggccccctcctgacttgccttatttatttgttcgacgcgtctctgaatgtatccgcctcggttcccaccactgccttcgctgcgcacgcccctcgtgtttcagggctgaccgtgtccccacccgactccgcatgtttgcgtctgtttcctccctctctggccctgtcttaccccatcacccgactctggccactgacctcagggccgaaggggaggtggtgtacataggaacgcgttgcggagtccgccccgtcccccgaggggaggggtcttgtacatactgtaacatacagagtatagtgaagaatctatttaaggcgccgcggggagggctgcacggccgggcttgtggttctctagcgcggcgggggcctcctgccggctccacgggcactttctacttgtgcatgggcttggtttatacgaattgccattaaacatcgctgcacca

SEQ ID NO: 113500 - DNA, 4589 bp, Homo sapiens
  Payload ID: 2185
  Gene Symbol: CAMTA2
  Gene Name: calmodulin binding transcription activator 2
  Uniprot ID: O94983
  ENST ID: ENST00000414043
  CDS Start-End: 155-3880
ccccaaccccagcttcactgcacatagccgagcccgacgggcctcctcccatctccatcctggacacctggcggagcccgtgctgagagcctccgccagctcccatctgttccccgaggagggcggggggctcaggctggagccagagcggtagatgggcacagactccccctccccccggcccctcaggccgggggtgaccttgccccctggagccctcaccatgaataccaaggacaccaccgaggttgctgaaaacagccaccacctgaagatctttctccccaagaagctgctggagtgtcttcctcgctgcccgctgctgcctccagagaggctacggtggaatacaaatgaggagattgcatcctacctgatcacctttgagaagcatgatgagtggctgtcttgtgccccaaagacaaggcctcagaatggctccatcatcctctacaatcgcaagaaggtgaaatatcggaaggatggttacctctggaagaagcggaaggatgggaagaccacccgagaggaccacatgaagctgaaggtccagggcatggagtgtctctatggctgctacgttcactcttccatcgtccccacattccatcggcgctgctactggctgctccagaaccctgacatcgtccttgtgcactacctgaacgtcccagccctggaggactgtggaaagggctgcagccccatcttttgttccatcagcagcgaccgtcgagagtggctgaagtggtcccgggaggagttgttgggacagctgaagcccatgtttcatggcatcaagtggagctgcgggaatggaacagaagagttctctgtagaacacctggtgcagcagattttggacacccacccaaccaagcctgctccccgaacccacgcctgtctctgcagtggggggcttggttctgggagccttacccacaaatgcagcagcacgaaacaccgcatcatctctcccaaagtggagccccgagctttaaccctgacctctatcccccacgctcaccccccagagcctcctccactgatagccccacttcccccagagctccccaaggcacacacctccccatcttcttcctcttcttcctcctcatcaggttttgcagagcccctagaaatcagacctagccctcccacttctcgagggggttcttcaagaggaggcactgctatcctcctcctgacaggactggagcagcgggctggaggcttgacgcccaccaggcacttggctccacaggctgatcctaggccttccatgagtttggcagtggttgtaggcactgagccttctgccccaccagctcctcccagtcctgcctttgaccctgatcgttttctcaacagcccccagaggggccagacatatggaggggggcagggagtaagcccagacttccccgaggcagaggccgctcataccccctgttctgccctagagcctgctgctgccctggagccccaggcagctgctcggggtcccccaccacagtcagtagcaggtgggagaagaggaaactgcttcttcatccaagatgatgacagtggggaggagctcaagggtcacggggctgccccacccataccttcaccccctccctcacccccaccctcacctgcccccttggagccgtcaagcagggtaggaagaggagaggccttgtttggaggacctgttggggccagtgaactggagcccttcagtctttcatcattcccagaccttatgggagaactcatcagtgacgaagctccaagcatccctgctccgaccccccagctgtctcctgctcttagcaccatcacagacttctccccagagtggtcctacccagagggtggggtcaaggtgctcatcacaggtccttggaccgaagccgccgagcattactcctgtgtctttgatcacatcgcagtgccagcctcacttgtccagcctggtgtcttacgctgctactgtcccgcccatgaggtagggctggtgtctttgcaggtggcagggcgggaggggcccctttctgcttctgtgctctttgagtatcgagcccgccgattcctgtctctgcctagtactcaacttgactggctgtcactggacgacaaccagttccggatgtccatactagagcgactggagcagatggagaagcggatggcagagatcgcagcagctgggcaggtgccttgccagggtcctgatgctcctccagttcaggatgaaggccaggggcctgggttcgaagcacgggtagtggtcttggtagaaagcatgatcccacgctccacctggaagggtcctgaacgtctggcccatggaagccccttccggggcatgagccttctgcacctggctgctgcccagggctatgcccgcctcatcgagaccctgagccagtggcggagtgtggagactggaagcttggacttagagcaggaggttgacccgctcaacgtggatcatttctcttgcacccctctgatgtgggcttgtgccctgggacacctggaagctgctgtgctccttttccgttggaaccgacaggcactgagcattcccgactctctgggccgtctgccattgtctgtggctcattcccggggtcatgtgcgccttgcccgctgccttgaggaactacagagacaggagccttcggtggagcccccatttgccctatcgccaccctcctccagcccagacactggtctgagcagcgtctcctcgccctcggagctgtcggatggcaccttttccgtcacgtcagcctattctagtgccccagatggcagtcccccccctgcacctctgccagcctctgagatgactatggaggacatggccccaggccagctttcctctggtgtcccagaagcccccctactcctcatggactatgaggctaccaactccaaggggcccctctcctcccttcctgccctcccaccagcttcagatgatggggctgctccagaggacgctgacagcccacaggctgtggatgtgatcccggtggacatgatctcactagccaagcagatcatcgaagccacaccggagcggattaaacgagaggacttcgtggggctgcccgaggctggagcctcaatgcgggagcggacaggggctgtggggctcagtgagaccatgtcctggctggccagctacctggagaatgtggaccatttccccagctcaacccctcccagcgaactgccctttgagcgaggtcgcctggctgtcccttcagcaccctcctgggcagagtttctctctgcatccaccagtggcaagatggaaagtgattttgccctgctgacactatcagatcacgagcagcgggaactgtatgaggctgcccgagtcatccagacggccttccgaaagtacaagggccggcggctgaaggagcagcaggaggtagcagcagctgtaatccagcgctgttaccggaagtacaagcagctgacctggattgcacttaagtttgcactctataagaagatgacccaggcggccatcctgatccagagcaagttccgaagctactatgaacagaagcgatttcagcagagccgccgagcggctgtgctcatccagcagcactaccgctcctaccgccgcaggcccggccctccccaccggacttcggccaccctgcctgcccgcaacaagctcctttctcaccaagaagcaggaccaggcagcccggaagatcatgagattcctgcggcgctgccgacacaggatgagggaactgaagcagaaccaggagctggaagggcttccccagccgggactggccacatgacctggccaccgcctttctcaccaccctgggggcgcctcgtgcagtcttaacagggagagggctttctggggcagggggagcccctgtcggcagctttcctgttcacctttgttggagccctctgtaggcctcctccctcctccccacgccttgctcccacacccctctcctcgtccctcctggtcgtgccccgtctcttttggtcctggctccagaaaacccgcgccccacatacctgcatcttccgctgtgacctccggagccctgcctgcccctgctccccagctcctcctgcctgcacccgactcggccccctcctgacttgccttatttatttgttcgacgcgtctctgaatgtatccgcctcggttcccaccactgccttcgctgcgcacgcccctcgtgtttcagggctgaccgtgtccccacccgactccgcatgtttgcgtctgtttcctccctctctggccctgtcttaccccatcacccgactctggccactgacctcagggccgaaggggaggtggtgtacataggaacgcgttgcggagtccgccccgtcccccgaggggaggggtcttgtacatactgtaacatacagagtatagtgaagaatctatttaaggcgccgcggggagggctgcacggccgggcttgtggttctctagcgcggcgggggcctcctgccggctccacgggcactttctacttgtgcatgggcttggtttatacgaattgccattaaacatcgctgcacca

SEQ ID NO: 113501 - DNA, 4431 bp, Homo sapiens
  Payload ID: 2185
  Gene Symbol: CAMTA2
  Gene Name: calmodulin binding transcription activator 2
  ENST ID: ENST00000574951
  CDS Start-End: 13-498
ggagccctcaccatgaataccaaggacaccaccgaggttgctgaaaacagccaccacctgaagatctttctccccaagaagctgctggagtgtcttcctcgctgcccgctgctgcctccagagaggctacggtggaatacaaatgaggagattgcatcctacctgatcacctttgagaagcatgatgagtggctgtcttgtgccccaaagacaaggcctcagaatggctccatcatcctctacaatcgcaagaaggtgaaatatcggaaggatggttacctctggaagaagcggaaggatgggaagaccacccgagaggaccacatgaagctgaaggtccagggcatggagggactgaacagaggaagagttggggagcagactagccctccccccaccccagcctgtctcctggcagtgtctctatggctgctacgttcactcttccatcgtccccacattccatcggcgctgctactggctgctccagaaccctgacatcgtccttgtgcactacctgaacgtcccagccctggaggactgtggaaagggctgcagccccatcttttgttccatcagcagcgaccgtcgagagtggctgaagtggtcccgggaggagttgttgggacagctgaagcccatgtttcatggcatcaagtggagctgcgggaatggaacagaagagttctctgtagaacacctggtgcagcagattttggacacccacccaaccaagcctgctccccgaacccacgcctgtctctgcagtggggggcttggttctgggagccttacccacaaatgcagcagcacgaaacaccgcatcatctctcccaaagtggagccccgagctttaaccctgacctctatcccccacgctcaccccccagagcctcctccactgatagccccacttcccccagagctccccaaggcacacacctccccatcttcttcctcttcttcctcctcatcaggttttgcagagcccctagaaatcagacctagccctcccacttctcgagggggttcttcaagaggaggcactgctatcctcctcctgacaggactggagcagcgggctggaggcttgacgcccaccaggcacttggctccacaggctgatcctaggccttccatgagtttggcagtggttgtaggcactgagccttctgccccaccagctcctcccagtcctgcctttgaccctgatcgttttctcaacagcccccagaggggccagacatatggaggggggcagggagtaagcccagacttccccgaggcagaggccgctcataccccctgttctgccctagagcctgctgctgccctggagccccaggcagctgctcggggtcccccaccacagtcagtagcaggtgggagaagaggaaactgcttcttcatccaagatgatgacagtggggaggagctcaagggtcacggggctgccccacccataccttcaccccctccctcacccccaccctcacctgcccccttggagccgtcaagcagggtaggaagaggagaggccttgtttggaggacctgttggggccagtgaactggagcccttcagtctttcatcattcccagaccttatgggagaactcatcagtgacgaagctccaagcatccctgctccgaccccccagctgtctcctgctcttagcaccatcacagacttctccccagagtggtcctacccagagggtggggtcaaggtgctcatcacaggtccttggaccgaagccgccgagcattactcctgtgtctttgatcacatcgcagtgccagcctcacttgtccagcctggtgtcttacgctgctactgtcccgcccatgaggtagggctggtgtctttgcaggtggcagggcgggaggggcccctttctgcttctgtgctctttgagtatcgagcccgccgattcctgtctctgcctagtactcaacttgactggctgtcactggacgacaaccagttccggatgtccatactagagcgactggagcagatggagaagcggatggcagagatcgcagcagctgggcaggtgccttgccagggtcctgatgctcctccagttcaggatgaaggccaggggcctgggttcgaagcacgggtagtggtcttggtagaaagcatgatcccacgctccacctggaagggtcctgaacgtctggcccatggaagccccttccggggcatgagccttctgcacctggctgctgcccagggctatgcccgcctcatcgagaccctgagccagtggcggagtgtggagactggaagcttggacttagagcaggaggttgacccgctcaacgtggatcatttctcttgcacccctctgatgtgggcttgtgccctgggacacctggaagctgctgtgctccttttccgttggaaccgacaggcactgagcattcccgactctctgggccgtctgccattgtctgtggctcattcccggggtcatgtgcgccttgcccgctgccttgaggaactacagagacaggagccttcggtggagcccccatttgccctatcgccaccctcctccagcccagacactggtctgagcagcgtctcctcgccctcggagctgtcggatggcaccttttccgtcacgtcagcctattctagtgccccagatggcagtcccccccctgcacctctgccagcctctgagatgactatggaggacatggccccaggccagctttcctctggtgtcccagaagcccccctactcctcatggactatgaggctaccaactccaaggggcccctctcctcccttcctgccctcccaccagcttcagatgatggggctgctccagaggacgctgacagcccacaggctgtggatgtgatcccggtggacatgatctcactagccaagcagatcatcgaagccacaccggagcggattaaacgagaggacttcgtggggctgcccgaggctggagcctcaatgcgggagcggacaggggctgtggggctcagtgagaccatgtcctggctggccagctacctggagaatgtggaccatttccccagctcaacccctcccagcgaactgccctttgagcgaggtcgcctggctgtcccttcagcaccctcctgggcagagtttctctctgcatccaccagtggcaagatggaaagtgattttgccctgctgacactatcagatcacgagcagcgggaactgtatgaggctgcccgagtcatccagacggccttccgaaagtacaagggccggcggctgaaggagcagcaggaggtagcagcagctgtaatccagcgctgttaccggaagtacaagcagtttgcactctataagaagatgacccaggcggccatcctgatccagagcaagttccgaagctactatgaacagaagcgatttcagcagagccgccgagcggctgtgctcatccagcagcactaccgctcctaccgccgcaggcccggccctccccaccggacttcggccaccctgcctgcccgcaacaaaggctcctttctcaccaagaagcaggaccaggcagcccggaagatcatgagattcctgcggcgctgccgacacaggatgagggaactgaagcagaaccaggagctggaagggcttccccagccgggactggccacatgacctggccaccgcctttctcaccaccctgggggcgcctcgtgcagtcttaacagggagagggctttctggggcagggggagcccctgtcggcagctttcctgttcacctttgttggagccctctgtaggcctcctccctcctccccacgccttgctcccacacccctctcctcgtccctcctggtcgtgccccgtctcttttggtcctggctccagaaaacccgcgccccacatacctgcatcttccgctgtgacctccggagccctgcctgcccctgctccccagctcctcctgcctgcacccgactcggccccctcctgacttgccttatttatttgttcgacgcgtctctgaatgtatccgcctcggttcccaccactgccttcgctgcgcacgcccctcgtgtttcagggctgaccgtgtccccacccgactccgcatgtttgcgtctgtttcctccctctctggccctgtcttaccccatcacccgactctggccactgacctcagggccgaaggggaggtggtgtacataggaacgcgttgcggagtccgccccgtcccccgaggggaggggtcttgtacatactgtaacatacagagtatagtgaagaatctatttaaggcgccgcggggagggctgcacggccgggcttgtggttctctagcgcggcgggggcctcctgccggctccacgggcactttctacttgtgcatgggcttggtttatacgaattgccattaaacatcgctgcaccagccag

SEQ ID NO: 113502 - DNA, 534 bp, Homo sapiens
  Payload ID: 2185
  Gene Symbol: CAMTA2
  Gene Name: calmodulin binding transcription activator 2
  ENST ID: ENST00000574606
  CDS Start-End: 1-534
aaggacaccaccgaggttgctgaaaacagccaccacctgaagatctttctccccaagaagctgctggagtgtcttcctcgctgcccgctgctgcctccagagaggctacggtggaatacaaatgaggagattgcatcctacctgatcacctttgagaagcatgatgagtggctgtcttgtgccccaaagacaaggcctcagaatggctccatcatcctctacaatcgcaagaaggtgaaatatcggaaggatggttacctctggaagaagcggaaggatgggaagaccacccgagaggaccacatgaagctgaaggtccagggcatggagcagcgaccgtcgagagtggctgaagtggtcccgggaggagttgttgggacagctgaagcccatgtttcatggcatcaagtggagctgcgggaatggaacagaagagttctctgtagaacacctggtgcagcagattttggacacccacccaaccaagcctgctccccgaacccacgcctgtctctgcagtggggggcttggttc

SEQ ID NO: 113503 - DNA, 962 bp, Homo sapiens
  Payload ID: 2185
  Gene Symbol: CAMTA2
  Gene Name: calmodulin binding transcription activator 2
  ENST ID: ENST00000573004
  CDS Start-End: 4-495
agaatggccgctgccgccgtcacccgcgggaccccgggagaaaacagccaccacctgaagatctttctccccaagaagctgctggagtgtcttcctcgctgcccgctgctgcctccagagaggctacggtggaatacaaatgaggagattgcatcctacctgatcacctttgagaagcatgatgagtggctgtcttgtgccccaaagacaaggcctcagaatggctccatcatcctctacaatcgcaagaaggtgaaatatcggaaggatggttacctctggaagaagcggaaggatgggaagaccacccgagaggaccacatgaagctgaaggtccagggcatggagggactgaacagaggaagagttggggagcagactagccctccccccaccccagcctgtctcctggcagtgtctctatggctgctacgttcactcttccatcgtccccacattccatcggcgctgctactggctgctccagaaccctgacatcgtccttgtgcactacctgaacgtcccagccctggaggactgtggaaagggctgcagccccatcttttgttccatcagcagcgaccgtcgagagtggctgaagtggtcccgggaggagttgttgggacagctgaagcccatgtttcatggcatcaagtggagctgcgggaatggaacagaagagttctctgtagaacacctggtgcagcagattttggacacccacccaaccaagcctgctccccgaacccacgcctgtctctgcagtggggggcttggttctgggagccttacccacaaatgcagcagcacgaaacaccgcatcatctctcccaaagtggagccccgagctttaaccctgacctctatcccccacgctcaccccccagagcctcctccactgatagccccacttcccccagagctccccaaggcacacacctccccatcttcttcctcttctt

SEQ ID NO: 113504 - DNA, 4496 bp, Homo sapiens
  Payload ID: 2185
  Gene Symbol: CAMTA2
  Gene Name: calmodulin binding transcription activator 2
  ENST ID: ENST00000572543
  CDS Start-End: 114-3737
gtgtggggtagaatggccgctgccgccgtcacccgcgggaccccgggagcacagactccccctccccccggcccctcaggccgggggtgaccttgccccctggagccctcaccatgaataccaaggacaccaccgaggttgctgaaaacagccaccacctgaagatctttctccccaagaagctgctggagtgtcttcctcgctgcccgctgctgcctccagagaggctacggtggaatacaaatgaggagattgcatcctacctgatcacctttgagaagcatgatgagtggctgtcttgtgccccaaagacaaggcctcagaatggctccatcatcctctacaatcgcaagaaggtgaaatatcggaaggatggttacctctggaagaagcggaaggatgggaagaccacccgagaggaccacatgaagctgaaggtccagggcatggagcctgtctcctggcagtgtctctatggctgctacgttcactcttccatcgtccccacattccatcggcgctgctactggctgctccagaaccctgacatcgtccttgtgcactacctgaacgtcccagccctggaggactgtggaaagggctgcagccccatcttttgttccatcagcagcgaccgtcgagagtggctgaagtggtcccgggaggagttgttgggacagctgaagcccatgtttcatggcatcaagtggagctgcgggaatggaacagaagagttctctgtagaacacctggtgcagcagattttggacacccacccaaccaagcctgctccccgaacccacgcctgtctctgcagtggggggcttggttctgggagccttacccacaaatgcagcagcacgaaacaccgcatcatctctcccaaagtggagccccgagctttaaccctgacctctatcccccacgctcaccccccagagcctcctccactgatagccccacttcccccagagctccccaaggcacacacctccccatcttcttcctcttcttcctcctcatcaggttttgcagagcccctagaaatcagacctagccctcccacttctcgagggggttcttcaagaggaggcactgctatcctcctcctgacaggactggagcagcgggctggaggcttgacgcccaccaggcacttggctccacaggctgatcctaggccttccatgagtttggcagtggttgtaggcactgagccttctgccccaccagctcctcccagtcctgcctttgaccctgatcgttttctcaacagcccccagaggggccagacatatggaggggggcagggagtaagcccagacttccccgaggcagaggccgctcataccccctgttctgccctagagcctgctgctgccctggagccccaggcagctgctcggggtcccccaccacagtcagtagcaggtgggagaagaggaaactgcttcttcatccaagatgatgacagtggggaggagctcaagggtcacggggctgccccacccataccttcaccccctccctcacccccaccctcacctgcccccttggagccgtcaagcagggtaggaagaggagaggccttgtttggaggacctgttggggccagtgaactggagcccttcagtctttcatcattcccagaccttatgggagaactcatcagtgacgaagctccaagcatccctgctccgaccccccagctgtctcctgctcttagcaccatcacagacttctccccagagtggtcctacccagagggtggggtcaaggtgctcatcacaggtccttggaccgaagccgccgagcattactcctgtgtctttgatcacatcgcagtgccagcctcacttgtccagcctggtgtcttacgctgctactgtcccgcccatgaggtagggctggtgtctttgcaggtggcagggcgggaggggcccctttctgcttctgtgctctttgagtatcgagcccgccgattcctgtctctgcctagtactcaacttgactggctgtcactggacgacaaccagttccggatgtccatactagagcgactggagcagatggagaagcggatggcagagatcgcagcagctgggcaggtgccttgccagggtcctgatgctcctccagttcaggatgaaggccaggggcctgggttcgaagcacgggtagtggtcttggtagaaagcatgatcccacgctccacctggaagggtcctgaacgtctggcccatggaagccccttccggggcatgagccttctgcacctggctgctgcccagggctatgcccgcctcatcgagaccctgagccagtggcggagtgtggagactggaagcttggacttagagcaggaggttgacccgctcaacgtggatcatttctcttgcacccctctgatgtgggcttgtgccctgggacacctggaagctgctgtgctccttttccgttggaaccgacaggcactgagcattcccgactctctgggccgtctgccattgtctgtggctcattcccggggtcatgtgcgccttgcccgctgccttgaggaactacagagacaggagccttcggtggagcccccatttgccctatcgccaccctcctccagcccagacactggtctgagcagcgtctcctcgccctcggagctgtcggatggcaccttttccgtcacgtcagcctattctagtgccccagatggcagtcccccccctgcacctctgccagcctctgagatgactatggaggacatggccccaggccagctttcctctggtgtcccagaagcccccctactcctcatggactatgaggctaccaactccaaggggcccctctcctcccttcctgccctcccaccagcttcagatgatggggctgctccagaggacgctgacagcccacaggctgtggatgtgatcccggtggacatgatctcactagccaagcagatcatcgaagccacaccggagcggattaaacgagaggacttcgtggggctgcccgaggctggagcctcaatgcgggagcggacaggggctgtggggctcagtgagaccatgtcctggctggccagctacctggagaatgtggaccatttccccagctcaacccctcccagcgaactgccctttgagcgaggtcgcctggctgtcccttcagcaccctcctgggcagagtttctctctgcatccaccagtggcaagatggaaagtgattttgccctgctgacactatcagatcacgagcagcgggaactgtatgaggctgcccgagtcatccagacggccttccgaaagtacaagggccggcggctgaaggagcagcaggaggtagcagcagctgtaatccagcgctgttaccggaagtacaagcagctgacctggattgcacttaagtttgcactctataagaagatgacccaggcggccatcctgatccagagcaagttccgaagctactatgaacagaagcgatttcagcagagccgccgagcggctgtgctcatccagcagcactaccgctcctaccgccgcaggcccggccctccccaccggacttcggccaccctgcctgcccgcaacaaaggctcctttctcaccaagaagcaggaccaggcagcccggaagatcatgagattcctgcggcgctgccgacacaggatgagggaactgaagcagaaccaggagctggaagggcttccccagccgggactggccacatgacctggccaccgcctttctcaccaccctgggggcgcctcgtgcagtcttaacagggagagggctttctggggcagggggagcccctgtcggcagctttcctgttcacctttgttggagccctctgtaggcctcctccctcctccccacgccttgctcccacacccctctcctcgtccctcctggtcgtgccccgtctcttttggtcctggctccagaaaacccgcgccccacatacctgcatcttccgctgtgacctccggagccctgcctgcccctgctccccagctcctcctgcctgcacccgactcggccccctcctgacttgccttatttatttgttcgacgcgtctctgaatgtatccgcctcggttcccaccactgccttcgctgcgcacgcccctcgtgtttcagggctgaccgtgtccccacccgactccgcatgtttgcgtctgtttcctccctctctggccctgtcttaccccatcacccgactctggccactgacctcagggccgaaggggaggtggtgtacataggaacgcgttgcggagtccgccccgtcccccgaggggaggggtcttgtacatactgtaacatacagagtatagtgaagaatctatttaaggcgccgcggggagggctgcacggccgggcttgtggttctctagcgcggcgggggcctcctgccggctccacgggcactttctacttgtgcatgggcttggtttatacgaattgccattaaacatcgctgcacca

SEQ ID NO: 113505 - DNA, 6054 bp, Homo sapiens
  Payload ID: 2186
  Gene Symbol: CAMSAP1
  Gene Name: calmodulin regulated spectrin-associated protein 1
  Uniprot ID: Q5T5Y3
  ENST ID: ENST00000312405
  CDS Start-End: 352-4326
gtcccggaaagggatctatgtgatggagagtgatgacacccccgtgacagagtccgacctcagtcgcgcacccataaaaatgagtgcccacatggcaatggtggatgccctgatgatggcctacactgtggagatgatcagcatcgagaaggtggtggccagtgtcaagcgcttctcaacgttcagtgcctcgaaagaacttccgtacgacctcgaggatgccatggtgttctggatcaacaaggtaaatcttaaaatgagagagataacagagaaagaagttaaattaaaacaacagttattggaaagtccagctcatcaaaagatatatgcttaaaggaggtaacgtcgatggccgacagtctgtataatattcggcttctgagagaattctccaatgaatatcttaataaatgtttttatctcaccttggaagatatgctgtatgcgccattagtgttgaagccgaatgttatggtttttattgcggagcttttttggtggttcgagaatgtcaagccagattttgttcagcccagggatgttcaggagctgaaagacgcgaaaacagtgttacaccagaagagcagccggcctcctgtaccgatctccaacgcgaccaaacgcagtttcctaggcagccctgctgcagggaccctggctgagctgcagccccccgtgcagctgccggcggaaggctgtcacaggcactacctgcacccggaagaacctgaatacctcgggaaaggaactgctgccttcagcccatcccatcctttattgccactgagacagaaacagcagaaatccatacagggagaggacatccctgatcagcgacatcgatcgaattctttgacccgagttgatggtcagcctcgaggagcagcaatagcctggccagaaaaaaaaaccaggcctgcgtcccagccaacaccttttgctctacatcacgctgcgagttgtgaagtggatcccagctctggcgacagcatcagcttggcccgctccatcagcaaagacagtttggcatccaacattgttaatctgaccccacagaaccagccacaccccacggccacgaagagccacgggaagagcctcctgagcaatgtcagtattgaggatgaggaagaggagcttgtggctattgttagagcagacgtggttccccagcaggctgacccggagttccccagggcctcaccccgggccttaggccttacagcaaatgcccggtctccccaaggacagctggacacctcggaaagtaagcctgacagttttttcttggagcctttgatgccagcagttcttaagccagcgaaagagaagcaggtgatcaccaaggaggatgaacggggggaagggagaccgaggagcatcgtgtctaggaggcccagcgagggcccccagcctttggtacgaaggaaaatgactggcagtcgcgacttgaataggacttttaccccgattccatgctcagaattccccatgggcatcgaccccaccgagacaggaccactgtcagtggaaaccgcaggagaggtctgtggtgggcctctggcccttggcggattcgatccgttcccccagggaccatccacggatggcttcttccttcatgtaggcagggccgatgaagacaccgagggaaggttatatgttagttgttcaaaaagccccaactcccacgattcagagccgtggactctcctcaggcaggattctgactcggatgtggtggacatagaggaagccgagcacgatttcatgggtgaggcccatcctgtggttttcagcagatacattggggaggaagagtcggccaaactgcaggaggacatgaaggtgaaggaacatgaagacaaagatgacgccagcggccgctcgagcccctgcctgagcacagcctctcagatgagcagtgtctccatggcgagtgggagcgtgaagatgaccagctttgcggagaggaagctccagagactcaacagctgtgagaccaagtccagcaccagcagctcccagaagaccacgccagatgcgtctgagagctgcccagcccctctgacgacgtggaggcagaagagggagcagagtccgagccagcatggcaaggatcccgccagcctcctggcatctgagctggtacagctgcacatgcagctggaggagaagcgcagggccatcgaggcccagaagaagaagatggaggcgctgtcggcaaggcagcgcctgaagctcggcaaggctgcattcctgcatgtggtgaagaagggcaaggccgaggctgccccacccctcaggccggagcactttgcaaaggagtactctcagcacaacggggaggactgtggggacgctgtttccaaaaccgaagactttctcgtgaaggaggagcagagagaggagctccttcacgagccacaggatgtggacaaagagagcctggcctttgctcagcaacataaagcaaaagaccctgtggctctgcacgagctggagagaaataaggtgatctccgctgccctcctggaggacactgttggggaggttgtcgacgtgaatgaatgtgacctttccatcgagaagcttaacgaaaccatcagtacgctgcagcaggccatcctgaaaatctctcagcagcaagagcagcttctgatgaagtcccccacagtcccagtgccaggctctaagaataactcgcaggaccacaaagtgaaggcaccagtccacttcgtggagccactctctcccacgggcgtggctggccaccgcaaagccccccggctgggtcaaggccggaattcccgttccggaaggccggcggagctgaaggtcccaaaagacaggccacagggctcctcccgaagtaaaaccccaacgcccagtgtagagacgctcccgcacttgagacccttccctgccagcagccaccctcggacgcccacggaccctggcctggacagtgccctggagcccagtggtgacccacatgggaagtgtctcttcgacagttacaggctccatgatgaaagcaatcagcggacacttactctgtcctcttccaaagatgccaacattctttcggagcagatgagcctcaaagaagttctggatgcgagtgtgaaggaggtggggtccagctcctcagatgtctcgggaaaagagagcgtccccgtggaggagcctctgaggagcagggccagcctcattgaagtggacctctccgacctgaaggcccccgacgaggatggggagctggtaagcctcgatggctcggcggaccttgtcagcgaaggcgaccagaagccgggggtcggcttcttcttcaaggatgaacagaaagcggaagatgagctcgccaagaagcgggcggccttcctcctgaagcagcagcgcaaggccgaggaggcccgcgtgcgcaagcagcagctggaagcggaggtggagctcaagcgtgacgaagcccggcgcaaagctgaggaagaccgggtgcggaaggaggaggagaaggcgcggcgcgagctcatcaagcaggagtacctgcggaggaagcagcagcagatcctagaggagcaggggctcggcaagcccaagtcaaagccgaagaagccgcggccgaagtcggtgcaccgggaagagtcgtgcagcgactccggcaccaagtgctcctccacccctgataacttgagccggactcagtcaggctccagcctgtccttggcctctgcggcgacgacagaacccgagagcgttcattccgggggcacaccctctcagcgagtggaatcgatggaagccctgcccatactgagccgtaacccaagcaggagcacagaccgagactgggagaccgcgtcggcggcatcttccctggcctcagtggccgagtacacaggtcccaagctctttaaggagcccagtagtaaatcaaacaagccgattattcacaatgccatatcccattgctgcctggctggaaaagtgaacgaaccccacaagaattccatattggaggagctggagaagtgtgatgccaatcactacatcatactgtttcgtgatgctggctgccagttcagggcgctttactgctactatcctgatactgaggaaatctacaaactcactggcacggggccaaagaacatcaccaagaaaatgatcgacaaactgtataaatacagctcagaccgaaaacagtttaacttgatcccagccaaaaccatgtctgtcagtgtggacgcactcacaatccacaaccacctgtggcagcccaagcggcctgcagtgccaaagaaggcccagactcgtaaatgaccccggtgcagctggcgtccaaagggtgacccagactcgtaaatgatgcccttgtggctggcatccagagggtgccacggggtccttatttattgttttcatctatttgggtacgaagtgtgcaaagtcacagaccttttgcaaagaggtttctagacagcagaagaaaacccctctctcagcgctcatctcacgcagaggatgccaggcagggtgaggatgggggagtagatgccgcttttgcagtggctcgcactgctgtggccactgctgaccactgaggctcccagcggagggtgttcacagccaggtcccgggccacggagctcccttacttgaagttctccttcagcatagattagacgtgatccactttgctttcttgcttctcacctcgcccccttgcacattgcctgacaccctcatattggccagctgtaatctcgtgactatgggactgaggctcaatcttggcttggggtgtttgaatgtctatagcaaaggaattcataatgggaaatctttttcatttgagaaattgtatgatatttattggttgtgtctactgccaacatttatatccaattctaagatttctgaaaaaaaattcttatcccttgctgctcagaaaaagtttacggaaaacaccagttcactaaaagcaccgaaatctgcaaagcctgtcttccgctagaacaacgtctacaaatgtgaagatgatgacttctggcacgcggtcatgagggtggggaatggcactaggagctgatgtttgcctcatttaaagtaggcaagccgagccaactgcagccatcattcattaagttttgggtagtgctctaatggtttgttcactttaataaagacagattttggtaaagtagaatatttttcattctgagcatgtttgtcccaaaaggtgatgcacttaagctgacagtcccttcagtggttttgttaggtcacggcttgtcctgtctggattctgcatctggaagcgctgcatgctctcagaggagcgtgccgtttcccctgtagatggatacttttgttttgttgcctatttaaaaacaattaagtggttatttgcagttatttcagaactccaagtaagtggatggctttgggttctttctgccttggtcccaatggtgttgatgcttctgtggagcgcggacattcccaggagcaggtgcgtgccagccatggctgccagacactgctgcaactgaccagctgccggaagattctggagccactaacattagttttgcacatattttcttgggagtgttacttgaatctatctcaaactgcagaaaaaatcaaaagatcaataattgggagaaaaagagacaaatttaactgttacataattttagatagacaaaaaacatgagtgagtcgtgtacataaggagggaacatggtacagaaggctagaaggaattataggtcttattcccctttcctcagtcctttgaagagaagtacagtctcttgcgattttgtatatatcgtgttcgacacagccgctctctgtcctgtaaatagggaactaaaggctgtatgatttctcaagtgctgagttacacagtcctgagtgagctttctgttaccatactttcacacgtgggctttatttctcactgtatgtttgatatgatattactgtatttattttaagaaagcactaagatgtaataaagtgatgaactaatttgcttta

SEQ ID NO: 113506 - DNA, 7696 bp, Homo sapiens
  Payload ID: 2186
  Gene Symbol: CAMSAP1
  Gene Name: calmodulin regulated spectrin-associated protein 1
  Uniprot ID: Q5T5Y3
  ENST ID: ENST00000389532
  CDS Start-End: 66-4874
ggcgcggcgaggggcggcggcgcctttgttgcggccgggccgccgcctcagccctttgtctgcagatggtggacgcgagcggccgcgccgccgccgagggctggaggaagatggaggccccgccggacggcgccgccgacctcgtgcccctggaccgctacgacgcggcgcgcgccaagatcgccgccaacctgcagtggatctgcgccaaggcctacggccgagataacatccctgaggacctcagagaccctttctacgttgaccagtatgagcaggagcacattaagccgcctgttatcaagcttctcctgtccagcgagctgtactgccgtgtctgcagcctcatcctgaaaggggaccaggtggccgccttacagggacaccagtctgtcatccaggccctgtcccggaaagggatctatgtgatggagagtgatgacacccccgtgacagagtccgacctcagtcgcgcacccataaaaatgagtgcccacatggcaatggtggatgccctgatgatggcctacactgtggagatgatcagcatcgagaaggtggtggccagtgtcaagcgcttctcaacgttcagtgcctcgaaagaacttccgtacgacctcgaggatgccatggtgttctggatcaacaaggtaaatcttaaaatgagagagataacagagaaagaagttaaattaaaacaacagttattggaaagtccagctcatcaaaaggtccgctatcgacgagagcacctttctgctaggcagtcaccctacttcccgttgttggaggatttgatgagagacggcagtgatggtgctgctctcttagctgtgattcactattattgcccagagcagatgaaactggatgatatatgcttaaaggaggtaacgtcgatggccgacagtctgtataatattcggcttctgagagaattctccaatgaatatcttaataaatgtttttatctcaccttggaagatatgctgtatgcgccattagtgttgaagccgaatgttatggtttttattgcggagcttttttggtggttcgagaatgtcaagccagattttgttcagcccagggatgttcaggagctgaaagacgcgaaaacagtgttacaccagaagagcagccggcctcctgtaccgatctccaacgcgaccaaacgcagtttcctaggcagccctgctgcagggaccctggctgagctgcagccccccgtgcagctgccggcggaaggctgtcacaggcactacctgcacccggaagaacctgaatacctcgggaaaggaactgctgccttcagcccatcccatcctttattgccactgagacagaaacagcagaaatccatacagggagaggacatccctgatcagcgacatcgatcgaattctttgacccgagttgatggtcagcctcgaggagcagcaatagcctggccagaaaaaaaaaccaggcctgcgtcccagccaacaccttttgctctacatcacgctgcgagttgtgaagtggatcccagctctggcgacagcatcagcttggcccgctccatcagcaaagacagtttggcatccaacattgttaatctgaccccacagaaccagccacaccccacggccacgaagagccacgggaagagcctcctgagcaatgtcagtattgaggatgaggaagaggagcttgtggctattgttagagcagacgtggttccccagcaggctgacccggagttccccagggcctcaccccgggccttaggccttacagcaaatgcccggtctccccaaggacagctggacacctcggaaagtaagcctgacagttttttcttggagcctttgatgccagcagttcttaagccagcgaaagagaagcaggtgatcaccaaggaggatgaacggggggaagggagaccgaggagcatcgtgtctaggaggcccagcgagggcccccagcctttggtacgaaggaaaatgactggcagtcgcgacttgaataggacttttaccccgattccatgctcagaattccccatgggcatcgaccccaccgagacaggaccactgtcagtggaaaccgcaggagaggtctgtggtgggcctctggcccttggcggattcgatccgttcccccagggaccatccacggatggcttcttccttcatgtaggcagggccgatgaagacaccgagggaaggttatatgttagttgttcaaaaagccccaactcccacgattcagagccgtggactctcctcaggcaggattctgactcggatgtggtggacatagaggaagccgagcacgatttcatgggtgaggcccatcctgtggttttcagcagatacattggggaggaagagtcggccaaactgcaggaggacatgaaggtgaaggaacatgaagacaaagatgacgccagcggccgctcgagcccctgcctgagcacagcctctcagatgagcagtgtctccatggcgagtgggagcgtgaagatgaccagctttgcggagaggaagctccagagactcaacagctgtgagaccaagtccagcaccagcagctcccagaagaccacgccagatgcgtctgagagctgcccagcccctctgacgacgtggaggcagaagagggagcagagtccgagccagcatggcaaggatcccgccagcctcctggcatctgagctggtacagctgcacatgcagctggaggagaagcgcagggccatcgaggcccagaagaagaagatggaggcgctgtcggcaaggcagcgcctgaagctcggcaaggctgcattcctgcatgtggtgaagaagggcaaggccgaggctgccccacccctcaggccggagcactttgcaaaggagtactctcagcacaacggggaggactgtggggacgctgtttccaaaaccgaagactttctcgtgaaggaggagcagagagaggagctccttcacgagccacaggatgtggacaaagagagcctggcctttgctcagcaacataaagcaaaagaccctgtggctctgcacgagctggagagaaataaggtgatctccgctgccctcctggaggacactgttggggaggttgtcgacgtgaatgaatgtgacctttccatcgagaagcttaacgaaaccatcagtacgctgcagcaggccatcctgaaaatctctcagcagcaagagcagcttctgatgaagtcccccacagtcccagtgccaggctctaagaataactcgcaggaccacaaagtgaaggcaccagtccacttcgtggagccactctctcccacgggcgtggctggccaccgcaaagccccccggctgggtcaaggccggaattcccgttccggaaggccggcggagctgaaggtcccaaaagacaggccacagggctcctcccgaagtaaaaccccaacgcccagtgtagagacgctcccgcacttgagacccttccctgccagcagccaccctcggacgcccacggaccctggcctggacagtgccctggagcccagtggtgacccacatgggaagtgtctcttcgacagttacaggctccatgatgaaagcaatcagcggacacttactctgtcctcttccaaagatgccaacattctttcggagcagatgagcctcaaagaagttctggatgcgagtgtgaaggaggtggggtccagctcctcagatgtctcgggaaaagagagcgtccccgtggaggagcctctgaggagcagggccagcctcattgaagtggacctctccgacctgaaggcccccgacgaggatggggagctggtaagcctcgatggctcggcggaccttgtcagcgaaggcgaccagaagccgggggtcggcttcttcttcaaggatgaacagaaagcggaagatgagctcgccaagaagcgggcggccttcctcctgaagcagcagcgcaaggccgaggaggcccgcgtgcgcaagcagcagctggaagcggaggtggagctcaagcgtgacgaagcccggcgcaaagctgaggaagaccgggtgcggaaggaggaggagaaggcgcggcgcgagctcatcaagcaggagtacctgcggaggaagcagcagcagatcctagaggagcaggggctcggcaagcccaagtcaaagccgaagaagccgcggccgaagtcggtgcaccgggaagagtcgtgcagcgactccggcaccaagtgctcctccacccctgataacttgagccggactcagtcaggctccagcctgtccttggcctctgcggcgacgacagaacccgagagcgttcattccgggggcacaccctctcagcgagtggaatcgatggaagccctgcccatactgagccgtaacccaagcaggagcacagaccgagactgggagaccgcgtcggcggcatcttccctggcctcagtggccgagtacacaggtcccaagctctttaaggagcccagtagtaaatcaaacaagccgattattcacaatgccatatcccattgctgcctggctggaaaagtgaacgaaccccacaagaattccatattggaggagctggagaagtgtgatgccaatcactacatcatactgtttcgtgatgctggctgccagttcagggcgctttactgctactatcctgatactgaggaaatctacaaactcactggcacggggccaaagaacatcaccaagaaaatgatcgacaaactgtataaatacagctcagaccgaaaacagtttaacttgatcccagccaaaaccatgtctgtcagtgtggacgcactcacaatccacaaccacctgtggcagcccaagcggcctgcagtgccaaagaaggcccagactcgtaaatgaccccggtgcagctggcgtccaaagggtgacccagactcgtaaatgatgcccttgtggctggcatccagagggtgccacggggtccttatttattgttttcatctatttgggtacgaagtgtgcaaagtcacagaccttttgcaaagaggtttctagacagcagaagaaaacccctctctcagcgctcatctcacgcagaggatgccaggcagggtgaggatgggggagtagatgccgcttttgcagtggctcgcactgctgtggccactgctgaccactgaggctcccagcggagggtgttcacagccaggtcccgggccacggagctcccttacttgaagttctccttcagcatagattagacgtgatccactttgctttcttgcttctcacctcgcccccttgcacattgcctgacaccctcatattggccagctgtaatctcgtgactatgggactgaggctcaatcttggcttggggtgtttgaatgtctatagcaaaggaattcataatgggaaatctttttcatttgagaaattgtatgatatttattggttgtgtctactgccaacatttatatccaattctaagatttctgaaaaaaaattcttatcccttgctgctcagaaaaagtttacggaaaacaccagttcactaaaagcaccgaaatctgcaaagcctgtcttccgctagaacaacgtctacaaatgtgaagatgatgacttctggcacgcggtcatgagggtggggaatggcactaggagctgatgtttgcctcatttaaagtaggcaagccgagccaactgcagccatcattcattaagttttgggtagtgctctaatggtttgttcactttaataaagacagattttggtaaagtagaatatttttcattctgagcatgtttgtcccaaaaggtgatgcacttaagctgacagtcccttcagtggttttgttaggtcacggcttgtcctgtctggattctgcatctggaagcgctgcatgctctcagaggagcgtgccgtttcccctgtagatggatacttttgttttgttgcctatttaaaaacaattaagtggttatttgcagttatttcagaactccaagtaagtggatggctttgggttctttctgccttggtcccaatggtgttgatgcttctgtggagcgcggacattcccaggagcaggtgcgtgccagccatggctgccagacactgctgcaactgaccagctgccggaagattctggagccactaacattagttttgcacatattttcttgggagtgttacttgaatctatctcaaactgcagaaaaaatcaaaagatcaataattgggagaaaaagagacaaatttaactgttacataattttagatagacaaaaaacatgagtgagtcgtgtacataaggagggaacatggtacagaaggctagaaggaattataggtcttattcccctttcctcagtcctttgaagagaagtacagtctcttgcgattttgtatatatcgtgttcgacacagccgctctctgtcctgtaaatagggaactaaaggctgtatgatttctcaagtgctgagttacacagtcctgagtgagctttctgttaccatactttcacacgtgggctttatttctcactgtatgtttgatatgatattactgtatttattttaagaaagcactaagatgtaataaagtgatgaactaatttgctttacattgaatcgtatgtgtgaggttgctgtggctcatttcgctgaccaggcgacaccaactccttgctttataggagtttcacattgttctttaccatggccctatcgaagtcagtggaattggattctttttaatgaagagctagaaaatatctggcatagagctggaaaattgcattcccatgggacgtctgaatcaattctggattttctccatggaatgagtcagtgtgtggaacatcctgaaacttgtccttaagcgtgtagttttcactgttcgttgcgagtaagcactaatgtggcatggacattcctgatgtcccaagtccccaggccagtgttcgcctaatgattgacagaagcgtccctgcgttcttcatgcttggacacagcaacccttttaattagtcttgaaaagtttcagacacaggattaattttcgtggtggtgcttttgggcctttctggcttgggtggtggtaaagtcatgattttgcagttgataacactgacttataactctgtttatcaatgtctcctatattcaaagcccctgcagtggtatttgtgtctcgttgcaaatttctttcagcggaaagcttgcacaactttcgttgtgtctcagaattctaaccttgttatttaagacaagctgctctacccatttaggatataactttgtaaagaaagtgtaaaccaaatgattcaatgtatgatgaagtttatgtgtaaatccttggtaatgctagaattctgggagcccagaagggttgaaagagaaatgaaacttgcgtgagtcccattattttacgcatgtatgtgcagatacgttctacccacacgtgtgcgtgcacatggctgtgtgcgtgcaccaaagatggactgctttccatgtgtccttttgactttctgcacgtgtcactgcggtgcagtctcttagcagacttcaggcccaaactgtattcttcactcaggcaaaattgaaaagtggaataattctaaattacttctaggttatacttttacctccctgaaattgtagttgtcacttggagggcaaaatatttattgaaataaaattttctgttaaaaattca

SEQ ID NO: 113507 - DNA, 5730 bp, Homo sapiens
  Payload ID: 2186
  Gene Symbol: CAMSAP1
  Gene Name: calmodulin regulated spectrin-associated protein 1
  Uniprot ID: Q5T5Y3
  ENST ID: ENST00000409386
  CDS Start-End: 70-4911
gcccggcgcggcgaggggcggcggcgcctttgttgcggccgggccgccgcctcagccctttgtctgcagatggtggacgcgagcggccgcgccgccgccgagggctggaggaagatggaggccccgccggacggcgccgccgacctcgtgcccctggaccgctacgacgcggcgcgcgccaagatcgccgccaacctgcagtggatctgcgccaaggcctacggccgagataacatccctgaggacctcagagaccctttctacgttgaccagtatgagcaggagcacattaagccgcctgttatcaagcttctcctgtccagcgagctgtactgccgtgtctgcagcctcatcctgaaaggggaccaggtggccgccttacagggacaccagtctgtcatccaggccctgtcccggaaagggatctatgtgatggagagtgatgacacccccgtgacagagtccgacctcagtcgcgcacccataaaaatgagtgcccacatggcaatggtggatgccctgatgatggcctacactgtggagatgatcagcatcgagaaggtggtggccagtgtcaagcgcttctcaacgttcagtgcctcgaaagaacttccgtacgacctcgaggatgccatggtgttctggatcaacaaggtaaatcttaaaatgagagagataacagagaaagaagttaaattaaaacaacagttattggaaagtccagctcatcaaaagtctccctccaagtggtattggaagttagtgcctgtccgctatcgacgagagcacctttctgctaggcagtcaccctacttcccgttgttggaggatttgatgagagacggcagtgatggtgctgctctcttagctgtgattcactattattgcccagagcagatgaaactggatgatatatgcttaaaggaggtaacgtcgatggccgacagtctgtataatattcggcttctgagagaattctccaatgaatatcttaataaatgtttttatctcaccttggaagatatgctgtatgcgccattagtgttgaagccgaatgttatggtttttattgcggagcttttttggtggttcgagaatgtcaagccagattttgttcagcccagggatgttcaggagctgaaagacgcgaaaacagtgttacaccagaagagcagccggcctcctgtaccgatctccaacgcgaccaaacgcagtttcctaggcagccctgctgcagggaccctggctgagctgcagccccccgtgcagctgccggcggaaggctgtcacaggcactacctgcacccggaagaacctgaatacctcgggaaaggaactgctgccttcagcccatcccatcctttattgccactgagacagaaacagcagaaatccatacagggagaggacatccctgatcagcgacatcgatcgaattctttgacccgagttgatggtcagcctcgaggagcagcaatagcctggccagaaaaaaaaaccaggcctgcgtcccagccaacaccttttgctctacatcacgctgcgagttgtgaagtggatcccagctctggcgacagcatcagcttggcccgctccatcagcaaagacagtttggcatccaacattgttaatctgaccccacagaaccagccacaccccacggccacgaagagccacgggaagagcctcctgagcaatgtcagtattgaggatgaggaagaggagcttgtggctattgttagagcagacgtggttccccagcaggctgacccggagttccccagggcctcaccccgggccttaggccttacagcaaatgcccggtctccccaaggacagctggacacctcggaaagtaagcctgacagttttttcttggagcctttgatgccagcagttcttaagccagcgaaagagaagcaggtgatcaccaaggaggatgaacggggggaagggagaccgaggagcatcgtgtctaggaggcccagcgagggcccccagcctttggtacgaaggaaaatgactggcagtcgcgacttgaataggacttttaccccgattccatgctcagaattccccatgggcatcgaccccaccgagacaggaccactgtcagtggaaaccgcaggagaggtctgtggtgggcctctggcccttggcggattcgatccgttcccccagggaccatccacggatggcttcttccttcatgtaggcagggccgatgaagacaccgagggaaggttatatgttagttgttcaaaaagccccaactcccacgattcagagccgtggactctcctcaggcaggattctgactcggatgtggtggacatagaggaagccgagcacgatttcatgggtgaggcccatcctgtggttttcagcagatacattggggaggaagagtcggccaaactgcaggaggacatgaaggtgaaggaacatgaagacaaagatgacgccagcggccgctcgagcccctgcctgagcacagcctctcagatgagcagtgtctccatggcgagtgggagcgtgaagatgaccagctttgcggagaggaagctccagagactcaacagctgtgagaccaagtccagcaccagcagctcccagaagaccacgccagatgcgtctgagagctgcccagcccctctgacgacgtggaggcagaagagggagcagagtccgagccagcatggcaaggatcccgccagcctcctggcatctgagctggtacagctgcacatgcagctggaggagaagcgcagggccatcgaggcccagaagaagaagatggaggcgctgtcggcaaggcagcgcctgaagctcggcaaggctgcattcctgcatgtggtgaagaagggcaaggccgaggctgccccacccctcaggccggagcactttgcaaaggagtactctcagcacaacggggaggactgtggggacgctgtttccaaaaccgaagactttctcgtgaaggaggagcagagagaggagctccttcacgagccacaggatgtggacaaagagagcctggcctttgctcagcaacataaagcaaaagaccctgtggctctgcacgagctggagagaaataaggtgatctccgctgccctcctggaggacactgttggggaggttgtcgacgtgaatgaatgtgacctttccatcgagaagcttaacgaaaccatcagtacgctgcagcaggccatcctgaaaatctctcagcagcaagagcagcttctgatgaagtcccccacagtcccagtgccaggctctaagaataactcgcaggaccacaaagtgaaggcaccagtccacttcgtggagccactctctcccacgggcgtggctggccaccgcaaagccccccggctgggtcaaggccggaattcccgttccggaaggccggcggagctgaaggtcccaaaagacaggccacagggctcctcccgaagtaaaaccccaacgcccagtgtagagacgctcccgcacttgagacccttccctgccagcagccaccctcggacgcccacggaccctggcctggacagtgccctggagcccagtggtgacccacatgggaagtgtctcttcgacagttacaggctccatgatgaaagcaatcagcggacacttactctgtcctcttccaaagatgccaacattctttcggagcagatgagcctcaaagaagttctggatgcgagtgtgaaggaggtggggtccagctcctcagatgtctcgggaaaagagagcgtccccgtggaggagcctctgaggagcagggccagcctcattgaagtggacctctccgacctgaaggcccccgacgaggatggggagctggtaagcctcgatggctcggcggaccttgtcagcgaaggcgaccagaagccgggggtcggcttcttcttcaaggatgaacagaaagcggaagatgagctcgccaagaagcgggcggccttcctcctgaagcagcagcgcaaggccgaggaggcccgcgtgcgcaagcagcagctggaagcggaggtggagctcaagcgtgacgaagcccggcgcaaagctgaggaagaccgggtgcggaaggaggaggagaaggcgcggcgcgagctcatcaagcaggagtacctgcggaggaagcagcagcagatcctagaggagcaggggctcggcaagcccaagtcaaagccgaagaagccgcggccgaagtcggtgcaccgggaagagtcgtgcagcgactccggcaccaagtgctcctccacccctgataacttgagccggactcagtcaggctccagcctgtccttggcctctgcggcgacgacagaacccgagagcgttcattccgggggcacaccctctcagcgagtggaatcgatggaagccctgcccatactgagccgtaacccaagcaggagcacagaccgagactgggagaccgcgtcggcggcatcttccctggcctcagtggccgagtacacaggtcccaagctctttaaggagcccagtagtaaatcaaacaagccgattattcacaatgccatatcccattgctgcctggctggaaaagtgaacgaaccccacaagaattccatattggaggagctggagaagtgtgatgccaatcactacatcatactgtttcgtgatgctggctgccagttcagggcgctttactgctactatcctgatactgaggaaatctacaaactcactggcacggggccaaagaacatcaccaagaaaatgatcgacaaactgtataaatacagctcagaccgaaaacagtttaacttgatcccagccaaaaccatgtctgtcagtgtggacgcactcacaatccacaaccacctgtggcagcccaagcggcctgcagtgccaaagaaggcccagactcgtaaatgaccccggtgcagctggcgtccaaagggtgacccagactcgtaaatgatgcccttgtggctggcatccagagggtgccacggggtccttatttattgttttcatctatttgggtacgaagtgtgcaaagtcacagaccttttgcaaagaggtttctagacagcagaagaaaacccctctctcagcgctcatctcacgcagaggatgccaggcagggtgaggatgggggagtagatgccgcttttgcagtggctcgcactgctgtggccactgctgaccactgaggctcccagcggagggtgttcacagccaggtcccgggccacggagctcccttacttgaagttctccttcagcatagattagacgtgatccactttgctttcttgcttctcacctcgcccccttgcacattgcctgacaccctcatattggccagctgtaatctcgtgactatgggactgaggctcaatcttggcttggggtgtttgaatgtctatagcaaaggaattcataatgggaaatctttttcatttgagaaattgtatgatatttattggttgtgtctactgccaacatttatatccaattctaagatttctgaaaaaaaattcttatcccttgctgctcagaaaaagtttacggaaaacaccagttcactaaaagcaccgaaatctgcaaagcctgtcttccgctagaacaacgtctacaaatgtgaagatgatgacttctggcacgcggtcatgagggtggggaatggcactaggagctgatgtttgcctcatttaaagtaggcaagccgagccaactgcagccatcattc

SEQ ID NO: 113508 - DNA, 7161 bp, Homo sapiens
  Payload ID: 2187
  Gene Symbol: CAMSAP2
  Gene Name: calmodulin regulated spectrin-associated protein family, member 2
  Uniprot ID: Q08AD1
  ENST ID: ENST00000236925
  CDS Start-End: 50-4519
cgccatgtgaaggttagggccgggacatcccgaggagccgcggtgaaagatgggggatgctgcagaccccagggagatgagaaagacgttcattgttccagccatcaagccttttgaccactatgatttctccagggccaaaatcgcctgcaatctggcctggctggtggccaaagcctttgggacagaaaatgtgccagaggaacttcaagaaccattttacacagatcagtatgaccaggaacacatcaaaccacctgttgttaatttgcttctatcggctgaactatactgtcgtgctgggagtctcattctcaagagtgatgctgcaaaaccccttttgggccatgatgctgtaatccaggctttagcacagaaaggtctttatgtcactgaccaggaaaaattggtaactgaacgagatctccacaagaaacccatacagatgagtgcacatttggccatgatcgataccctcatgatggcttatactgtagaaatggtcagtatagaaaaagtaattgcgtgtgctcagcagtattcagctttttttcaagccacagatctgccctatgatattgaggacgctgtcatgtactggataaataaggtaaatgaacatttgaaagacataatggaacaagaacaaaaactgaaagaacatcacacagttgaagctccaggaggtcaaaagtctccttccaaatggttttggaaactggttccagctcgttatcggaaagagcaaacattgcttaagcaactgccttgcattccattggtagaaaatttgttgaaggatgggacagatggctgtgcattagctgcccttattcatttttactgtcctgatgttgtcagattagaggatatttgtttgaaagaaactatgtctttggctgatagcctgtataatctgcagctgattcaagaattttgccaagaatacttgaaccagtgttgccatttcactctggaagatatgctctatgctgcttcatccataaagagtaattatttggtgttcatggcggaactgttctggtggtttgaagtggtgaagccgtcttttgtacagcctcgtgttgttcgtccacaaggagctgaacctgtaaaagatatgccttcaattcctgtcttgaatgctgccaaaagaaatgtcttagatagtagttctgacttcccttcaagtggggaaggagctacatttacacagtctcatcatcatttgccttctaggtattcacgtccccaggctcattcttcagcctcaggaggaattagaaggtcttcatctatgtcttatgttgatggcttcatagggacatggcccaaagagaaaagatcatcagtgcatggcgtatcatttgatatttcttttgataaagaagatagtgtacagagatccactccaaaccgaggaatcactcgttctattagtaatgaaggacttactctgaacaacagtcatgtatctaaacacattaggaaaaatttgtccttcaagccaataaatggagaagaggaagcagagagcattgaagaagaacttaatatagattctcacagtgacctcaaatcttgtgtgccccttaacacaaatgaactaaattctaatgagaatattcattacaagcttccaaatggagctttacaaaatagaatacttcttgacgagtttggcaatcagatcgagacaccaagcattgaagaagcattacaaataattcatgatactgaaaaatctcctcatacacctcagccagaccaaattgctaatggcttctttcttcatagtcaagaaatgagtatcttaaattcaaatatcaagttaaatcaatctagtcctgataatgtaactgatacgaaaggtgccttgagtcccataactgacaatactgaagtagacactggaattcacgttccttcagaagatattcctgaaactatggacgaagattcttcgttgagagattatactgtaagcttggactctgacatggatgatgcatctaaatttcttcaggattatgatattcgaactggcaacaccagggaagctttgagtccttgtccaagtactgtaagtaccaagtctcagccaggcagcagtgcttcttctagttctggagttaaaatgaccagctttgctgaacaaaaattcaggaaactgaatcataccgatggaaaaagtagtggaagcagttctcaaaaaactacaccagaaggctctgaacttaatattcctcatgtggttgcttgggcacaaattccagaagaaacagggcttccacagggacgggacactacccagctgttggcctctgaaatggtgcatcttaggatgaaactagaagaaaagaggcgtgctatagaagcccagaaaaagaaaatggaagctgcttttaccaaacagagacagaaaatgggaaggacagcattccttactgtagtgaaaaagaaaggggatgggatatctcctctacgagaggaagcggcgggtgcagaagatgagaaagtatatactgatcgagcaaaagaaaaggaatcacaaaaaactgatggacaaaggagcaagtcactggcagatataaaagagagcatggagaatcctcaagccaaatggctaaagtctccaactacacctattgatcctgagaagcagtggaacctggcaagcccctcagaagaaactttaaatgaaggagagattttagaatataccaaatccattgaaaagttaaattcatccctgcattttctacaacaagaaatgcaacgcttgtcacttcagcaggagatgttaatgcagatgagagagcaacaatcttgggtgatttcacctccacaaccctctccacagaaacagattcgagattttaagccttctaagcaggcaggcctgtcatcagccattgcaccattctcctcagactcccctcgtcctactcacccatctccacagtcttctaacaggaaaagtgcatctttttctgttaaaagtcaaaggactcctaggccaaatgagttaaaaataacacctttgaatcgaaccttgacacctcctcggtctgtggatagccttcctcggttaaggaggttttcaccaagtcaagttcctattcaaactaggtcatttgtatgttttggggatgatggagaacctcagttaaaggaatccaaacctaaagaggaagttaaaaaggaggaattggaatccaaagggactttggaacagcgtggacataatccagaagaaaaggaaatcaaaccttttgagtcaacagtctctgaagtcctatcactgcctgtcacagagactgtatgtctgacaccaaatgaggaccaattgaatcaacccacagaaccccctcctaaacccgttttcccacccactgctccaaaaaatgttaatctgattgaagtttccctctcagatttgaaaccccctgaaaaggctgatgtacctgttgaaaaatatgatggagaaagtgataaagaacaatttgatgatgaccagaaagtatgctgtggattcttttttaaggatgatcaaaaagcagaaaatgatatggcaatgaaacgggcagctttgttggagaaaagattaagaagggaaaaggaaactcagctccggaaacaacagttggaagcagaaatggagcataagaaggaggaaacaaggcgtaaaactgaggaagaacgtcagaagaaagaagatgagagagcacgcagagaatttattaggcaagaatatatgaggcggaaacaactgaaactaatggaagatatggatacagtaattaaaccccgtcctcaagtagtaaaacaaaaaaaacagcgaccaaaatctattcacagagatcatattgaatcccccaaaacaccaataaagggtcctccagtctctagcctttctttggcatcgctgaacacgggtgataacgagagtgtacattcaggcaagaggacgccaagatcagagtctgtagaaggcttcttatctccaagtcgttgtggcagtcgaaatggagaaaaagactgggagaatgcatcaacaacttcttcagtggcttctggaacagaatatacaggaccaaagctctacaaagaacccagtgcaaaatccaataagcacataatacaaaatgctttagctcattgctgtttggctggaaaagtaaatgaaggtcagaagaaaaaaatactggaggaaatggagaaatcagatgccaacaacttcttaatcttgttccgggattcaggatgccagttcagatctttatacacttattgcccagaaactgaagaaatcaataaactgactgggataggccctaaatctatcactaaaaaaatgattgaaggactttacaaatataattctgacaggaaacagtttagccacatacccgctaaaactttatctgccagtgttgatgcaattaccattcatagccatttatggcagaccaaaagaccagtaacacccaaaaaacttttacccactaaggcatagaagttgggaaatacttgcttcagaacattcatggtaaatttgcacttcatctttcctgcctatagaaaatctttctaattgccaacaagacttttattaattaaaactggacattaagctctgttgtcatgaacaactggaatgtaaaccacagtattttggagtgcagaacattctcaattaagtgataagtccaaatgatgaaggaaatgttttaattcacaaatggagatttgtatgtgttatcaggttcacctgcttgatattagatacattaaagcactgaattttcatggatattagttggatttatcattgaaatatggttaagattacaaattatgtgttttatttgttgcttttttttaaccttttaatgtatattcttgtcttcagatggtttgctatttttctctcctgggggtttattctaagatacctttgtattttatttcatgtggagatcatgaaagtaggaaatatacctttagaagtaactcgcacctttcttatgatgttaagagaaacactagtgtttagttttacagtaaccctcatattttaatggtgttacagcatttgcaaaaattattctgctaagtatttacaactctatttattattcactcaagtattaacattctctattaaataagaggaggtgttgtaaagagctgctagtaggttcgctttaaaccacatgagcttaaccaagaatatgttatgagaagttgctgattaaatcagtgctgtttttacaccacttctggccaactcagaataatttagattgttcttttaacaaaaaaggctttctatctcttttaaagtaagtcactttataagttggcagaagtgaatgacactttgagagtagtctttcaatctgaagatgtaagacttcctgaaacaagttctcaagaagtctttacattatatttataactcatataaaaattatatttagaatttttaaacatgtacaaagggctacattttaattttaaaatagcttcacattattttacttatattgggtttttcttcattttaatccttttcaagtggaatggcttagaataagtatacacttgaaatctcctctacatgatctttgttctttaacagtgtataccagagggttagttggggaaaaacttcattctcaggaaaagacttgaatgattatgtgaccctgttatatttcagtgttgtgacaaatgtgtaaactagcgggggaagacagtattgtatcataaatgagatgcgtagtttgttttctttcatgggaagtagagataaaaatatatacatttctctaattgagttgtttagagaaagaactaatgtctcatatgatgtatttacttattttaaaaaaaagaataggaatgagatgtccctgagctgtacttttctattattataaggcctttaggcatcagtgcatctgggttatcaacattttctcaaatgctgtcaatattttactgtaatttatgttcttatatttatgtatatttgttaaaactgtaaaaaaatttcacagatttttttccaatacctgtgcaagatacatgtgtagctcaaaactatttgtgatctactgtttgcatgtaagagaccaggatatgtaactcttatattttaagtgtatacatattgtgtatataacatatggatattaaaaatggggaattgcacattttaccttttggacagtaatttctatcacagttagaaggaaatgatagtcaaatacacgtttagattaaaactagtttaaaaaattataaatgaatctaatcaaaatgtgaatagtagtcaaaaggataatttaataagcattttacgttactaaatttgttcatttcaatattaactaaatttccctcatcaaagcaatctttgtgatattacttcgctattaaataaagaaaattggatgcaagacaatggagaaactttaaaactaaacaggaccaccctttattcttaaatttgtgtgtgtccaacagttgaattgaatgtctataaggtctaaaggtagaatgtgaatattgccacagagttcattgctctcagtataagattttactttattaatgcagaaggaatatggatatatttctttaagtctgcagatttttttattatggtgcagcttttttttaattatgtttttaaaattatacagttgaaaaatatgccatttcataaagtctgaggattttcgtcaaccttactgaaacacactggtgctttcatcatcagaggtcaaattattatgataactattccattaagtttgccaaacatttgtcgtggttaccagtgcagcctgtcaaattctgctatttgacacagctttggaaagatttagttcttggtttttccgttttgtattagaatgactgttacagttttatttggctgtttaaagccaaattcagctatttaattatggtttcatggacactgttgagcaatgtacagtgtatggtgtgcttacctgtccactctagagcattgcttacaggttttttgttttttaagatgctgtgctgtaaaatactgtcatacttgctatttcctggtacagtgtagtttttcccctttcatttgaataaaagcatggcacc

SEQ ID NO: 113509 - DNA, 7352 bp, Homo sapiens
  Payload ID: 2187
  Gene Symbol: CAMSAP2
  Gene Name: calmodulin regulated spectrin-associated protein family, member 2
  Uniprot ID: Q08AD1
  ENST ID: ENST00000358823
  CDS Start-End: 271-4707
acggggcggacctcgcgcggacggacggacggagacggcgccgccacattcctatgcccgggagcggcggcggcggcggcggcggctcccgcgggaggcggcaggcgcgcggcgcggacagctgagcttctcctccgtcggcgcccgggcggacatcgcccgggccccgatggtttgagcttgcttctccctccctcccgacccccgtggtggcgaggccacgccatgtgaaggttagggccgggacatcccgaggagccgcggtgaaagatgggggatgctgcagaccccagggagatgagaaagacgttcattgttccagccatcaagccttttgaccactatgatttctccagggccaaaatcgcctgcaatctggcctggctggtggccaaagcctttgggacagaaaatgtgccagaggaacttcaagaaccattttacacagatcagtatgaccaggaacacatcaaaccacctgttgttaatttgcttctatcggctgaactatactgtcgtgctgggagtctcattctcaagagtgatgctgcaaaaccccttttgggccatgatgctgtaatccaggctttagcacagaaaggtctttatgtcactgaccaggaaaaattggtaactgaacgagatctccacaagaaacccatacagatgagtgcacatttggccatgatcgataccctcatgatggcttatactgtagaaatggtcagtatagaaaaagtaattgcgtgtgctcagcagtattcagctttttttcaagccacagatctgccctatgatattgaggacgctgtcatgtactggataaataaggtaaatgaacatttgaaagacataatggaacaagaacaaaaactgaaagaacatcacacagttgaagctccaggaggtcaaaaggctcgttatcggaaagagcaaacattgcttaagcaactgccttgcattccattggtagaaaatttgttgaaggatgggacagatggctgtgcattagctgcccttattcatttttactgtcctgatgttgtcagattagaggatatttgtttgaaagaaactatgtctttggctgatagcctgtataatctgcagctgattcaagaattttgccaagaatacttgaaccagtgttgccatttcactctggaagatatgctctatgctgcttcatccataaagagtaattatttggtgttcatggcggaactgttctggtggtttgaagtggtgaagccgtcttttgtacagcctcgtgttgttcgtccacaaggagctgaacctgtaaaagatatgccttcaattcctgtcttgaatgctgccaaaagaaatgtcttagatagtagttctgacttcccttcaagtggggaaggagctacatttacacagtctcatcatcatttgccttctaggtattcacgtccccaggctcattcttcagcctcaggaggaattagaaggtcttcatctatgtcttatgttgatggcttcatagggacatggcccaaagagaaaagatcatcagtgcatggcgtatcatttgatatttcttttgataaagaagatagtgtacagagatccactccaaaccgaggaatcactcgttctattagtaatgaaggacttactctgaacaacagtcatgtatctaaacacattaggaaaaatttgtccttcaagccaataaatggagaagaggaagcagagagcattgaagaagaacttaatatagattctcacagtgacctcaaatcttgtgtgccccttaacacaaatgaactaaattctaatgagaatattcattacaagcttccaaatggagctttacaaaatagaatacttcttgacgagtttggcaatcagatcgagacaccaagcattgaagaagcattacaaataattcatgatactgaaaaatctcctcatacacctcagccagaccaaattgctaatggcttctttcttcatagtcaagaaatgagtatcttaaattcaaatatcaagttaaatcaatctagtcctgataatgtaactgatacgaaaggtgccttgagtcccataactgacaatactgaagtagacactggaattcacgttccttcagaagatattcctgaaactatggacgaagattcttcgttgagagattatactgtaagcttggactctgacatggatgatgcatctaaatttcttcaggattatgatattcgaactggcaacaccagggaagctttgagtccttgtccaagtactgtaagtaccaagtctcagccaggcagcagtgcttcttctagttctggagttaaaatgaccagctttgctgaacaaaaattcaggaaactgaatcataccgatggaaaaagtagtggaagcagttctcaaaaaactacaccagaaggctctgaacttaatattcctcatgtggttgcttgggcacaaattccagaagaaacagggcttccacagggacgggacactacccagctgttggcctctgaaatggtgcatcttaggatgaaactagaagaaaagaggcgtgctatagaagcccagaaaaagaaaatggaagctgcttttaccaaacagagacagaaaatgggaaggacagcattccttactgtagtgaaaaagaaaggggatgggatatctcctctacgagaggaagcggcgggtgcagaagatgagaaagtatatactgatcgagcaaaagaaaaggaatcacaaaaaactgatggacaaaggagcaagtcactggcagatataaaagagagcatggagaatcctcaagccaaatggctaaagtctccaactacacctattgatcctgagaagcagtggaacctggcaagcccctcagaagaaactttaaatgaaggagagattttagaatataccaaatccattgaaaagttaaattcatccctgcattttctacaacaagaaatgcaacgcttgtcacttcagcaggagatgttaatgcagatgagagagcaacaatcttgggtgatttcacctccacaaccctctccacagaaacagattcgagattttaagccttctaagcaggcaggcctgtcatcagccattgcaccattctcctcagactcccctcgtcctactcacccatctccacagtcttctaacaggaaaagtgcatctttttctgttaaaagtcaaaggactcctaggccaaatgagttaaaaataacacctttgaatcgaaccttgacacctcctcggtctgtggatagccttcctcggttaaggaggttttcaccaagtcaagttcctattcaaactaggtcatttgtatgttttggggatgatggagaacctcagttaaaggaatccaaacctaaagaggaagttaaaaaggaggaattggaatccaaagggactttggaacagcgtggacataatccagaagaaaaggaaatcaaaccttttgagtcaacagtctctgaagtcctatcactgcctgtcacagagactgtatgtctgacaccaaatgaggaccaattgaatcaacccacagaaccccctcctaaacccgttttcccacccactgctccaaaaaatgttaatctgattgaagtttccctctcagatttgaaaccccctgaaaaggctgatgtacctgttgaaaaatatgatggagaaagtgataaagaacaatttgatgatgaccagaaagtatgctgtggattcttttttaaggatgatcaaaaagcagaaaatgatatggcaatgaaacgggcagctttgttggagaaaagattaagaagggaaaaggaaactcagctccggaaacaacagttggaagcagaaatggagcataagaaggaggaaacaaggcgtaaaactgaggaagaacgtcagaagaaagaagatgagagagcacgcagagaatttattaggcaagaatatatgaggcggaaacaactgaaactaatggaagatatggatacagtaattaaaccccgtcctcaagtagtaaaacaaaaaaaacagcgaccaaaatctattcacagagatcatattgaatcccccaaaacaccaataaagggtcctccagtctctagcctttctttggcatcgctgaacacgggtgataacgagagtgtacattcaggcaagaggacgccaagatcagagtctgtagaaggcttcttatctccaagtcgttgtggcagtcgaaatggagaaaaagactgggagaatgcatcaacaacttcttcagtggcttctggaacagaatatacaggaccaaagctctacaaagaacccagtgcaaaatccaataagcacataatacaaaatgctttagctcattgctgtttggctggaaaagtaaatgaaggtcagaagaaaaaaatactggaggaaatggagaaatcagatgccaacaacttcttaatcttgttccgggattcaggatgccagttcagatctttatacacttattgcccagaaactgaagaaatcaataaactgactgggataggccctaaatctatcactaaaaaaatgattgaaggactttacaaatataattctgacaggaaacagtttagccacatacccgctaaaactttatctgccagtgttgatgcaattaccattcatagccatttatggcagaccaaaagaccagtaacacccaaaaaacttttacccactaaggcatagaagttgggaaatacttgcttcagaacattcatggtaaatttgcacttcatctttcctgcctatagaaaatctttctaattgccaacaagacttttattaattaaaactggacattaagctctgttgtcatgaacaactggaatgtaaaccacagtattttggagtgcagaacattctcaattaagtgataagtccaaatgatgaaggaaatgttttaattcacaaatggagatttgtatgtgttatcaggttcacctgcttgatattagatacattaaagcactgaattttcatggatattagttggatttatcattgaaatatggttaagattacaaattatgtgttttatttgttgcttttttttaaccttttaatgtatattcttgtcttcagatggtttgctatttttctctcctgggggtttattctaagatacctttgtattttatttcatgtggagatcatgaaagtaggaaatatacctttagaagtaactcgcacctttcttatgatgttaagagaaacactagtgtttagttttacagtaaccctcatattttaatggtgttacagcatttgcaaaaattattctgctaagtatttacaactctatttattattcactcaagtattaacattctctattaaataagaggaggtgttgtaaagagctgctagtaggttcgctttaaaccacatgagcttaaccaagaatatgttatgagaagttgctgattaaatcagtgctgtttttacaccacttctggccaactcagaataatttagattgttcttttaacaaaaaaggctttctatctcttttaaagtaagtcactttataagttggcagaagtgaatgacactttgagagtagtctttcaatctgaagatgtaagacttcctgaaacaagttctcaagaagtctttacattatatttataactcatataaaaattatatttagaatttttaaacatgtacaaagggctacattttaattttaaaatagcttcacattattttacttatattgggtttttcttcattttaatccttttcaagtggaatggcttagaataagtatacacttgaaatctcctctacatgatctttgttctttaacagtgtataccagagggttagttggggaaaaacttcattctcaggaaaagacttgaatgattatgtgaccctgttatatttcagtgttgtgacaaatgtgtaaactagcgggggaagacagtattgtatcataaatgagatgcgtagtttgttttctttcatgggaagtagagataaaaatatatacatttctctaattgagttgtttagagaaagaactaatgtctcatatgatgtatttacttattttaaaaaaaagaataggaatgagatgtccctgagctgtacttttctattattataaggcctttaggcatcagtgcatctgggttatcaacattttctcaaatgctgtcaatattttactgtaatttatgttcttatatttatgtatatttgttaaaactgtaaaaaaatttcacagatttttttccaatacctgtgcaagatacatgtgtagctcaaaactatttgtgatctactgtttgcatgtaagagaccaggatatgtaactcttatattttaagtgtatacatattgtgtatataacatatggatattaaaaatggggaattgcacattttaccttttggacagtaatttctatcacagttagaaggaaatgatagtcaaatacacgtttagattaaaactagtttaaaaaattataaatgaatctaatcaaaatgtgaatagtagtcaaaaggataatttaataagcattttacgttactaaatttgttcatttcaatattaactaaatttccctcatcaaagcaatctttgtgatattacttcgctattaaataaagaaaattggatgcaagacaatggagaaactttaaaactaaacaggaccaccctttattcttaaatttgtgtgtgtccaacagttgaattgaatgtctataaggtctaaaggtagaatgtgaatattgccacagagttcattgctctcagtataagattttactttattaatgcagaaggaatatggatatatttctttaagtctgcagatttttttattatggtgcagcttttttttaattatgtttttaaaattatacagttgaaaaatatgccatttcataaagtctgaggattttcgtcaaccttactgaaacacactggtgctttcatcatcagaggtcaaattattatgataactattccattaagtttgccaaacatttgtcgtggttaccagtgcagcctgtcaaattctgctatttgacacagctttggaaagatttagttcttggtttttccgttttgtattagaatgactgttacagttttatttggctgtttaaagccaaattcagctatttaattatggtttcatggacactgttgagcaatgtacagtgtatggtgtgcttacctgtccactctagagcattgcttacaggttttttgttttttaagatgctgtgctgtaaaatactgtcatacttgctatttcctggtacagtgtagtttttcccctttcatttgaataaaagcatggcaccaaa

SEQ ID NO: 113510 - DNA, 673 bp, Homo sapiens
  Payload ID: 2187
  Gene Symbol: CAMSAP2
  Gene Name: calmodulin regulated spectrin-associated protein family, member 2
  ENST ID: ENST00000447701
  CDS Start-End: 1-400
gaaagaaactatgtctttggctgatagcctgtataatctgcagctgattcaagaattttgccaagaatacttgaaccagtgttgccatttcactctggaagatatgctctatgctgcttcatccataaagagtaattatttggtgttcatggcggaactgttctggtggtttgaagtggtgaagccgtcttttgtacagcctcgtgttgttcgtccacaaggagctgaacctgtaaaagatatgccttcaattcctgtcttgaatgctgccaaaagaaatgtcttagatagtagttctgacttcccttcaagtggggaaggagctacatttacacagtctcatcatcatttgccttctaggtattcacgtccccaggctcattcttcagcctcaggatgatcaaaaagcagaaaatgatatggcaatgaaacgggcagctttgttggagaaaagattaagaagggaaaaggaaactcagctccggaaacaacagttggaagcagaaatggagcataagaaggaggaaacaaggcgtaaaactgaggaagaacgtcagaagaaagaagatgagagagcacgcagagaatttattaggcaagaatatatgaggcggaaacaactgaaactaatggaagatatggatacagtaattaaaccccgtcctcaagtagt

SEQ ID NO: 113511 - DNA, 4498 bp, Homo sapiens
  Payload ID: 2187
  Gene Symbol: CAMSAP2
  Gene Name: calmodulin regulated spectrin-associated protein family, member 2
  Uniprot ID: Q08AD1
  ENST ID: ENST00000413307
  CDS Start-End: 50-4438
cgccatgtgaaggttagggccgggacatcccgaggagccgcggtgaaagatgggggatgctgcagaccccagggagatgagaaagacgttcattgttccagccatcaagccttttgaccactatgatttctccagggccaaaatcgcctgcaatctggcctggctggtggccaaagcctttgggacagaaaatgtgccagaggaacttcaagaaccattttacacagatcagtatgaccaggaacacatcaaaccacctgttgttaatttgcttctatcggctgaactatactgtcgtgctgggagtctcattctcaagagtgatgctgcaaaaccccttttgggccatgatgctgtaatccaggctttagcacagaaaggtctttatgtcactgaccaggaaaaattggtaactgaacgagatctccacaagaaacccatacagatgagtgcacatttggccatgatcgataccctcatgatggcttatactgtagaaatggtcagtatagaaaaagtaattgcgtgtgctcagcagtattcagctttttttcaagccacagatctgccctatgatattgaggacgctgtcatgtactggataaataaggtaaatgaacatttgaaagacataatggaacaagaacaaaaactgaaagaacatcacacagttgaagctccaggaggtcaaaaggctcgttatcggaaagagcaaacattgcttaagcaactgccttgcattccattggtagaaaatttgttgaaggatgggacagatggctgtgcattagctgcccttattcatttttactgtcctgatgttgtcagattagaggatatttgtttgaaagaaactatgtctttggctgatagcctgtataatctgcagctgattcaagaattttgccaagaatacttgaaccagtgttgccatttcactctggaagatatgctctatgctgcttcatccataaagagtaattatttggtgttcatggcggaactgttctggtggtttgaagtggtgaagccgtcttttgtacagcctcgtgttgttcgtccacaaggagctgaacctgtaaaagatatgccttcaattcctgtcttgaatgctgccaaaagaaatgtcttagatagtagttctgacttcccttcaaggtattcacgtccccaggctcattcttcagcctcaggaggaattagaaggtcttcatctatgtcttatgttgatggcttcatagggacatggcccaaagagaaaagatcatcagtgcatggcgtatcatttgatatttcttttgataaagaagatagtgtacagagatccactccaaaccgaggaatcactcgttctattagtaatgaaggacttactctgaacaacagtcatgtatctaaacacattaggaaaaatttgtccttcaagccaataaatggagaagaggaagcagagagcattgaagaagaacttaatatagattctcacagtgacctcaaatcttgtgtgccccttaacacaaatgaactaaattctaatgagaatattcattacaagcttccaaatggagctttacaaaatagaatacttcttgacgagtttggcaatcagatcgagacaccaagcattgaagaagcattacaaataattcatgatactgaaaaatctcctcatacacctcagccagaccaaattgctaatggcttctttcttcatagtcaagaaatgagtatcttaaattcaaatatcaagttaaatcaatctagtcctgataatgtaactgatacgaaaggtgccttgagtcccataactgacaatactgaagtagacactggaattcacgttccttcagaagatattcctgaaactatggacgaagattcttcgttgagagattatactgtaagcttggactctgacatggatgatgcatctaaatttcttcaggattatgatattcgaactggcaacaccagggaagctttgagtccttgtccaagtactgtaagtaccaagtctcagccaggcagcagtgcttcttctagttctggagttaaaatgaccagctttgctgaacaaaaattcaggaaactgaatcataccgatggaaaaagtagtggaagcagttctcaaaaaactacaccagaaggctctgaacttaatattcctcatgtggttgcttgggcacaaattccagaagaaacagggcttccacagggacgggacactacccagctgttggcctctgaaatggtgcatcttaggatgaaactagaagaaaagaggcgtgctatagaagcccagaaaaagaaaatggaagctgcttttaccaaacagagacagaaaatgggaaggacagcattccttactgtagtgaaaaagaaaggggatgggatatctcctctacgagaggaagcggcgggtgcagaagatgagaaagtatatactgatcgagcaaaagaaaaggaatcacaaaaaactgatggacaaaggagcaagtcactggcagatataaaagagagcatggagaatcctcaagccaaatggctaaagtctccaactacacctattgatcctgagaagcagtggaacctggcaagcccctcagaagaaactttaaatgaaggagagattttagaatataccaaatccattgaaaagttaaattcatccctgcattttctacaacaagaaatgcaacgcttgtcacttcagcaggagatgttaatgcagatgagagagcaacaatcttgggtgatttcacctccacaaccctctccacagaaacagattcgagattttaagccttctaagcaggcaggcctgtcatcagccattgcaccattctcctcagactcccctcgtcctactcacccatctccacagtcttctaacaggaaaagtgcatctttttctgttaaaagtcaaaggactcctaggccaaatgagttaaaaataacacctttgaatcgaaccttgacacctcctcggtctgtggatagccttcctcggttaaggaggttttcaccaagtcaagttcctattcaaactaggtcatttgtatgttttggggatgatggagaacctcagttaaaggaatccaaacctaaagaggaagttaaaaaggaggaattggaatccaaagggactttggaacagcgtggacataatccagaagaaaaggaaatcaaaccttttgagtcaacagtctctgaagtcctatcactgcctgtcacagagactgtatgtctgacaccaaatgaggaccaattgaatcaacccacagaaccccctcctaaacccgttttcccacccactgctccaaaaaatgttaatctgattgaagtttccctctcagatttgaaaccccctgaaaaggctgatgtacctgttgaaaaatatgatggagaaagtgataaagaacaatttgatgatgaccagaaagtatgctgtggattcttttttaaggatgatcaaaaagcagaaaatgatatggcaatgaaacgggcagctttgttggagaaaagattaagaagggaaaaggaaactcagctccggaaacaacagttggaagcagaaatggagcataagaaggaggaaacaaggcgtaaaactgaggaagaacgtcagaagaaagaagatgagagagcacgcagagaatttattaggcaagaatatatgaggcggaaacaactgaaactaatggaagatatggatacagtaattaaaccccgtcctcaagtagtaaaacaaaaaaaacagcgaccaaaatctattcacagagatcatattgaatcccccaaaacaccaataaagggtcctccagtctctagcctttctttggcatcgctgaacacgggtgataacgagagtgtacattcaggcaagaggacgccaagatcagagtctgtagaaggcttcttatctccaagtcgttgtggcagtcgaaatggagaaaaagactgggagaatgcatcaacaacttcttcagtggcttctggaacagaatatacaggaccaaagctctacaaagaacccagtgcaaaatccaataagcacataatacaaaatgctttagctcattgctgtttggctggaaaagtaaatgaaggtcagaagaaaaaaatactggaggaaatggagaaatcagatgccaacaacttcttaatcttgttccgggattcaggatgccagttcagatctttatacacttattgcccagaaactgaagaaatcaataaactgactgggataggccctaaatctatcactaaaaaaatgattgaaggactttacaaatataattctgacaggaaacagtttagccacatacccgctaaaactttatctgccagtgttgatgcaattaccattcatagccatttatggcagaccaaaagaccagtaacacccaaaaaacttttacccactaaggcatagaagttgggaaatacttgcttcagaacattcatggtaaatttgcacttcatctttcctgcc

SEQ ID NO: 113512 - DNA, 451 bp, Homo sapiens
  Payload ID: 2187
  Gene Symbol: CAMSAP2
  Gene Name: calmodulin regulated spectrin-associated protein family, member 2
  ENST ID: ENST00000475326
  CDS Start-End: 1-169
ttcttcagtggcttctggaacagaatatacaggaccaaagctctacaaagaacccagtgcaaaatccaataagcacataatacaaaatgctttagctcattgctgtttggctggaaaagtaaatgaaggtcagaagaaaaaaatactggaggtaagcatgtttgcatgaaaattaaatttggcaaactgtagaagtcttttatccattcaagagaatgtactctcatgggcctagactttcaacagcatgtaaaaagatctgtagctagatgttttaattatcagatttagtttattttcacattaggttctggaagcctgcagattttattaaagactagcaataggctttaagatttgtcattgaaataatgttataaaatgtgactaagaaacgtaacataattatataaactttattcagcaaaataaagggtttttattcgtgttg

SEQ ID NO: 113513 - DNA, 3889 bp, Homo sapiens
  Payload ID: 2188
  Gene Symbol: CAMSAP3
  Gene Name: calmodulin regulated spectrin-associated protein family, member 3
  Uniprot ID: Q9P1Y5
  ENST ID: ENST00000160298
  CDS Start-End: 102-3851
gcggcggtagcagcagcgggcccggctggggcgcgagcgcggcgcagcccagcccagcccagtccgagcgcggacccggcgcccgcagccccggcgccgccatggtggaggcggcgccccccgggcccgggccgctgcggaggacctttctagtgcccgagatcaagtcgctggaccagtacgatttctcgcgggccaaggcggcggccagcctggcgtgggtgctgcgggccgcgttcgggggcgcagagcacgtgcccccggagctgtgggagcccttctataccgaccagtacgcgcaggagcatgtgaagcccccggtgacacggctgctgctctcagccgagctctactgcagagcctggcgccaggcactgccacagcttgaaacaccccccaacccctctgcactgctggccctgctggcgcggaggggcacagtgcctgctttgcccgagcgcccggtgcgcgaggccgacctgaggcaccagcccattctcatgggagcccacctagctgtcattgatgccctcatggctgcctttgccttcgagtggacaaagaccctgccaggtcccttggccctgaccagcttggagcacaagctgcttttctgggtggacacgaccgtccggcggctgcaggagaagaccgagcaggaagcggcccagcgagcctctccagcagcccctgcagacggggcggccccggcgcagccctcgatccgataccgcaaggaccgtgtggtggcgcgacgtgccccctgcttcccgacggtgaccagcctccaggacctggccagtggggccgcgctggccgccaccatccactgctattgtccccagctgcttcgacttgaggaggtgtgcttgaaggaccccatgtctgtggcggacagcctgtacaacctccagctcgtgcaggatttctgtgcctctcgccttcctcgtggctgccccctgtcccttgaggacttgctgtacgtcccaccgccactcaaggtcaacttggtggtgatgctggccgagttgttcatgtgttttgaggtgctcaagcccgactttgtgcaagtgaaggacttgcccgatggtcacgctgcctccccccggggcactgaggcctccccacctcagaacaacagcggcagtagttctcctgtcttcaccttccgccacccgcttctgtcatctggtggcccccagtccccactccgaggatccacaggctccctgaagtcttccccgtccatgtcccatatggaggccctgggcaaggcctggaaccggcagctcagccgtcccctctcccaggctgtgtcattcagcaccccctttggcctggacagcgacgtggatgtcgtcatgggagaccctgtgctcctccgctctgtgagctcggacagcctgggccccccgcgtcccgcgccggccaggacccccacccagccacccccggagcctggtgacctgcccaccatcgaggaagctctgcagatcatccacagtgccgagccccggctcctcccagatggggcggccgacggcagcttctacctccactcccctgaggggccctccaagccatccctggcctccccctacctgcccgaggggacctccaaaccactgtccgacaggcccaccaaagcaccagtgtacatgccacaccccgagaccccctcgaaaccatctccctgtctggtgggggaggcatcgaaaccgccagccccatccgaggggtccccgaaggcggtggcttcgtccccagcagccaccaactccgaggtgaaaatgaccagctttgcagaacgcaagaaacagctggtgaaggcagaggctgaggccggagcggggtcccccacgtccactccggccccgccggaggccctgagctcggagatgagtgagctcagcgcccggctggaggagaaacgcagagccatcgaggctcagaagcgacggattgaggccatattcgccaagcaccgccagcggctgggcaaaagcgccttcctgcaggtgcagccgcgggaagcctctggggaggcggaagcagaggcggaggaggccgattccggtccagtccctggtggggagcggcccgcaggcgagggccagggtgagccaacctcacggcccaaggcagtgaccttctcgccagacctgggcccggtgccccacgaggggctgggggaatacaatcgagcggtcagcaagctgagtgccgccttgagctcgctgcagcgggacatgcagaggctcacggaccagcagcagcggctcctggccccgcccgaggcccccggatccgccccaccacctgctgcgtgggtcatccctggccccacgacggggcccaaagctgcatcccccagccccgcccggcgagtcccggccacccggcgcagccctgggcccgggcccagccagtcaccccgcagcccgaaacacacgcggccagcggagctgcggctggcacccttgaccagggtgcttacgccaccccacgacgtagacagcctcccccacctgcgcaagttctcgccgagccaggtgcccgtgcagacgcgctcttccatcctcctggcggaggagacgccccccgaggagccagccgcccggccgggcctcatcgagatcccgctgggcagcctggcagatcccgccgccgaggacgagggagacgggagccccgctggtgctgaggattccttggaggaggaggcgtcttcggagggggagccccgggtggggctggggttcttctacaaggatgaagacaagcctgaggacgagatggcccaaaagcgggccagcctgctggagcggcagcagcggcgagcagaggaggcgcggcggcgcaagcagtggcaggaggtggagaaggaacagcggagggaggaggccgcgaggctggcccaagaggaggccccgggcccagccccgcttgtgtccgcagtcccgatggcgactccagcccctgctgcccgggctccagccgaggaggaggtgggcccccggaagggggacttcacgcggcaggagtacgagcgccgggcccagctgaagctgatggacgacctcgataaggtgctgcggccccgggctgcggggtccgggggtccaggtcggggcgggcggagggccacccggcctcgctcgggttgctgtgacgactcagccctggcacgaagcccagcccgcggcctgctgggctctcggctgagcaaaatctattcccagtccaccctgtcactgtccactgtggccaacgaggcccacaataacctcggggtgaagaggcccacgtctcgggctccctccccgtcaggtctcatgtccccaagccgcctgcctggaagccgcgaacgggactgggaaaatggcagcaatgcctcctccccagcgtcagtgcccgagtacacaggtccacggctgtacaaagaacccagcgccaagtccaacaagttcatcatccacaatgccctatcacactgctgcctggcgggcaaggtgaacgaaccgcagaagaatcgcattctggaggaaattgagaaaagcaaggccaaccacttcctgatcctctttcgcgactcgagctgccagttccgggcgctctacacgctgtcgggggagacagaggagctgtcgcggctggcagggtatgggccccggaccgtcacgcccgccatggtggaaggcatctacaagtacaactcggaccgcaagcgcttcacccagatccccgccaagaccatgtccatgagcgtcgatgccttcaccatccagggacacctctggcagggcaagaaacccaccactcccaagaagggcggcggcacccccaaatagccccacccgggcggtccacgggccgggccctgtgtgct

SEQ ID NO: 113514 - DNA, 4179 bp, Homo sapiens
  Payload ID: 2188
  Gene Symbol: CAMSAP3
  Gene Name: calmodulin regulated spectrin-associated protein family, member 3
  Uniprot ID: Q9P1Y5
  ENST ID: ENST00000446248
  CDS Start-End: 102-3932
gcggcggtagcagcagcgggcccggctggggcgcgagcgcggcgcagcccagcccagcccagtccgagcgcggacccggcgcccgcagccccggcgccgccatggtggaggcggcgccccccgggcccgggccgctgcggaggacctttctagtgcccgagatcaagtcgctggaccagtacgatttctcgcgggccaaggcggcggccagcctggcgtgggtgctgcgggccgcgttcgggggcgcagagcacgtgcccccggagctgtgggagcccttctataccgaccagtacgcgcaggagcatgtgaagcccccggtgacacggctgctgctctcagccgagctctactgcagagcctggcgccaggcactgccacagcttgaaacaccccccaacccctctgcactgctggccctgctggcgcggaggggcacagtgcctgctttgcccgagcgcccggtgcgcgaggccgacctgaggcaccagcccattctcatgggagcccacctagctgtcattgatgccctcatggctgcctttgccttcgagtggacaaagaccctgccaggtcccttggccctgaccagcttggagcacaagctgcttttctgggtggacacgaccgtccggcggctgcaggagaagaccgagcaggaagcggcccagcgagcctctccagcagcccctgcagacggggcggccccggcgcagccctcgtgccctacgcgctggtactggaagctggttcctcacgcaattgccttctgtttgaaggagtcggggagcaaaccccccatgatccgataccgcaaggaccgtgtggtggcgcgacgtgccccctgcttcccgacggtgaccagcctccaggacctggccagtggggccgcgctggccgccaccatccactgctattgtccccagctgcttcgacttgaggaggtgtgcttgaaggaccccatgtctgtggcggacagcctgtacaacctccagctcgtgcaggatttctgtgcctctcgccttcctcgtggctgccccctgtcccttgaggacttgctgtacgtcccaccgccactcaaggtcaacttggtggtgatgctggccgagttgttcatgtgttttgaggtgctcaagcccgactttgtgcaagtgaaggacttgcccgatggtcacgctgcctccccccggggcactgaggcctccccacctcagaacaacagcggcagtagttctcctgtcttcaccttccgccacccgcttctgtcatctggtggcccccagtccccactccgaggatccacaggctccctgaagtcttccccgtccatgtcccatatggaggccctgggcaaggcctggaaccggcagctcagccgtcccctctcccaggctgtgtcattcagcaccccctttggcctggacagcgacgtggatgtcgtcatgggagaccctgtgctcctccgctctgtgagctcggacagcctgggccccccgcgtcccgcgccggccaggacccccacccagccacccccggagcctggtgacctgcccaccatcgaggaagctctgcagatcatccacagtgccgagccccggctcctcccagatggggcggccgacggcagcttctacctccactcccctgaggggccctccaagccatccctggcctccccctacctgcccgaggggacctccaaaccactgtccgacaggcccaccaaagcaccagtgtacatgccacaccccgagaccccctcgaaaccatctccctgtctggtgggggaggcatcgaaaccgccagccccatccgaggggtccccgaaggcggtggcttcgtccccagcagccaccaactccgaggtgaaaatgaccagctttgcagaacgcaagaaacagctggtgaaggcagaggctgaggccggagcggggtcccccacgtccactccggccccgccggaggccctgagctcggagatgagtgagctcagcgcccggctggaggagaaacgcagagccatcgaggctcagaagcgacggattgaggccatattcgccaagcaccgccagcggctgggcaaaagcgccttcctgcaggtgcagccgcgggaagcctctggggaggcggaagcagaggcggaggaggccgattccggtccagtccctggtggggagcggcccgcaggcgagggccagggtgagccaacctcacggcccaaggcagtgaccttctcgccagacctgggcccggtgccccacgaggggctgggggaatacaatcgagcggtcagcaagctgagtgccgccttgagctcgctgcagcgggacatgcagaggctcacggaccagcagcagcggctcctggccccgcccgaggcccccggatccgccccaccacctgctgcgtgggtcatccctggccccacgacggggcccaaagctgcatcccccagccccgcccggcgagtcccggccacccggcgcagccctgggcccgggcccagccagtcaccccgcagcccgaaacacacgcggccagcggagctgcggctggcacccttgaccagggtgcttacgccaccccacgacgtagacagcctcccccacctgcgcaagttctcgccgagccaggtgcccgtgcagacgcgctcttccatcctcctggcggaggagacgccccccgaggagccagccgcccggccgggcctcatcgagatcccgctgggcagcctggcagatcccgccgccgaggacgagggagacgggagccccgctggtgctgaggattccttggaggaggaggcgtcttcggagggggagccccgggtggggctggggttcttctacaaggatgaagacaagcctgaggacgagatggcccaaaagcgggccagcctgctggagcggcagcagcggcgagcagaggaggcgcggcggcgcaagcagtggcaggaggtggagaaggaacagcggagggaggaggccgcgaggctggcccaagaggaggccccgggcccagccccgcttgtgtccgcagtcccgatggcgactccagcccctgctgcccgggctccagccgaggaggaggtgggcccccggaagggggacttcacgcggcaggagtacgagcgccgggcccagctgaagctgatggacgacctcgataaggtgctgcggccccgggctgcggggtccgggggtccaggtcggggcgggcggagggccacccggcctcgctcgggttgctgtgacgactcagccctggcacgaagcccagcccgcggcctgctgggctctcggctgagcaaaatctattcccagtccaccctgtcactgtccactgtggccaacgaggcccacaataacctcggggtgaagaggcccacgtctcgggctccctccccgtcaggtctcatgtccccaagccgcctgcctggaagccgcgaacgggactgggaaaatggcagcaatgcctcctccccagcgtcagtgcccgagtacacaggtccacggctgtacaaagaacccagcgccaagtccaacaagttcatcatccacaatgccctatcacactgctgcctggcgggcaaggtgaacgaaccgcagaagaatcgcattctggaggaaattgagaaaagcaaggccaaccacttcctgatcctctttcgcgactcgagctgccagttccgggcgctctacacgctgtcgggggagacagaggagctgtcgcggctggcagggtatgggccccggaccgtcacgcccgccatggtggaaggcatctacaagtacaactcggaccgcaagcgcttcacccagatccccgccaagaccatgtccatgagcgtcgatgccttcaccatccagggacacctctggcagggcaagaaacccaccactcccaagaagggcggcggcacccccaaatagccccacccgggcggtccacgggccgggccctgtgtgctgcggccgccatcccctggaggacagtcagtcggtattcctgggtcctgtctgtccccaaccgtgtctgggtggggctggagtctccaccctctgactttgagtccagtcctgctgtgggggctgagctgggaggttcagggactcagggctcagctcagtccccttgtctgtcctcccccacttcttgaataaaataatttaaagagaa

SEQ ID NO: 113515 - DNA, 2763 bp, Homo sapiens
  Payload ID: 2189
  Gene Symbol: CALML3
  Gene Name: calmodulin-like 3
  Uniprot ID: P27482
  ENST ID: ENST00000315238
  CDS Start-End: 1078-1527
gagctcctggggcaatgtggaccagagaatgatagtgggacttcctggctgagcccttcaaggtctcctttgtctctcctccttgtcccctccctcacaggcctgcagccccactgatcatcttccagcccttggccctgccatggccactccggcctagacagctgcttctcagcaggaggtctgtccttgaccaggctgaaaggtgacctcggggtcctgtccatcaccaccttgtatgtccatcagcatttatcaataatccctagtcaccttgtttgcattcctcgatcagttgacctgcaaactagctgtcttgctagttaacctcacgaggactgggggtggcttgccggtcccactgtgttcccagcttccagagtgacactgcacctagtaggcactcaaatatctgtgaaagggtggatgagtgaatgggttggaggaaacccctccctattcatgtccattctgaagataagaaaactcgctgcttctacctgaagggaaaaccttcctcctccaaaaaccctcctgttctatatgaggctttagaaaccaaaggcaaggacgtttctttcatctgcctttcatcctgcaaaaagccctccactcaagggaagaaagggcactggagtttattgagtgggagacaggcggcaggtgggagacggggagggaggagagaaagggaaattcaggaggaaggagtccagcgtggattgctccaaagctcacccaccacgccctgactgcaggtgtgattcggggcccccgtggctctgctgggtccaggtgcaagcaggcacagaggtgctggcgtcagctcgattcgcaggccctggactcctgtctaaacaggacaggcccgggcaaccgcagggcaggggcgtctgccaatgatgggggaggactctgctgcttcttaagctccagcgtctcaagccagggcgagacagcccgccggccgcccggatctccacctgccaccccagagctgggacagcagccgggctgcggcactgggagggagaccccacagtggcctcttctgccacccacgcccccacccctggcatggccgaccagctgactgaggagcaggtcacagaattcaaggaggccttctccctgtttgacaaggatggggacggctgcatcaccacccgcgagctgggcacggtcatgcggtccctgggccagaaccccacggaggccgagctgcgggacatgatgagtgagatcgaccgggacggcaacggcaccgtggacttccccgagttcctgggcatgatggccaggaagatgaaggacacggacaacgaggaggagatccgcgaggccttccgcgtgttcgacaaggacggcaacggcttcgtcagcgccgccgagctgcgacacgtcatgacccggctgggggagaagctgagtgacgaggaggtggacgagatgatccgggccgcggacacggacggagacggacaggtgaactacgaggagtttgtccgtgtgctggtgtccaagtgaggccggcgcccaccatgctcctgggcgcccacgcggcccacagggcaagaacccggggcctcccgcctcctcccccatccccctgcctcccctgggcactgtggcttcctcctgcgcctggttgattcagcccacctctctgcatcccgcttcccgcgtctcttctctgcactcctgccgaccttcccacctgctcgtctgaatgacacggaacgctcccactgcaggcaaaccgtgacgccctccccactcgggagaagcagagctgaccttaggaccgagcaccagggcaggttgcgctgactctgcggccctccaggacggacaccgggtgaccccttagggcacccaggcaagatccctaagaggcacccaatgcccaggccaggggggctgcagccctcagcccccgccaggattcccgcaggctcctggactggaagctccctccgcggtcggattctggagggtgggaggcatcttggcctgcagtaagcggtgctgacggggactctggccacagaggtcaggcctcctgaaaacagcactgccttccgcgctgccccagcttgccccattccttgtccgccaacccaccgtgattcatcttctgaagctgggagtgaaactgggtcagctgtaacctgttcctattcatctggaaggagggaggcttggatgagcaggggatgagagctgcagggaaataaatgagatattcgtccttatttcatttcctttttttttttggtttccatggaaatgatccttgttaaattcagggttgaaacgaggcaggaatctccatttttgtgctttttgaaaatgcaatgaattcctatacgggggagcgggaaaggtgcctcagagagagacaagtctggatgagggaaatattgaatattctcaatcaaatggatacgctggcagcaaagagtggttaaaagtccatcaggacttgaaagacctgagtccattacgttgagaagggacctgctgattgctttgattccccctggcaagtgctccctggttgtgaagtgccaggcactagagatggtgaggggttggggggcagttgggcacacacagtgtaagagcaattcagagccgttagtcctgcactagccctgcaagctgctggcaacacctagagaaggtcgaaggggccctgccagagatcccttcaattctaaagggaggtatgttttgcgggatgggcactagacggagctc

SEQ ID NO: 113516 - DNA, 4155 bp, Homo sapiens
  Payload ID: 2190
  Gene Symbol: CALML4
  Gene Name: calmodulin-like 4
  Uniprot ID: Q96GE6
  ENST ID: ENST00000395465
  CDS Start-End: 704-883
agaaaaggggagccttcctggccagggtaaccggcactaagaggcctcactccaagcccccgaggagcctgtggtggggctggagacccggctcaggcccctccaccacccttaaagtcctcagaaggtgggaactgaactggcacaggatgggaaccggctgtgcgctggccacttgattttgccagctgccctgtaattcagctggtgaggaaactgaggcacagactgaggtagaatgattcgccagtcactcagcaagtcagcagacggggaggactgaatcccagcctgagagcaccgaagcttgtatccctgcaataccgagccccaagcctgcgagccccggtgcccatctctgagttaggccgtcttggaagggttcccttcctcctacaagatggtgtgtgaggagccttcaatacgacccggggtgtaaagtgtccaactctagtaggggcctgatggcatccccgccgagtcccaggagagagagagaagaccccttcctggagtccagggctcccgggaagaaacactggcatttgtccctttgcttcggcttctggaggcagagactctgagcccagggagagccttctgcagccccatttcctcaaaaatccaacctgcccaggtggcgggtcatgagctgtgctcaggaagctggaatctgaccctggtggcgtcgggcccagtctccatggcagccgagcatttattacccgggcctccacccagcttggcagactttagacttgaggctggaggaaagggaactgaacgcggttctgggagcagcaagcccacgggtagcagccgaggccccagaatgtggatgatctcttcagggaagcagatatcgaacccaatggcaaagtgaagtatgatgaatttatccacaagatcacccttcctggacgggactattgaaggaggagaatgggagagcctcccctgggcctgaaaacttggagcaattaattttttttaaaaagtgttcttttcacttgggagagatggcaaacacagtggcaagacaacattacccaactatagaagagaggctaactagcaacaataatagatgatttcagccatggtatgagtagatctttaataaaagatttgtattgattttattaactaccgtgagtccggccctttcaagcatggaaggagcctgcggtttggagtctggcctgggttccagtcctggctctgctgcttcccactgtgactttgggcaaatcatttcactcctcaaagcccccccacacaagctggattcccacttcttacctcatggagcctgttgaggaaggattgagctgatgacttaagggcaatctaccaagagacttattctgtatttgggggctagaaccatcttccatatttccaagattttccaagatgaagccagtgctagctgagaagcagcaatgaacagaaagctgtaacacttatgacaacaattcttgcagtgccagaggcccatttacaaattctcatttccatctcaacagatatagtgacatagctcaggctattcattcataaacacagagtgtagagtgaaaacactagagtgaaaacacatgctacaatgaggcagcatcagctgagagcaggaagagcgatctactttacaccccacaccaaaggaaaccagatgtgagctgctaaattgactggccttgcagagctcaagaagggggcttccaatgctgtgagaattccgagctgttccctgggctctgttaacaggcagagaggttccgggatggtctgctcaagtggcccacactggtcattgccttaagccacctccccaggacttacggagagaaataaggggatgtaaccagcaatggccagggtacaacagccctggaaaacagtagtaggagcactaggctttctgggagtccatccagctggagtggctttgagtgagttacacagctagaaggtgccaggttggtgctgccagagattcagaggtgccatacacttgtcaaatctggatcattcgtagtgccagcacagtcctaaaagggctggagtaccacaccaacacaggtaggggtgcagggcttcaagtacaaagatttgcatccatgtatgtatcaaaagtgggttctctgggctgtggctttgtctagtagtaccacagtggctaaagtagaagaaaaccaaatcaaatgggatgtgtcttttgggaggatgtacaagacacaaatctttcactaggcaccgggcacagggaaaactgcagggaacaagagttgtagtgttagtgcaactgtctcaacgatgctgtgtggcttcagacccaaacaaggccctgaggaaggagactctcatttccccaagcataactgcaaggagaggaggaattcctaggagccaaagagttttgtggggtgagggtaaataaatggcccaaatgccaactaggtgaagttgtgaccatctggctgggaagcccaggtccacacagtgtaggagcagatgttttgtggggtctgaggtttacgagatttggctgccttaagaatacaaaaacagaaatgcagaatttctggggctgctcctaggaccagaacaagtgaagggtcctggtgcttaaacttcattaccttcatggtaaatccaccagagggccggttagatgctggccccgccgagagaactgctgtcactttcaggcaaagctcaaaggtcctaggcccacagttcttttgagctccagtcatggacattaggaagtaaatcctgcacagccaacctggaataccaaagattagatgggagatagataccaatgatttagatggcacaggaagagcaagttctggatataataaatgagggtactttccgtcaaagcttttctatgtctatatttatcactgaatagtcccagtatggttttaaagcaagttttatgaatctcatttgcctaacaggaatctgaaatataacttgccaaaaacacacagttggtgtggaatggtcattagaacctggggctcctcttcacggactccctgctcattaagggattcagtggtccagagtctaagatcctattaagtgtttgattcaaacctctacccgaggaagggctgttaccttactcctggtcctggtttcaagctcattcctgaaattccagctggtttctctagcacctagtgttgtttacaagaaggccacggtgctcttagcattcaaactgcagatactaaacagatgctgtgatttattaaagagttagccatatttcaacaagaaagggaaatgatggctatattcattacttacctcaaagcatgctgcaagaaaattagttagttacttgtcatgctttgaaatctctggatgaaaggtgctttggaagcacaaaccattatcacttgtctcatagggattgtccccttgaacatccagcagtgttattttacagaagacaaattaactgaaggcttttcttttattacatctaaagagctctacataaacaggtaacattcaataggtaaacaatttttttccaatgcatgtaataaatattttcacttggtacttttatacaaactgacattgtctactatacatttttaaaagccattttactggtttggcatgcggtatggaaattctaagagagaaagttttaaggcaatgaatcacagatttaagttcatggaatttatggtaactttatctgtttatgtacattttcccctttgttaaacaattaacagcagcacactctgggaccaccagctattttccctctctttctgaaatctaagctttgtatttaattaaaaaacagaattcaacatctattgataaaacaaaattcttactaaaataatttcaaatgtgctttaaaaagtcctgaagatcttgaaagttttatgtgtttaaaattgaaattgtctaaaaaaatgctctttccacattaatttagttaggatatattttcactccatttcagacacttgactcaaaggaaaatctgccaaagaatccgatttttcagagcttacgtgaatctttcctcagtaaagatacagaattgtgatcatgtctaaataattagtaaagcaattttaatgctcaaaatagtcaaccaag

SEQ ID NO: 113517 - DNA, 2520 bp, Homo sapiens
  Payload ID: 2190
  Gene Symbol: CALML4
  Gene Name: calmodulin-like 4
  Uniprot ID: Q96GE6
  ENST ID: ENST00000448060
  CDS Start-End: 113-562
gagagccttctgcagccccatttcctcaaaaatccaacctgcccaggtggcgggtcatgagctgtgctcaggaagctggaatctgaccctggtggcgtcgggcccagtctccatggcagccgagcatttattacccgggcctccacccagcttggcagactttagacttgaggctggaggaaagggaactgaacgcggttctgggagcagcaagcccacgggtagcagccgaggccccagaatggccaagtttctttcccaagaccaaattaatgacggaaatggagagctggatttctccacttttctgaccattatgcacatgcaaataaaacaagaagacccaaagaaagaaattcttctagccatgttgatggtggacaaggagaagaaaggttacgtcatggcgtccgacctgcggtcaaaactcacgagtctgggggagaagctcacccacaaggaagtggatgatctcttcagggaagcagatatcgaacccaatggcaaagtgaagtatgatgaatttatccacaagatcacccttcctggacgggactattgaaggaggagaatgggagagcctcccctgggcctgaaaacttggagcaattaattttttttaaaaagtgttcttttcacttgggagagatggcaaacacagtggcaagacaacattacccaactatagaagagaggctaactagcaacaataatagatgatttcagccatggtatgagtagatctttaataaaagatttgtattgattttattaactaccgtgagtccggccctttcaagcatggaaggagcctgcggtttggagtctggcctgggttccagtcctggctctgctgcttcccactgtgactttgggcaaatcatttcactcctcaaagcccccccacacaagctggattcccacttcttacctcatggagcctgttgaggaaggattgagctgatgacttaagggcaatctaccaagagacttattctgtatttgggggctagaaccatcttccatatttccaagattttccaagatgaagccagtgctagctgagaagcagcaatgaacagaaagctgtaacacttatgacaacaattcttgcagtgccagaggcccatttacaaattctcatttccatctcaacagatatagtgacatagctcaggctattcattcataaacacagagtgtagagtgaaaacactagagtgaaaacacatgctacaatgaggcagcatcagctgagagcaggaagagcgatctactttacaccccacaccaaaggaaaccagatgtgagctgctaaattgactggccttgcagagctcaagaagggggcttccaatgctgtgagaattccgagctgttccctgggctctgttaacaggcagagaggttccgggatggtctgctcaagtggcccacactggtcattgccttaagccacctccccaggacttacggagagaaataaggggatgtaaccagcaatggccagggtacaacagccctggaaaacagtagtaggagcactaggctttctgggagtccatccagctggagtggctttgagtgagttacacagctagaaggtgccaggttggtgctgccagagattcagaggtgccatacacttgtcaaatctggatcattcgtagtgccagcacagtcctaaaagggctggagtaccacaccaacacaggtaggggtgcagggcttcaagtacaaagatttgcatccatgtatgtatcaaaagtgggttctctgggctgtggctttgtctagtagtaccacagtggctaaagtagaagaaaaccaaatcaaatgggatgtgtcttttgggaggatgtacaagacacaaatctttcactaggcaccgggcacagggaaaactgcagggaacaagagttgtagtgttagtgcaactgtctcaacgatgctgtgtggcttcagacccaaacaaggccctgaggaaggagactctcatttccccaagcataactgcaaggagaggaggaattcctaggagccaaagagttttgtggggtgagggtaaataaatggcccaaatgccaactaggtgaagttgtgaccatctggctgggaagcccaggtccacacagtgtaggagcagatgttttgtggggtctgaggtttacgagatttggctgccttaagaatacaaaaacagaaatgcagaatttctggggctgctcctaggaccagaacaagtgaagggtcctggtgcttaaacttcattaccttcatggtaaatccaccagagggccggttagatgctggccccgccgagagaactgctgtcactttcaggcaaagctcaaaggtcctaggcccacagttcttttgagctccagtcatggacattaggaagtaaatcctgcacagccaacctggaataccaaagattagatgggagatagataccaatgatttagatggcacaggaagagcaagttctggatataataaatgagggtactttccgtc

SEQ ID NO: 113518 - DNA, 987 bp, Homo sapiens
  Payload ID: 2190
  Gene Symbol: CALML4
  Gene Name: calmodulin-like 4
  Uniprot ID: Q96GE6
  ENST ID: ENST00000467889
  CDS Start-End: 186-776
agggctcccgggaagaaacactggcatttgtccctttgcttcggcttctggaggcagagactctgagcccagggagagccttctgcagccccatttcctcaaaaatccaacctgcccaggtggcgggtcatgagctgtgctcaggaagctggaatctgaccctggtggcgtcgggcccagtctccatggcagccgagcatttattacccgggcctccacccagcttggcagactttagacttgaggctggaggaaagggaactgaacgcggttctgggagcagcaagcccacgggtagcagccgaggccccagaatggccaagtttctttcccaagaccaaattaatgagtacaaggaatgcttctccctgtatgacaagcagcagagggggaagataaaagccaccgacctcatggtggccatgaggtgcctgggggccagcccgacgccaggggaggtgcagcggcacctgcagacccacgggatagacggaaatggagagctggatttctccacttttctgaccattatgcacatgcaaataaaacaagaagacccaaagaaagaaattcttctagccatgttgatggtggacaaggagaagaaaggttacgtcatggcgtccgacctgcggtcaaaactcacgagtctgggggagaagctcacccacaaggaagtggatgatctcttcagggaagcagatatcgaacccaatggcaaagtgaagtatgatgaatttatccacaagatcacccttcctggacgggactattgaaggaggagaatgggagagcctcccctgggcctgaaaacttggagcaattaattttttttaaaaagtgttcttttcacttgggagagatggcaaacacagtggcaagacaacattacccaactatagaagagaggctaactagcaacaataatagatgatttcagccatggtatgagtagatctttaataaaagatttgtattgattttatt

SEQ ID NO: 113519 - DNA, 3651 bp, Homo sapiens
  Payload ID: 2190
  Gene Symbol: CALML4
  Gene Name: calmodulin-like 4
  ENST ID: ENST00000478113
  CDS Start-End: 1-90
gaacgcggttctgggagcagcaagcccacgggtagcagccgaggccccagaatgacggaaatggagagctggatttctccacttttctgaccattatgcacatgcaaataaaacaagaagacccaaagaaagaaattcttctagccatgttgatggtggacaaggagaagaaaggttacgtcatggcgtccgacctgcggtcaaaactcacgagtctgggggagaagctcacccacaaggaagtggatgatctcttcagggaagcagatatcgaacccaatggcaaagtgaagtatgatgaatttatccacaagatcacccttcctggacgggactattgaaggaggagaatgggagagcctcccctgggcctgaaaacttggagcaattaattttttttaaaaagtgttcttttcacttgggagagatggcaaacacagtggcaagacaacattacccaactatagaagagaggctaactagcaacaataatagatgatttcagccatggtatgagtagatctttaataaaagatttgtattgattttattaactaccgtgagtccggccctttcaagcatggaaggagcctgcggtttggagtctggcctgggttccagtcctggctctgctgcttcccactgtgactttgggcaaatcatttcactcctcaaagcccccccacacaagctggattcccacttcttacctcatggagcctgttgaggaaggattgagctgatgacttaagggcaatctaccaagagacttattctgtatttgggggctagaaccatcttccatatttccaagattttccaagatgaagccagtgctagctgagaagcagcaatgaacagaaagctgtaacacttatgacaacaattcttgcagtgccagaggcccatttacaaattctcatttccatctcaacagatatagtgacatagctcaggctattcattcataaacacagagtgtagagtgaaaacactagagtgaaaacacatgctacaatgaggcagcatcagctgagagcaggaagagcgatctactttacaccccacaccaaaggaaaccagatgtgagctgctaaattgactggccttgcagagctcaagaagggggcttccaatgctgtgagaattccgagctgttccctgggctctgttaacaggcagagaggttccgggatggtctgctcaagtggcccacactggtcattgccttaagccacctccccaggacttacggagagaaataaggggatgtaaccagcaatggccagggtacaacagccctggaaaacagtagtaggagcactaggctttctgggagtccatccagctggagtggctttgagtgagttacacagctagaaggtgccaggttggtgctgccagagattcagaggtgccatacacttgtcaaatctggatcattcgtagtgccagcacagtcctaaaagggctggagtaccacaccaacacaggtaggggtgcagggcttcaagtacaaagatttgcatccatgtatgtatcaaaagtgggttctctgggctgtggctttgtctagtagtaccacagtggctaaagtagaagaaaaccaaatcaaatgggatgtgtcttttgggaggatgtacaagacacaaatctttcactaggcaccgggcacagggaaaactgcagggaacaagagttgtagtgttagtgcaactgtctcaacgatgctgtgtggcttcagacccaaacaaggccctgaggaaggagactctcatttccccaagcataactgcaaggagaggaggaattcctaggagccaaagagttttgtggggtgagggtaaataaatggcccaaatgccaactaggtgaagttgtgaccatctggctgggaagcccaggtccacacagtgtaggagcagatgttttgtggggtctgaggtttacgagatttggctgccttaagaatacaaaaacagaaatgcagaatttctggggctgctcctaggaccagaacaagtgaagggtcctggtgcttaaacttcattaccttcatggtaaatccaccagagggccggttagatgctggccccgccgagagaactgctgtcactttcaggcaaagctcaaaggtcctaggcccacagttcttttgagctccagtcatggacattaggaagtaaatcctgcacagccaacctggaataccaaagattagatgggagatagataccaatgatttagatggcacaggaagagcaagttctggatataataaatgagggtactttccgtcaaagcttttctatgtctatatttatcactgaatagtcccagtatggttttaaagcaagttttatgaatctcatttgcctaacaggaatctgaaatataacttgccaaaaacacacagttggtgtggaatggtcattagaacctggggctcctcttcacggactccctgctcattaagggattcagtggtccagagtctaagatcctattaagtgtttgattcaaacctctacccgaggaagggctgttaccttactcctggtcctggtttcaagctcattcctgaaattccagctggtttctctagcacctagtgttgtttacaagaaggccacggtgctcttagcattcaaactgcagatactaaacagatgctgtgatttattaaagagttagccatatttcaacaagaaagggaaatgatggctatattcattacttacctcaaagcatgctgcaagaaaattagttagttacttgtcatgctttgaaatctctggatgaaaggtgctttggaagcacaaaccattatcacttgtctcatagggattgtccccttgaacatccagcagtgttattttacagaagacaaattaactgaaggcttttcttttattacatctaaagagctctacataaacaggtaacattcaataggtaaacaatttttttccaatgcatgtaataaatattttcacttggtacttttatacaaactgacattgtctactatacatttttaaaagccattttactggtttggcatgcggtatggaaattctaagagagaaagttttaaggcaatgaatcacagatttaagttcatggaatttatggtaactttatctgtttatgtacattttcccctttgttaaacaattaacagcagcacactctgggaccaccagctattttccctctctttctgaaatctaagctttgtatttaattaaaaaacagaattcaacatctattgataaaacaaaattcttactaaaataatttcaaatgtgctttaaaaagtcctgaagatcttgaaagttttatgtgtttaaaattgaaattgtctaaaaaaatgctctttccacattaatttagttaggatatattttcactccatttcagacacttgactcaaaggaaaatctgccaaagaatccgatttttcagagcttacgtgaatctttcctcagtaaagatacagaattgtgatcatgtctaaataattagtaaagcaattttaatgctcaaaatagtcaaccaagtatggcatggttctggttcagattttttttttttaagatgtatccaataacactcacgaagtaattaaaagccactttaaccctgcta

SEQ ID NO: 113520 - DNA, 1445 bp, Homo sapiens
  Payload ID: 2190
  Gene Symbol: CALML4
  Gene Name: calmodulin-like 4
  ENST ID: ENST00000395463
  CDS Start-End: 674-856
ccggcactaagaggcctcactccaagcccccgaggagcctgtggtggggctggagacccggctcaggcccctccaccacccttaaagtcctcagaaggtgggaactgaactggcacaggatgggaaccggctgtgcgctggccacttgattttgccagctgccctgtaattcagctggtgaggaaactgaggcacagactgaggtagaatgattcgccagtcactcagcaagtcagcagacggggaggactgaatcccagcctgagagcaccgaagcttgtatccctgcaataccgagccccaagcctgcgagccccggtgcccatctctgagttaggccgtcttggaagggttcccttcctcctacaagatggtgtgtgaggagccttcaatacgacccggggtgtaaagtgtccaactctagtaggggcctgatggcatccccgccgagtcccaggagagagagagaagaccccttcctggagtccagggctcccgggaagaaacactggcatttgtccctttgcttcggcttctggaggcagagactctgagcccagggagagccttctgcagccccatttcctcaaaaatccaacctgcccaggtggcgggtcatgagctgtgctcaggaagctggaatctgaccctggtggcgtcgggcccagtctccatggcagccgagcatttattacccgggcctccacccagcttggcagactttagacttgaggctggaggaaagggaactgaacgcggttctgggagcagcaagcccacgggtagcagccgaggccccagaatgagtacaaggaatgcttctccctgtatgacaagcagcagagggggaagataaaagccaccgacctcatggtggccatgaggtgcctgggggccagcccgacgccaggggaggtgcagcggcacctgcagacccacgggatagacggaaatggagagctggatttctccacttttctgaccattatgcacatgcaaataaaacaagaagacccaaagaaagaaattcttctagccatgttgatggtggacaaggagaagaaaggttacgtcatggcgtccgacctgcggtcaaaactcacgagtctgggggagaagctcacccacaaggaagtggatgatctcttcagggaagcagatatcgaacccaatggcaaagtgaagtatgatgaatttatccacaagatcacccttcctggacgggactattgaaggaggagaatgggagagcctcccctgggcctgaaaacttggagcaattaattttttttaaaaagtgttcttttcacttgggagagatggcaaacacagtggcaagacaacattacccaactatagaagagaggctaactagcaacaataatagatgatttcagccatggtatgagtagatctttaataaaagatttgtattgattttatta

SEQ ID NO: 113521 - DNA, 4603 bp, Homo sapiens
  Payload ID: 2190
  Gene Symbol: CALML4
  Gene Name: calmodulin-like 4
  Uniprot ID: Q96GE6
  ENST ID: ENST00000540479
  CDS Start-End: 932-1294
ggggctgagggtggagagaggaagggaaggaagaaaaggggagccttcctggccagggtaaccggcactaagaggcctcactccaagcccccgaggagcctgtggtggggctggagacccggctcaggcccctccaccacccttaaagtcctcagaaggtgggaactgaactggcacaggatgggaaccggctgtgcgctggccacttgattttgccagctgccctgtaattcagctggtgaggaaactgaggcacagactgaggtagaatgattcgccagtcactcagcaagtcagcagacggggaggactgaatcccagcctgagagcaccgaagcttgtatccctgcaataccgagccccaagcctgcgagccccggtgcccatctctgagttaggccgtcttggaagggttcccttcctcctacaagatggtgtgtgaggagccttcaatacgacccggggtgtaaagtgtccaactctagtaggggcctgatggcatccccgccgagtcccaggagagagagagaagaccccttcctggagtccagggctcccgggaagaaacactggcatttgtccctttgcttcggcttctggaggcagagactctgagcccagggagagccttctgcagccccatttcctcaaaaatccaacctgcccaggtggcgggtcatgagctgtgctcaggaagctggaatctgaccctggtggcgtcgggcccagtctccatggcagccgagcatttattacccgggcctccacccagcttggcagactttagacttgaggctggaggaaagggaactgaacgcggttctgggagcagcaagcccacgggtagcagccgaggccccagaatgagtacaaggaatgcttctccctgtatgacaagcagcagagggggaagataaaagccaccgacctcatggtggccatgaggtgcctgggggccagcccgacgccaggggaggtgcagcggcacctgcagacccacgggatagacggaaatggagagctggatttctccacttttctgaccattatgcacatgcaaataaaacaagaagacccaaagaaagaaattcttctagccatgttgatggtggacaaggagaagaaaggttacgtcatggcgtccgacctgcggtcaaaactcacgagtctgggggagaagctcacccacaaggaagtggatgatctcttcagggaagcagatatcgaacccaatggcaaagtgaagtatgatgaatttatccacaagatcacccttcctggacgggactattgaaggaggagaatgggagagcctcccctgggcctgaaaacttggagcaattaattttttttaaaaagtgttcttttcacttgggagagatggcaaacacagtggcaagacaacattacccaactatagaagagaggctaactagcaacaataatagatgatttcagccatggtatgagtagatctttaataaaagatttgtattgattttattaactaccgtgagtccggccctttcaagcatggaaggagcctgcggtttggagtctggcctgggttccagtcctggctctgctgcttcccactgtgactttgggcaaatcatttcactcctcaaagcccccccacacaagctggattcccacttcttacctcatggagcctgttgaggaaggattgagctgatgacttaagggcaatctaccaagagacttattctgtatttgggggctagaaccatcttccatatttccaagattttccaagatgaagccagtgctagctgagaagcagcaatgaacagaaagctgtaacacttatgacaacaattcttgcagtgccagaggcccatttacaaattctcatttccatctcaacagatatagtgacatagctcaggctattcattcataaacacagagtgtagagtgaaaacactagagtgaaaacacatgctacaatgaggcagcatcagctgagagcaggaagagcgatctactttacaccccacaccaaaggaaaccagatgtgagctgctaaattgactggccttgcagagctcaagaagggggcttccaatgctgtgagaattccgagctgttccctgggctctgttaacaggcagagaggttccgggatggtctgctcaagtggcccacactggtcattgccttaagccacctccccaggacttacggagagaaataaggggatgtaaccagcaatggccagggtacaacagccctggaaaacagtagtaggagcactaggctttctgggagtccatccagctggagtggctttgagtgagttacacagctagaaggtgccaggttggtgctgccagagattcagaggtgccatacacttgtcaaatctggatcattcgtagtgccagcacagtcctaaaagggctggagtaccacaccaacacaggtaggggtgcagggcttcaagtacaaagatttgcatccatgtatgtatcaaaagtgggttctctgggctgtggctttgtctagtagtaccacagtggctaaagtagaagaaaaccaaatcaaatgggatgtgtcttttgggaggatgtacaagacacaaatctttcactaggcaccgggcacagggaaaactgcagggaacaagagttgtagtgttagtgcaactgtctcaacgatgctgtgtggcttcagacccaaacaaggccctgaggaaggagactctcatttccccaagcataactgcaaggagaggaggaattcctaggagccaaagagttttgtggggtgagggtaaataaatggcccaaatgccaactaggtgaagttgtgaccatctggctgggaagcccaggtccacacagtgtaggagcagatgttttgtggggtctgaggtttacgagatttggctgccttaagaatacaaaaacagaaatgcagaatttctggggctgctcctaggaccagaacaagtgaagggtcctggtgcttaaacttcattaccttcatggtaaatccaccagagggccggttagatgctggccccgccgagagaactgctgtcactttcaggcaaagctcaaaggtcctaggcccacagttcttttgagctccagtcatggacattaggaagtaaatcctgcacagccaacctggaataccaaagattagatgggagatagataccaatgatttagatggcacaggaagagcaagttctggatataataaatgagggtactttccgtcaaagcttttctatgtctatatttatcactgaatagtcccagtatggttttaaagcaagttttatgaatctcatttgcctaacaggaatctgaaatataacttgccaaaaacacacagttggtgtggaatggtcattagaacctggggctcctcttcacggactccctgctcattaagggattcagtggtccagagtctaagatcctattaagtgtttgattcaaacctctacccgaggaagggctgttaccttactcctggtcctggtttcaagctcattcctgaaattccagctggtttctctagcacctagtgttgtttacaagaaggccacggtgctcttagcattcaaactgcagatactaaacagatgctgtgatttattaaagagttagccatatttcaacaagaaagggaaatgatggctatattcattacttacctcaaagcatgctgcaagaaaattagttagttacttgtcatgctttgaaatctctggatgaaaggtgctttggaagcacaaaccattatcacttgtctcatagggattgtccccttgaacatccagcagtgttattttacagaagacaaattaactgaaggcttttcttttattacatctaaagagctctacataaacaggtaacattcaataggtaaacaatttttttccaatgcatgtaataaatattttcacttggtacttttatacaaactgacattgtctactatacatttttaaaagccattttactggtttggcatgcggtatggaaattctaagagagaaagttttaaggcaatgaatcacagatttaagttcatggaatttatggtaactttatctgtttatgtacattttcccctttgttaaacaattaacagcagcacactctgggaccaccagctattttccctctctttctgaaatctaagctttgtatttaattaaaaaacagaattcaacatctattgataaaacaaaattcttactaaaataatttcaaatgtgctttaaaaagtcctgaagatcttgaaagttttatgtgtttaaaattgaaattgtctaaaaaaatgctctttccacattaatttagttaggatatattttcactccatttcagacacttgactcaaaggaaaatctgccaaagaatccgatttttcagagcttacgtgaatctttcctcagtaaagatacagaattgtgatcatgtctaaataattagtaaagcaattttaatgctcaaaatagtcaaccaagtatggcatggttctggttcagattttttttttttaagatgtatccaataacactcacgaagtaattaaaagccactttaaccctgct

SEQ ID NO: 113522 - DNA, 611 bp, Homo sapiens
  Payload ID: 2190
  Gene Symbol: CALML4
  Gene Name: calmodulin-like 4
  ENST ID: ENST00000354678
  CDS Start-End: 347-611
gaatttcagacaaacaacaaatacttttccaatagaagtatatgtcctatgcaaaatttggggcatacaataaaagtatattcagtgtttatctgaattcggtttaacttggcagtcctgtattttcatttgctgtatctagcacccttgggaggggagagagggatggagggagtaggcaaaaggaaggggaaaagagggagaagagactaaggatggggagggcggcatgggcggagagtgaccagacgctgctgaccctccctctgggccgtgtgcagagtacaaggaatgcttctccctgtatgacaagcagcagagggggaagataaaagccaccgacctcatggtggccatgaggtgcctgggggccagcccgacgccaggggaggtgcagcggcacctgcagacccacgggatagacggaaatggagagctggatttctccacttttctgaccattatgcacatgcaaataaaacaagaagacccaaagaaagaaattcttctagccatgttgatggtggacaaggagaagaaaggttacgtcatggcgtccgacctgcggtcaaaactcacgagtctgggggagaagctcacccacaaggaag

SEQ ID NO: 113523 - DNA, 859 bp, Homo sapiens
  Payload ID: 2191
  Gene Symbol: CALML5
  Gene Name: calmodulin-like 5
  Uniprot ID: Q9NZT1
  ENST ID: ENST00000380332
  CDS Start-End: 118-558
agacgctgcccggatccctgcggctgcctgcactctggaccacgagctctgagagcagcaggttgagggccggtgggcagcagctcggaggctccgcgaggtgcaggagacgcaggcatggccggtgagctgactcctgaggaggaggcccagtacaaaaaggctttctccgcggttgacacggatggaaacggcaccatcaatgcccaggagctgggcgcggcgctgaaggccacgggcaagaacctctcggaggcccagctaaggaaactcatctccgaggttgacagcgacggcgacggcgaaatcagcttccaggagttcctgacggcggcgaagaaggccagggccggcctggaggacctgcaggtcgccttccgcgccttcgaccaggatggcgacggccacatcaccgtggacgagctcaggcgggccatggcggggctggggcagccgctgccgcaggaggagctggacgccatgatccgcgaggccgacgtggaccaggacgggcgggtgaactacgaggagttcgcgaggatgctcgcccaggagtgaggctccccgcctgtgtccccctggctgcgctctgagccttcagggccaccgcccgctgctgcttttgtgctgggactctccggggaaacctggtcggtggatgggaaactgcctccccctgggaggaaggctttgcgctccggggcctggatgcggcgccctcgggccgcctgcgagcccctctctgcctccagaccttgggcagaaggaggcctccttgggcctggtccccctttgccctgcagtggaatgagggcccctcagccccgcattgatctaaataaaggactgccgagttcca

SEQ ID NO: 113524 - DNA, 1101 bp, Homo sapiens
  Payload ID: 2192
  Gene Symbol: CALML6
  Gene Name: calmodulin-like 6
  Uniprot ID: Q8TD86
  ENST ID: ENST00000307786
  CDS Start-End: 455-1000
ggtaattagacccagacagggagggctcagtgcgggtctgaggagggaacacacgtgtgcaggcgtgtgctccacggtggcatgttgatacggaccagcctgggcaccaggccccctcgggagccagctttgctgttctgagtggaagggagatcaggtttccctgagaaaccccaaaatagcccccaactgtgcctggcttccagcgggcagcccagcccccaggccctgttttgctccctttcccccttcacccccagcccatgtcctgctgtctcctccctgaatggtggaccctcagcccctcctgtacaagatggtcaagcggtgcctcatgcatttgttcattcgacctgtcctgagagtttgtgacatgctggcacggggccaatgttgagtccaccaggatgggagggtggccaggctctgagccactgagcaccagctggccaggatgggtcttcaacaagaaatctcactgcagccctggtgtcaccaccctgcagaatcctgtcagacaaccaccgacatgacagagcgcctgtcggctgagcagatcaaggagtacaagggagtctttgagatgttcgacgaagagggcaacggggaggtgaagacgggggagctggagtggctcatgagcctgctgggtatcaaccccaccaagagtgagctggcctcaatggccaaggatgtggacagagacaacaaagggttcttcaactgcgatggtttcctggcactaatgggagtttaccatgagaaggcccagaaccaggagagcgagctgagggcggcattccgtgtctttgacaaagagggcaagggctacattgactggaacacactcaagtacgtgctaatgaacgcaggggagcccctcaacgaggtggaggcggagcagatgatgaaggaggccgacaaggatggggacaggaccatcgactatgaggagtttgtggccatgatgacgggggagtccttcaagctgatccagtaggtgcagctgccgcagccgggggaggcctgcccgggaaggctgctgcccctgccccctggcccccactcccccggctccgtgtaaaataaatgttccagccc

SEQ ID NO: 113525 - DNA, 769 bp, Homo sapiens
  Payload ID: 2192
  Gene Symbol: CALML6
  Gene Name: calmodulin-like 6
  ENST ID: ENST00000378604
  CDS Start-End: 174-668
cctgaatggtggaccctcagcccctcctgtacaagatggtcaagcggtgcctcatgcatttgttcattcgacctgtcctgagagtttgtgacatgctggcacggggccaatgttgagtccaccaggatgggagggtggccaggctctgagccactgagcaccagctggccaggatgggtcttcaacaagaaatctcactgacagagcgcctgtcggctgagcagatcaaggagtacaagggagtctttgagatgttcgacgaagagggcaacggggaggtgaagacgggggagctggagtggctcatgagcctgctgggtatcaaccccaccaagagtgagctggcctcaatggccaaggatgtggacagagacaacaaagggttcttcaactgcgatggtttcctggcactaatgggagtttaccatgagaaggcccagaaccaggagagcgagctgagggcggcattccgtgtctttgacaaagagggcaagggctacattgactggaacacactcaagtacgtgctaatgaacgcaggggagcccctcaacgaggtggaggcggagcagatgatgaaggaggccgacaaggatggggacaggaccatcgactatgaggagtttgtggccatgatgacgggggagtccttcaagctgatccagtaggtgcagctgccgcagccgggggaggcctgcccgggaaggctgctgcccctgccccctggcccccactcccccggctccgtgtaaaataaatgttccagccc

SEQ ID NO: 113526 - DNA, 1495 bp, Homo sapiens
  Payload ID: 2193
  Gene Symbol: CAMKMT
  Gene Name: calmodulin-lysine N-methyltransferase
  Uniprot ID: Q7Z624
  ENST ID: ENST00000378494
  CDS Start-End: 45-1016
gagctgcggcggtggcacctccgggtgtggaaggctccagtgagatggagtcgcgagtcgcggacgctgggaccggcgagaccgcgcgagcagcgggcgggagtccggcagttggctgcaccactcgggggcccgtagtctcggcgcccctgggagccgcccggtggaagctcctgcggcaggttctgaagcaaaaacacctggatgattgcctgcgacatgtatctgtaagaagatttgaatcatttaatctgttttcagtaacagaaggcaaagaaagggaaactgaagaggaggttggtgcatgggtccaatatacaagcatcttctgtcctgaatacagtatctccttaaggcataatagtggatccttgaatgttgaagatgtccttaccagctttgacaatacaggaaatgtttgcatctggccatctgaagaggttttggcttactactgcctcaagcacaataatatattcagggcccttgctgtgtgtgagctagggggtggcatgacatgcttggctgggctcatggttgctatttctgcagatgtcaaagaagttctgttaactgatgggaatgaaaaggccatcagaaatgtgcaagacatcatcacaaggaatcagaaggctggtgtgtttaagacccagaaaatatcaagctgcgttttacgatgggataatgagacagatgtctctcaactggaaggacattttgacattgttatgtgtgctgactgcctgtttctggaccagtacagagccagccttgttgatgcaataaagagattactccagcccagggggaaagcgatggtatttgccccacgccgagggaatactttaaaccagttttgcaatctagctgaaaaagctggtttctgtatccaaagacatgaaaattatgatgaacacatttcaaacttccactccaagttgaaaaaggaaaacccggacatatatgaagaaaaccttcattacccgcttctgcttattttgaccaaacatggatagaagattaagcttctcaaagacgaagaaacgtatcaagtgcatagggaatatttttacaaaaacggaaatctgtaaggggtataatcgcctgcctgcgccctttgcagcatttcacgtgtgggctatggactccacctgtcctcacccacgttattccccagctgccctctccagctccctccccgcctctttttacactctgcttgttgctcgtcctgccctaaacctttgtttgtctttaaatgtgtataagctgcctgtctgtgacttgaatttgactggtgaacaaactaaatatttttccctgtaattgagacagaatttcttttgatgatacccatccctccttcattttttttttttttttggtctttgttctgttttggtggtggtagtttttaatcagtaaacccagcaaatatcatgattctttcctggttagaaaaataaataaagtgtatctttttatctccctccaa

SEQ ID NO: 113527 - DNA, 652 bp, Homo sapiens
  Payload ID: 2193
  Gene Symbol: CAMKMT
  Gene Name: calmodulin-lysine N-methyltransferase
  ENST ID: ENST00000407131
  CDS Start-End: 53-463
caggggacgagctgcggcggtggcacctccgggtgtggaaggctccagtgagatggagtcgcgagtcgcggacgctgggaccggcgagaccgcgcgagcagcgggcgggagtccggcagttggctgcaccactcgggggcccgtagtctcggcgcccctgggagccgcccggtggaagctcctgcggcaggttctgaagcaaaaacacctggatgattgcctgcgacatgtatctgtaagaagatttgaatcatttaatctgttttcagtaacagaaggcaaagaaagggaaactgaagaggaggttggtgcatgggtccaatatacaagcatcttctgtcctgaatacagtatctccttaaggcataatagtggatccttgaatgttgaagatgtccttaccagctttgacaatacaggaaatgtttatgatgtctcactttattgcccatgttggtcttgatctcctggactcaagcaatccttctgcctcagcctcccaaagtgtgattagtagcatgagccactgctcccagctgtgtatgcatttcttgcggacagttgtatagttgggtcttggattttgagcccatctgacaagtttttctttttaattgtactgtttaattgaactgaatttaattattgatat

SEQ ID NO: 113528 - DNA, 1114 bp, Homo sapiens
  Payload ID: 2193
  Gene Symbol: CAMKMT
  Gene Name: calmodulin-lysine N-methyltransferase
  Uniprot ID: Q7Z624
  ENST ID: ENST00000403853
  CDS Start-End: 45-443
gagctgcggcggtggcacctccgggtgtggaaggctccagtgagatggagtcgcgagtcgcggacgctgggaccggcgagaccgcgcgagcagcgggcgggagtccggcagttggctgcaccactcgggggcccgtagtctcggcgcccctgggagccgcccggtggaagctcctgcggcaggttctgaagcaaaaacacctggatgattgcctgcgacatgtatctgtaagaagatttgaatcatttaatctgttttcagtaacagaaggcaaagaaagggaaactgaagaggaggttggtgcatgggtccaatatacaagcatcttctgtcctgaatacagtatctccttaaggcataatagtggatccttgaatgttgaagatgtccttaccagctttgacaatacaggaaatgtttgggaagcaaccaggggaaaatgaagatatcaccatcagtagtaactcttccttttttgtttaaatggtaaatatgcctggggagatgggacttataagaaaagatgttttggccaaggcatcctacctctgcttgtcttcatgatcttcattacaatcatagcagaaatcctcatgctaaatgtttttcttttccttcttttctgggagatcattaatcagctatcctattttcctattttacgatttctccttctccagcccaattatgttttctacaaagctagtgtctgggatactaactcttaactcattcaagcaagcttctcggctatatcattacaataaattctatttaaaatacttagtgaagtacagtattcataagccagttattgcattaggtgtagctgcagtgacactgattagcattcatcataaagatagttgaatatgatttatttatatttgtatgtaagtatatatattttgaatatgtactatgctcatatgattcaaagttcaaaatggcctcaagagtataaactgtgaaaagtctcctttccatctgtccttcatcaacccagtttccctctctggaaataaccacaatgactaatttcttttgtattcttccagagttattttctgcatacaaataaaaacatgtatggttgcatatatttctgtatact

SEQ ID NO: 113529 - DNA, 665 bp, Homo sapiens
  Payload ID: 2193
  Gene Symbol: CAMKMT
  Gene Name: calmodulin-lysine N-methyltransferase
  ENST ID: ENST00000402247
  CDS Start-End: 59-478
tcctggcaggggacgagctgcggcggtggcacctccgggtgtggaaggctccagtgagatggagtcgcgagtcgcggacgctgggaccggcgagaccgcgcgagcagcgggcgggagtccggcagttggctgcaccactcgggggcccgtagtctcggcgcccctgggagccgcccggtggaagctcctgcggcaggttctgaagcaaaaacacctggatgattgcctgcgacatgtatctgtaagaagatttgaatcatttaatctgttttcagtaacagaaggcaaagaaagggaaactgaagaggaggttggtgcatgggtccaatatacaagcatcttctgtcctgaatacagtatctccttaaggcataatagtggatccttgaatgttgaagatgtccttaccagctttgacaatacaggaaatgtttacacagggtctcactctgttgcccaggctggagtgcagtggtgatcataactcagtgcagcctcaaactcctgaactgctcatatatttaagaaacacttcgtggcagaagattatgatactcttgcttatttattggcttaaggattaaggatccccaaagtctcagacttcagtaagtaagcctatgtcctacatgatgtctgtaaactccactccctcttagacttac

SEQ ID NO: 113530 - DNA, 843 bp, Homo sapiens
  Payload ID: 2193
  Gene Symbol: CAMKMT
  Gene Name: calmodulin-lysine N-methyltransferase
  ENST ID: ENST00000454433
  CDS Start-End: 1-281
cggcgcccctgggagccgcccggtggaagctcctgcggcaggttctgaagcaaaaacacctggatgattgcctgcgacatgtatctgtaagaagatttgaatcatttaatctgttttcagtaacagaaggcaaagaaagggaaactgaagaggaggttggtgcatgggtccaatatacaagcatcttctgtcctgaatacagtatctccttaaggcataatagtggatccttgaatgttgaagatgtccttaccagctttgacaatacaggaaatgtttaaaggtttaagactttggaatgatactcacctgcatttgacttctggctctgaaattcatcttgagcaatttgtatcatctctatgaacctcaactgttttcatctcttagggctggctgtgttataaagaaagtaacttttcattgcttgaatttcttcgaatgttgtgggaagaaattaagaggaatctcgtacagaatgaatcacgtctgcgtattgatttattgctgtgtgatatacgacccaaccttctttttatatatttatatttactatggtggaaaacaaaccattttgaaagtgcttacctttaactaggaatagccagtatcttcgagaaagcgtatttttgaaacatacttatttgagttaaaattgtgaaatgcatttaaaaattgaaattgaaagtagaactactggagaagttttaaatatttattggaacagaaagagcaatctccacaagtgtttattaagttcctattatgtgctgtcctgcattttcaattctcaaatgatttatcaactttgaagtacaaagtagtaaaacattctttctacac

SEQ ID NO: 113531 - DNA, 401 bp, Homo sapiens
  Payload ID: 2193
  Gene Symbol: CAMKMT
  Gene Name: calmodulin-lysine N-methyltransferase
  ENST ID: ENST00000428929
  CDS Start-End: 1-214
ttgcctgcgacatgtatctgtaagaagatttgaatcatttaatctgttttcagtaacagaaggcaaagaaagggaaactgaagaggaggttggtgcatgggtccaatatacaagcatcttctgtcctgaatacagtatctccttaaggcataatagtggatccttgaatgttgaagatgtccttaccagctttgacaatacaggaaatgtttaaaggtttaagactttggaatgatactcacctgcatttgacttctggctctgaaattcatcttgagcaatttgtatcatctctatgaacctcaactgttttcatctcttagggctggctgtgttataaagaaagtacgtacatactgcatggctgagagttgatatgcaataaaagttattaattatta

SEQ ID NO: 113532 - DNA, 526 bp, Homo sapiens
  Payload ID: 2193
  Gene Symbol: CAMKMT
  Gene Name: calmodulin-lysine N-methyltransferase
  ENST ID: ENST00000428993
  CDS Start-End: 1-250
gcgacatgtatctgtaagaagatttgaatcatttaatctgttttcagtaacagaaggcaaagaaagggaaactgaagaggaggttggtgcatgggtccaatatacaagcatcttctgtcctgaatacagtatctccttaaggcataatagtggatccttgaatgttgaagatgtccttaccagctttgacaatacaggaaatgtttacacagggtctcactctgttgcccaggctggagtgcagtggtgatcataactcagtgcagcctcaaactcctgaactgctcatatatttaagaaacacttcgtggcagaagattatgatactcttgcttatttattggcttaaggattaaggatccccaaagtctcagacttcatcagttaccaagatctattgaccatctatccactcttttctgaaccaaaggcatactctaaaagcttgcagtgactggatgagtcaaattctgtcacttcctctttacaagttgttttgtaatgattaaaccagtgatacattgta

SEQ ID NO: 113533 - DNA, 594 bp, Homo sapiens
  Payload ID: 2193
  Gene Symbol: CAMKMT
  Gene Name: calmodulin-lysine N-methyltransferase
  ENST ID: ENST00000613618
  CDS Start-End: 1-594
atctggccatctgaagaggttttggcttactactgcctcaagcacaataatatattcagggcccttgctgtgtgtgagctagggggtggcatgacatgcttggctgggctcatggttgctatttctgcagatgtcaaagaagttctgttaactgatgggaatgaaaaggccatcagaaatgtgcaagacatcatcacaaggaatcagaaggctggtgtgtttaagacccagaaaatatcaagctgcgttttacgatgggataatgagacagatgtctctcaactggaaggacattttgacattgttatgtgtgctgactgcctgtttctggaccagtacagagccagccttgttgatgcaataaagagattactccagcccagggggaaagcgatggtatttgccccacgccgagggaatactttaaaccagttttgcaatctagctgaaaaagctggtttctgtatccaaagacatgaaaattatgatgaacacatttcaaacttccactccaagttgaaaaaggaaaacccggacatatatgaagaaaaccttcattacccgcttctgcttattttgaccaaacatggatag

SEQ ID NO: 113534 - DNA, 9243 bp, Homo sapiens
  Payload ID: 2194
  Gene Symbol: CALN1
  Gene Name: calneuron 1
  Uniprot ID: Q9BXU9
  ENST ID: ENST00000329008
  CDS Start-End: 300-959
gacaaggacagggaggcacgcgcccagatcgcgctccgagtcgacgagggggctcgtgcaggtcccggcgcgcgcgtggggagcggcccgggggcgccgagggagccggcggcagcgaggatgccggcacggggacgcggctgcctgctgggggtgtgagcgagaggctgagcgctgcccgctcggcgcatccattccgcaccgccccctccctgcgggcctcggaggaagccccccgcgctgtgcggaggcgcctcggctgccgggctgcggagccccggcccagcaagagggaaaagatgccgttccaccatgtgaccgccggcttgttgtacaaggggaattacctcaaccgatcgctctctgctggcagtgacagcgaacagctggctaatatctccgtggaggagctcgatgaaatccgagaggcctttcgggttctggaccgggatgggaacggcttcatctccaagcaggagctgggcatggccatgcgctctttggggtacatgccaagcgaggtggagctggccatcatcatgcagcgcttggacatggacggggatggccaggtggattttgatgaattcatgaccattcttggccccaaactggtgtcttcagaaggtcgcgatggttttcttgggaacacgatagacagcatattctggcagtttgacatgcaaaggataactctggaagagttgaagcacattctctatcatgccttccgagaccacctaacgatgaaggacattgagaacatcattatcaatgaggaagagagcctgaatgagacctcggggaactgccaaacagagtttgaaggagtgcattcccagaagcagaacagacagacctgcgtccggaagagcctcatatgcgcctttgctatggccttcatcatcagtgtcatgctgattgcagccaaccagatactccggagcggcatggagtagcagcctcccgccagccacactgtgttgcagctcaccgcgcatgtgcatgccgtgcgggcagactcttcctccacacagcagacacggacctatggactatggatggatgcggacgatggaaccgttcagtaaagaacccaaggttgagtgcaactggggttgcacttcagcttcatctccttggcagggacactaaagggctgtcttcagtgctttaatggttttgttttctaatgcaataaatcgccaggatttccaaattattgcttcaaccatcagtcataactctagagaaaaacttcatcttcatctcggaattccagcagccatccaggtataatggtgagagagcaagagagaggcatgaacacacagtcacctccactccccattctttcaacccaagggtcaacaggagactctctgctgaggtcaaccctcagttccaagaggctgacttcagggttgccacagaagagggggctttccatcccaccctggcttccttcctccacccagtggagacccccccaaggcatgaggggaaagccattaagtggggtgcagccctggcggtcttcagctgcacccctcaccgcttccgttcttactgccttttctagaggactgccattggtagagctggggtgctctcagtttccgtcggcacttggctttctgttcctagagcccatcccgcaccagcattttggaacctgcagagagcctttctcccagctttgccgcctgtgctgccattagagaaaaaaagaagcataatcgtgggcatctctataacatagacagatatatatatttggcttcttcgtgtgtgatgtcattcttccctaatcgcttacacctaatataagcttgtcctccctcccacactcatccctgcttctttggggcaggggtgaggcaggttgaggggggaggggactgggactggcggtgaggttttgatacccacacccagccatctggagtcatggagacccaccacgtctctatgccggatgacctttgtaagttaaggtccttgtgcatcttacctttcccttaccttggagtttgctttgttagtcttccccagctaaaaagagaaatgcaatccaaaatggaaagatggagagatcaaacgactgtattttcacataagatcttctggccttcagattctgcaactgactcattttcaggaggttgggggaaaagatgtttatgagtttagccaacagaacaggtaatttactcctgcctgcagaatacttttcgttggggaagagaactgaatccaaggatctgttttcaacaccattccaagtctgtaatttcctgacttttcctagatgtcagccactactatgaattcaagcttgtgtagtcagattagccagtaatctctagatgtaatagttccctttgtacttttccaagctcaggtctttattttgtaatggaattaccttgctcctacttcttttgattacatcctaaaactacatgcttccccccttccagtagcgagccaccagaagctttcttgtctctatgcagtgggtaggattttttggtgcgttgtgtgttcctgatctccctccctgtcttcctgctcagctttctccctactgccttttcagacttggagcacccaaggtctccaatgaaagttttctcattcacctctgcaagtgctactggcaacagcctgagggcagctgtagaaactttccctctgtgggagactatgaatattcctgatgagcacaagtaaaactaaggcttcagccataatatggaggagggagcagatgtaagctcccaagagcctgggggatcacaggtccctctgcaaaacttcctggagttcagcccagcaaggccagaccaaggaggcagcaacctgcctttcccccttacctgccctgctgcctgcacactgcatgcctgccccttctgctgctcctgttggctgactcaccactgtccccttaggattggaattctcaactagaaccggtccaaatgcagaatattaatacatcgaacaacttcatccttaatctctgccctgggcagtttgccctctcccatctggacttagatgggagggcatagcagatcttgaagggatatactttcctgtttttccctgacccccgaaccacccaaccacatccataggggtgcaggaccctaagtagactgggtagaaaccccagggatgattcttcaaagccccctcctccatgagaggggactgaaatgctgcagctgaggctggtcttcagggcagaaaatgagtacttctttgaaggtggcttttctgcgagttcttctgcctcctgctggagaacagagacccttcaagaggtgagggttagatttcattggcagagagattagccactgtgcaggagtagggaggaaaaggagttctggagaggcgccgccatcctgttttctggaaaggctgcaggattcctttcctaacggtgaccttcttcttgctcccagtgacctggaagcaagcccaccctccccaggggaaaatctaggagaatgcattcctctgcagactgctagagagagatggcaagaaggaagacacagaattctttctgacagcctaggagttatcttcccactgtggtaaccccccatgtggcacccagggactgaaggacacagtgcgtggagacggccctgagctagcggcattccttagacttcaggagctcagagtttgtcccggtgacttgcaccctggctgctttgcttggacagtttgtcttgggtatagggaagccttccttgtcaggcagccaactcccagccctgttcacacaaattttatgctagggccccatgccagtcagtgtccccatcatggtggctatgaagctcacggctgaagattccagaaggtcctggtctcccatgcccaagggatgccatgtagccccagctggaagtgacttccgcaggaattgagagggaatagctcacccctcattctgtcctccggacttaggaaccagtgaccttggctgcccaactgtgtggaggctgagtgattgacaaacacaggttggctcattcttgctgcaagagcaggtaccccccgccgcccccctggaaagcacaagtgatgagcaagaaggcattttccttgggagagaaggggaaatggaccctgacccccttgatccccaaagaagctgcgccccacctttccagatacccacaaagcccccagacagaatctagcatcgggactattagcaatggcttccagaatgtgcttgggtcccacgtgactgatctgacaaaaaaaaaagagggatattaccatggcaacccttgcattccaccctgagtttgccaaggcacacaaaaatagggaacattttcttaaagaacactccaattcagcctgagtgcaacctgactctctgcatctgtatcctgctgggagaggcaattacccttaaagaatctgggtggtatctctgcctttttgtctggcatttgaacttgtccttctatttactcaggagagcaggagctacctgtaagccctggtatctccccatccctactcccagccccttctcccagggtccagagccaggaccccttaatctaggtaaattgacagaaatatcatcttggaaggcaaacaagatattaagcctccaatctttaaaagtatcggtttgcctgttgagcacactcctgcaagccaaacacgtgaactttggtgaactgaggtttaggtgtggtcttaggcaaacccagtggtttcagaaatgtctgggtgttttatttgcagagaacaagatgtgtcttatgagtcttctttctcaatacctgccctgtctcaaatctcacttgacaaatggtctacgatcttgcagttatccaaaagagcctatgaaaaatggacagctgcttttgacaataatgcccctcccaacttcccattcatagaatcataaagcgatatgtttcagaactgagagagaaaagtttaccttttattccaaatgcctcgtactcggtttaagtccagactcaggtcataaatcaaagacagttttgcacgttgctcttcacctaaatctagcagtttccctgaggccctatgagggcatggacagaaaatgaaggatgcaaccacccaggacagctccctggtttgggctggcctggccacgtgtggtcacatgtcctgggatctgtgtttactgtgtccttgctctccttccttgcagaagctgctaagctctgctcctcctaactgcaggtctcaaaccctattgggtcattttgccacactatttctccaaaggcccatagtcattacattttttaccatttcaccaagataacagggggggtctggaattcccctgctaggaagggccccttttcctatatcaccgtgatggtacagatgaactgagatgaaacttttagacttcagcacgtcacacatcctggttgtataaccaggaggtctgcagagctgcaacccctgaagaacatctgtcttaaaagacctcaaatcagaacattctcattggcctcttcagtgatccccatggagctaagagtccgtaacctaaaggccttaccatagccatcttccctccacacctgattgctcaactgccccagaaggggagaatctatctgaaatagaaaagaagcattaaggaccaggtgcggtggctcacacctataatcccagcactttgggaggccaaggcaggtggatcacttaagatcaggagttcaagaccagcctggccaacgtggtgaaaccccatctctactaaaaaaaaaaaatacaaaaattagccaagcatggtgtcgggcacctgtaatcctagctactctggaggctgaggagggagaatcacttgaaccctggaggcggaggctgcagtgagctgagatcgcgccactgcactccagcctgggcaacagagcaaaacttcatctcaaaaaataattttaaaaaagaaacattattcaccagctaagacttttcaatttaaattatttaaagtgacagcaacatagaggagaatttgggctgcctcttaccgacccagtctccatgataatttgagtgtcacaactgttcagcttcacttcatacttgctttgactaagtcactcgggattgtcctcaattttttggccctgccataaataggtgtatgttagtccgttttgcattgctataaaggaataccttaacactgggtaatttataaagaaaagaggtttatttggctcgcagttctgcaggctgtttgagcaaggtatcaacatctgcttggcttctggtgagacctcagaaagctttgacccatggtggaaggtgaagggggagcaggcacgtcacacagcaagaacaggagcaagagagaggagaagaggtgccagtctccttttcttaacaacccgcaattgcatgaactaataaagtaagaattcactcattactacagggagggcaccgagtcattcatgaggaatctgtccctatgacccaaatatctcccagcaggccccacctccagcactggagatcaacatgaaatttggggggaacaaatatccagcctctatgattggtttggagcaatgagatcaattacaccaacaagccaagcatttctcttagtatcctatggtcattgctaatgcatatggtcattttgacagctgtggtttctccttcatattcatttgggactcttcatagggtctcgagagacatgacaatactgttcaaaacgtctccaaggcaaaattaattttattccgttgactggaaatatatcacaaagaatgaggtttttccagtcccacccacaagacagtcctctgaaagtggaaaagcttgcccggccacctgcccctaccctgaccttggggtagttcatcagttgagcacaacccccatgccgggcatagactcacccatctcttttcctcaggtgtgatgggttggctttcaaactagtgtttctcgcactgttagaagttattgtccaagtggaaaggatgcagaggctggaattttccagtgggatagaagagcaggctaattaggaaggaatattccagggaatgcaaggtgcaactgcgatattgctccatccctggacctgagggagacaaagaaagttcttaaagggctgcagatgctgtcctctgaaggtcttctctggatcgctggcctactttggaaacatgcaggccattgagtgccatggggctgcccatcagtctgatccacacgaaaggctctgtgcatttcaagagcaggctggtagctcgccattcctgggaggatgctgacatctgtcaagcccagaatgcctctctcagggctctcagacctgttaaactgaggccaggagagcagaagaaagaactcaaagtgtggacggtactaccagctggagaaagcccaggagccaggactcttccacccactatctaggttatgttgagtgacattcctccctggcttcaggtttctctaaagccagaggaaaagtaaaccagacaagccctcccatctattttgtctgaaacaagatggagtgaatgctccctactgagagggtctggatttcacccatgaattgcactaggaactgggagctcctttttgaacacaagtcccaagaggcagttgtgataaagtctctcttttggtgtccgctgtctgtaaatgaaacaatgcaaattggtgtatgttaaatgtgtcacagcttgcaggcaagaggttttgtttattctctaaggacttgctgactcgagggagcatcaaagatgagctttctgtctgtcttggcaagtgtgaaaataaagggagtcagtcacctccccaaaggtcatgtgaatcagaattcaggagaaagttggaggaaacaatggcagattccaagaagagatgcttgtttctccatttgagaaagccttactgaaagctactgaataaagagcacaatttccagttatttctttctttgcttttttttttttctggccactataacagcacttccagtatatgttgatagtagcttgtaattattcctaataccccagaaagaagagagtcgtgatctttggtgattgtgaggaattagattaacagtcgcgggggaccggctacctgcgacagccctttaaatggctaatgagggatgctgagtgctgagcggtgcctgcttttgatgtggcccacccatgaccagggagagagggcaggaagagagcagctgcaggatccacaagtctctaacccttctgccccaggcaacataaaaccctagattcttgttctttttccctcttcctaaagtagactgacgtcccagtaattgtttttctaacaagccctgttgttctccctgggaaagacctagattggccaagaaaggatcctgtcagctcctggtggagagttgcacaagccagtggctctcaactctctccaaggaaaattaaagcatattttctctttcttagctcaaaatcagctttcaggggtccttattggggtctgattttcttccccagttctgaatccaggaagaagctttttctccaaggaccaaccaaaaacaatgactttggagaaaaattagactcagaaagtctgtccaggcattgggttggtgaactgtcaactgttggatggggaggaggggtcgctgtgatcgtagcggtcattagacttgggacgtgagttgtctctcaaagcacagtagtaaatgactgtattttgtatattgcccccaatatgttgggtgtaaatagaagcacagctggggattgatcatggccaggacgattggagcttggcagctctcatatccagaataagccactaagacggaactcatcaatcaccatcttcccatttacctcattagcatcccattttctctcattcagtattagttgatgatttctgctattaagtgatgagaaagtcagcagactagtcaaaaaagaatctttatataaaatgtacatattaatataaattaacttagcatgcaacttaccgatcaaatgaagtatatattattaatatgttatcttagtgtataaaggaaaactgccatatttaccagatgttttctttaaccgaacttgtctgtaaatatataatctgtataaaaagagtctaatttaccattatttatgcaatagaaaaaataaaagtttttttttcttttga

SEQ ID NO: 113535 - DNA, 9459 bp, Homo sapiens
  Payload ID: 2194
  Gene Symbol: CALN1
  Gene Name: calneuron 1
  Uniprot ID: Q9BXU9
  ENST ID: ENST00000395275
  CDS Start-End: 390-1175
aagagaataaaagctggctccccgagcccgctggggaagctcgctggggtgctatccgcttgagtttgtgtttttttctttcctgcttcttaataaagcttactgcttactctgggtccgcgccacctttaaagctcacggccgcggtctgcgtcttcgttcttgaagtcagcaagaccgcaagcccaccgggaggagcagacgactccggacgcgccatctttaagagctgtaacactcaccgcgaggtccgtggttttattcttaaagtcggcgagaccaacaacccagcagaaggaataaattccgcacacagagtctcagtgccttcgctgacgttcctttgatgagcttctaactctctctgagaacatcgccctggacccccgatgcggctgccagagcaacccggagaggggaagcccgagaatgagaaaaagggggacggaggagccctcggagggggagaggagccgccgaggagccaggcccccgacttccccacctgggaaaagatgccgttccaccatgtgaccgccggcttgttgtacaaggggaattacctcaaccgatcgctctctgctggcagtgacagcgaacagctggctaatatctccgtggaggagctcgatgaaatccgagaggcctttcgggttctggaccgggatgggaacggcttcatctccaagcaggagctgggcatggccatgcgctctttggggtacatgccaagcgaggtggagctggccatcatcatgcagcgcttggacatggacggggatggccaggtggattttgatgaattcatgaccattcttggccccaaactggtgtcttcagaaggtcgcgatggttttcttgggaacacgatagacagcatattctggcagtttgacatgcaaaggataactctggaagagttgaagcacattctctatcatgccttccgagaccacctaacgatgaaggacattgagaacatcattatcaatgaggaagagagcctgaatgagacctcggggaactgccaaacagagtttgaaggagtgcattcccagaagcagaacagacagacctgcgtccggaagagcctcatatgcgcctttgctatggccttcatcatcagtgtcatgctgattgcagccaaccagatactccggagcggcatggagtagcagcctcccgccagccacactgtgttgcagctcaccgcgcatgtgcatgccgtgcgggcagactcttcctccacacagcagacacggacctatggactatggatggatgcggacgatggaaccgttcagtaaagaacccaaggttgagtgcaactggggttgcacttcagcttcatctccttggcagggacactaaagggctgtcttcagtgctttaatggttttgttttctaatgcaataaatcgccaggatttccaaattattgcttcaaccatcagtcataactctagagaaaaacttcatcttcatctcggaattccagcagccatccaggtataatggtgagagagcaagagagaggcatgaacacacagtcacctccactccccattctttcaacccaagggtcaacaggagactctctgctgaggtcaaccctcagttccaagaggctgacttcagggttgccacagaagagggggctttccatcccaccctggcttccttcctccacccagtggagacccccccaaggcatgaggggaaagccattaagtggggtgcagccctggcggtcttcagctgcacccctcaccgcttccgttcttactgccttttctagaggactgccattggtagagctggggtgctctcagtttccgtcggcacttggctttctgttcctagagcccatcccgcaccagcattttggaacctgcagagagcctttctcccagctttgccgcctgtgctgccattagagaaaaaaagaagcataatcgtgggcatctctataacatagacagatatatatatttggcttcttcgtgtgtgatgtcattcttccctaatcgcttacacctaatataagcttgtcctccctcccacactcatccctgcttctttggggcaggggtgaggcaggttgaggggggaggggactgggactggcggtgaggttttgatacccacacccagccatctggagtcatggagacccaccacgtctctatgccggatgacctttgtaagttaaggtccttgtgcatcttacctttcccttaccttggagtttgctttgttagtcttccccagctaaaaagagaaatgcaatccaaaatggaaagatggagagatcaaacgactgtattttcacataagatcttctggccttcagattctgcaactgactcattttcaggaggttgggggaaaagatgtttatgagtttagccaacagaacaggtaatttactcctgcctgcagaatacttttcgttggggaagagaactgaatccaaggatctgttttcaacaccattccaagtctgtaatttcctgacttttcctagatgtcagccactactatgaattcaagcttgtgtagtcagattagccagtaatctctagatgtaatagttccctttgtacttttccaagctcaggtctttattttgtaatggaattaccttgctcctacttcttttgattacatcctaaaactacatgcttccccccttccagtagcgagccaccagaagctttcttgtctctatgcagtgggtaggattttttggtgcgttgtgtgttcctgatctccctccctgtcttcctgctcagctttctccctactgccttttcagacttggagcacccaaggtctccaatgaaagttttctcattcacctctgcaagtgctactggcaacagcctgagggcagctgtagaaactttccctctgtgggagactatgaatattcctgatgagcacaagtaaaactaaggcttcagccataatatggaggagggagcagatgtaagctcccaagagcctgggggatcacaggtccctctgcaaaacttcctggagttcagcccagcaaggccagaccaaggaggcagcaacctgcctttcccccttacctgccctgctgcctgcacactgcatgcctgccccttctgctgctcctgttggctgactcaccactgtccccttaggattggaattctcaactagaaccggtccaaatgcagaatattaatacatcgaacaacttcatccttaatctctgccctgggcagtttgccctctcccatctggacttagatgggagggcatagcagatcttgaagggatatactttcctgtttttccctgacccccgaaccacccaaccacatccataggggtgcaggaccctaagtagactgggtagaaaccccagggatgattcttcaaagccccctcctccatgagaggggactgaaatgctgcagctgaggctggtcttcagggcagaaaatgagtacttctttgaaggtggcttttctgcgagttcttctgcctcctgctggagaacagagacccttcaagaggtgagggttagatttcattggcagagagattagccactgtgcaggagtagggaggaaaaggagttctggagaggcgccgccatcctgttttctggaaaggctgcaggattcctttcctaacggtgaccttcttcttgctcccagtgacctggaagcaagcccaccctccccaggggaaaatctaggagaatgcattcctctgcagactgctagagagagatggcaagaaggaagacacagaattctttctgacagcctaggagttatcttcccactgtggtaaccccccatgtggcacccagggactgaaggacacagtgcgtggagacggccctgagctagcggcattccttagacttcaggagctcagagtttgtcccggtgacttgcaccctggctgctttgcttggacagtttgtcttgggtatagggaagccttccttgtcaggcagccaactcccagccctgttcacacaaattttatgctagggccccatgccagtcagtgtccccatcatggtggctatgaagctcacggctgaagattccagaaggtcctggtctcccatgcccaagggatgccatgtagccccagctggaagtgacttccgcaggaattgagagggaatagctcacccctcattctgtcctccggacttaggaaccagtgaccttggctgcccaactgtgtggaggctgagtgattgacaaacacaggttggctcattcttgctgcaagagcaggtaccccccgccgcccccctggaaagcacaagtgatgagcaagaaggcattttccttgggagagaaggggaaatggaccctgacccccttgatccccaaagaagctgcgccccacctttccagatacccacaaagcccccagacagaatctagcatcgggactattagcaatggcttccagaatgtgcttgggtcccacgtgactgatctgacaaaaaaaaaagagggatattaccatggcaacccttgcattccaccctgagtttgccaaggcacacaaaaatagggaacattttcttaaagaacactccaattcagcctgagtgcaacctgactctctgcatctgtatcctgctgggagaggcaattacccttaaagaatctgggtggtatctctgcctttttgtctggcatttgaacttgtccttctatttactcaggagagcaggagctacctgtaagccctggtatctccccatccctactcccagccccttctcccagggtccagagccaggaccccttaatctaggtaaattgacagaaatatcatcttggaaggcaaacaagatattaagcctccaatctttaaaagtatcggtttgcctgttgagcacactcctgcaagccaaacacgtgaactttggtgaactgaggtttaggtgtggtcttaggcaaacccagtggtttcagaaatgtctgggtgttttatttgcagagaacaagatgtgtcttatgagtcttctttctcaatacctgccctgtctcaaatctcacttgacaaatggtctacgatcttgcagttatccaaaagagcctatgaaaaatggacagctgcttttgacaataatgcccctcccaacttcccattcatagaatcataaagcgatatgtttcagaactgagagagaaaagtttaccttttattccaaatgcctcgtactcggtttaagtccagactcaggtcataaatcaaagacagttttgcacgttgctcttcacctaaatctagcagtttccctgaggccctatgagggcatggacagaaaatgaaggatgcaaccacccaggacagctccctggtttgggctggcctggccacgtgtggtcacatgtcctgggatctgtgtttactgtgtccttgctctccttccttgcagaagctgctaagctctgctcctcctaactgcaggtctcaaaccctattgggtcattttgccacactatttctccaaaggcccatagtcattacattttttaccatttcaccaagataacagggggggtctggaattcccctgctaggaagggccccttttcctatatcaccgtgatggtacagatgaactgagatgaaacttttagacttcagcacgtcacacatcctggttgtataaccaggaggtctgcagagctgcaacccctgaagaacatctgtcttaaaagacctcaaatcagaacattctcattggcctcttcagtgatccccatggagctaagagtccgtaacctaaaggccttaccatagccatcttccctccacacctgattgctcaactgccccagaaggggagaatctatctgaaatagaaaagaagcattaaggaccaggtgcggtggctcacacctataatcccagcactttgggaggccaaggcaggtggatcacttaagatcaggagttcaagaccagcctggccaacgtggtgaaaccccatctctactaaaaaaaaaaaatacaaaaattagccaagcatggtgtcgggcacctgtaatcctagctactctggaggctgaggagggagaatcacttgaaccctggaggcggaggctgcagtgagctgagatcgcgccactgcactccagcctgggcaacagagcaaaacttcatctcaaaaaataattttaaaaaagaaacattattcaccagctaagacttttcaatttaaattatttaaagtgacagcaacatagaggagaatttgggctgcctcttaccgacccagtctccatgataatttgagtgtcacaactgttcagcttcacttcatacttgctttgactaagtcactcgggattgtcctcaattttttggccctgccataaataggtgtatgttagtccgttttgcattgctataaaggaataccttaacactgggtaatttataaagaaaagaggtttatttggctcgcagttctgcaggctgtttgagcaaggtatcaacatctgcttggcttctggtgagacctcagaaagctttgacccatggtggaaggtgaagggggagcaggcacgtcacacagcaagaacaggagcaagagagaggagaagaggtgccagtctccttttcttaacaacccgcaattgcatgaactaataaagtaagaattcactcattactacagggagggcaccgagtcattcatgaggaatctgtccctatgacccaaatatctcccagcaggccccacctccagcactggagatcaacatgaaatttggggggaacaaatatccagcctctatgattggtttggagcaatgagatcaattacaccaacaagccaagcatttctcttagtatcctatggtcattgctaatgcatatggtcattttgacagctgtggtttctccttcatattcatttgggactcttcatagggtctcgagagacatgacaatactgttcaaaacgtctccaaggcaaaattaattttattccgttgactggaaatatatcacaaagaatgaggtttttccagtcccacccacaagacagtcctctgaaagtggaaaagcttgcccggccacctgcccctaccctgaccttggggtagttcatcagttgagcacaacccccatgccgggcatagactcacccatctcttttcctcaggtgtgatgggttggctttcaaactagtgtttctcgcactgttagaagttattgtccaagtggaaaggatgcagaggctggaattttccagtgggatagaagagcaggctaattaggaaggaatattccagggaatgcaaggtgcaactgcgatattgctccatccctggacctgagggagacaaagaaagttcttaaagggctgcagatgctgtcctctgaaggtcttctctggatcgctggcctactttggaaacatgcaggccattgagtgccatggggctgcccatcagtctgatccacacgaaaggctctgtgcatttcaagagcaggctggtagctcgccattcctgggaggatgctgacatctgtcaagcccagaatgcctctctcagggctctcagacctgttaaactgaggccaggagagcagaagaaagaactcaaagtgtggacggtactaccagctggagaaagcccaggagccaggactcttccacccactatctaggttatgttgagtgacattcctccctggcttcaggtttctctaaagccagaggaaaagtaaaccagacaagccctcccatctattttgtctgaaacaagatggagtgaatgctccctactgagagggtctggatttcacccatgaattgcactaggaactgggagctcctttttgaacacaagtcccaagaggcagttgtgataaagtctctcttttggtgtccgctgtctgtaaatgaaacaatgcaaattggtgtatgttaaatgtgtcacagcttgcaggcaagaggttttgtttattctctaaggacttgctgactcgagggagcatcaaagatgagctttctgtctgtcttggcaagtgtgaaaataaagggagtcagtcacctccccaaaggtcatgtgaatcagaattcaggagaaagttggaggaaacaatggcagattccaagaagagatgcttgtttctccatttgagaaagccttactgaaagctactgaataaagagcacaatttccagttatttctttctttgcttttttttttttctggccactataacagcacttccagtatatgttgatagtagcttgtaattattcctaataccccagaaagaagagagtcgtgatctttggtgattgtgaggaattagattaacagtcgcgggggaccggctacctgcgacagccctttaaatggctaatgagggatgctgagtgctgagcggtgcctgcttttgatgtggcccacccatgaccagggagagagggcaggaagagagcagctgcaggatccacaagtctctaacccttctgccccaggcaacataaaaccctagattcttgttctttttccctcttcctaaagtagactgacgtcccagtaattgtttttctaacaagccctgttgttctccctgggaaagacctagattggccaagaaaggatcctgtcagctcctggtggagagttgcacaagccagtggctctcaactctctccaaggaaaattaaagcatattttctctttcttagctcaaaatcagctttcaggggtccttattggggtctgattttcttccccagttctgaatccaggaagaagctttttctccaaggaccaaccaaaaacaatgactttggagaaaaattagactcagaaagtctgtccaggcattgggttggtgaactgtcaactgttggatggggaggaggggtcgctgtgatcgtagcggtcattagacttgggacgtgagttgtctctcaaagcacagtagtaaatgactgtattttgtatattgcccccaatatgttgggtgtaaatagaagcacagctggggattgatcatggccaggacgattggagcttggcagctctcatatccagaataagccactaagacggaactcatcaatcaccatcttcccatttacctcattagcatcccattttctctcattcagtattagttgatgatttctgctattaagtgatgagaaagtcagcagactagtcaaaaaagaatctttatataaaatgtacatattaatataaattaacttagcatgcaacttaccgatcaaatgaagtatatattattaatatgttatcttagtgtataaaggaaaactgccatatttaccagatgttttctttaaccgaacttgtctgtaaatatataatctgtataaaaagagtctaatttaccattatttatgcaatagaaaaaataaaagtttttttttcttttga

SEQ ID NO: 113536 - DNA, 9189 bp, Homo sapiens
  Payload ID: 2194
  Gene Symbol: CALN1
  Gene Name: calneuron 1
  Uniprot ID: Q9BXU9
  ENST ID: ENST00000395276
  CDS Start-End: 246-905
tcccccgagatcagcaggagcttactgcttactctgggtccgcgccacctttaaagctcacggccgcggtctgcgtcttcgttcttgaagtcagcaagaccgcaagcccaccgggaggagcagacgactccggacgcgccatctttaagagctgtaacactcaccgcgaggtccgtggttttattcttaaagtcggcgagaccaacaacccagcagaaggaataaattccgcacacagggaaaagatgccgttccaccatgtgaccgccggcttgttgtacaaggggaattacctcaaccgatcgctctctgctggcagtgacagcgaacagctggctaatatctccgtggaggagctcgatgaaatccgagaggcctttcgggttctggaccgggatgggaacggcttcatctccaagcaggagctgggcatggccatgcgctctttggggtacatgccaagcgaggtggagctggccatcatcatgcagcgcttggacatggacggggatggccaggtggattttgatgaattcatgaccattcttggccccaaactggtgtcttcagaaggtcgcgatggttttcttgggaacacgatagacagcatattctggcagtttgacatgcaaaggataactctggaagagttgaagcacattctctatcatgccttccgagaccacctaacgatgaaggacattgagaacatcattatcaatgaggaagagagcctgaatgagacctcggggaactgccaaacagagtttgaaggagtgcattcccagaagcagaacagacagacctgcgtccggaagagcctcatatgcgcctttgctatggccttcatcatcagtgtcatgctgattgcagccaaccagatactccggagcggcatggagtagcagcctcccgccagccacactgtgttgcagctcaccgcgcatgtgcatgccgtgcgggcagactcttcctccacacagcagacacggacctatggactatggatggatgcggacgatggaaccgttcagtaaagaacccaaggttgagtgcaactggggttgcacttcagcttcatctccttggcagggacactaaagggctgtcttcagtgctttaatggttttgttttctaatgcaataaatcgccaggatttccaaattattgcttcaaccatcagtcataactctagagaaaaacttcatcttcatctcggaattccagcagccatccaggtataatggtgagagagcaagagagaggcatgaacacacagtcacctccactccccattctttcaacccaagggtcaacaggagactctctgctgaggtcaaccctcagttccaagaggctgacttcagggttgccacagaagagggggctttccatcccaccctggcttccttcctccacccagtggagacccccccaaggcatgaggggaaagccattaagtggggtgcagccctggcggtcttcagctgcacccctcaccgcttccgttcttactgccttttctagaggactgccattggtagagctggggtgctctcagtttccgtcggcacttggctttctgttcctagagcccatcccgcaccagcattttggaacctgcagagagcctttctcccagctttgccgcctgtgctgccattagagaaaaaaagaagcataatcgtgggcatctctataacatagacagatatatatatttggcttcttcgtgtgtgatgtcattcttccctaatcgcttacacctaatataagcttgtcctccctcccacactcatccctgcttctttggggcaggggtgaggcaggttgaggggggaggggactgggactggcggtgaggttttgatacccacacccagccatctggagtcatggagacccaccacgtctctatgccggatgacctttgtaagttaaggtccttgtgcatcttacctttcccttaccttggagtttgctttgttagtcttccccagctaaaaagagaaatgcaatccaaaatggaaagatggagagatcaaacgactgtattttcacataagatcttctggccttcagattctgcaactgactcattttcaggaggttgggggaaaagatgtttatgagtttagccaacagaacaggtaatttactcctgcctgcagaatacttttcgttggggaagagaactgaatccaaggatctgttttcaacaccattccaagtctgtaatttcctgacttttcctagatgtcagccactactatgaattcaagcttgtgtagtcagattagccagtaatctctagatgtaatagttccctttgtacttttccaagctcaggtctttattttgtaatggaattaccttgctcctacttcttttgattacatcctaaaactacatgcttccccccttccagtagcgagccaccagaagctttcttgtctctatgcagtgggtaggattttttggtgcgttgtgtgttcctgatctccctccctgtcttcctgctcagctttctccctactgccttttcagacttggagcacccaaggtctccaatgaaagttttctcattcacctctgcaagtgctactggcaacagcctgagggcagctgtagaaactttccctctgtgggagactatgaatattcctgatgagcacaagtaaaactaaggcttcagccataatatggaggagggagcagatgtaagctcccaagagcctgggggatcacaggtccctctgcaaaacttcctggagttcagcccagcaaggccagaccaaggaggcagcaacctgcctttcccccttacctgccctgctgcctgcacactgcatgcctgccccttctgctgctcctgttggctgactcaccactgtccccttaggattggaattctcaactagaaccggtccaaatgcagaatattaatacatcgaacaacttcatccttaatctctgccctgggcagtttgccctctcccatctggacttagatgggagggcatagcagatcttgaagggatatactttcctgtttttccctgacccccgaaccacccaaccacatccataggggtgcaggaccctaagtagactgggtagaaaccccagggatgattcttcaaagccccctcctccatgagaggggactgaaatgctgcagctgaggctggtcttcagggcagaaaatgagtacttctttgaaggtggcttttctgcgagttcttctgcctcctgctggagaacagagacccttcaagaggtgagggttagatttcattggcagagagattagccactgtgcaggagtagggaggaaaaggagttctggagaggcgccgccatcctgttttctggaaaggctgcaggattcctttcctaacggtgaccttcttcttgctcccagtgacctggaagcaagcccaccctccccaggggaaaatctaggagaatgcattcctctgcagactgctagagagagatggcaagaaggaagacacagaattctttctgacagcctaggagttatcttcccactgtggtaaccccccatgtggcacccagggactgaaggacacagtgcgtggagacggccctgagctagcggcattccttagacttcaggagctcagagtttgtcccggtgacttgcaccctggctgctttgcttggacagtttgtcttgggtatagggaagccttccttgtcaggcagccaactcccagccctgttcacacaaattttatgctagggccccatgccagtcagtgtccccatcatggtggctatgaagctcacggctgaagattccagaaggtcctggtctcccatgcccaagggatgccatgtagccccagctggaagtgacttccgcaggaattgagagggaatagctcacccctcattctgtcctccggacttaggaaccagtgaccttggctgcccaactgtgtggaggctgagtgattgacaaacacaggttggctcattcttgctgcaagagcaggtaccccccgccgcccccctggaaagcacaagtgatgagcaagaaggcattttccttgggagagaaggggaaatggaccctgacccccttgatccccaaagaagctgcgccccacctttccagatacccacaaagcccccagacagaatctagcatcgggactattagcaatggcttccagaatgtgcttgggtcccacgtgactgatctgacaaaaaaaaaagagggatattaccatggcaacccttgcattccaccctgagtttgccaaggcacacaaaaatagggaacattttcttaaagaacactccaattcagcctgagtgcaacctgactctctgcatctgtatcctgctgggagaggcaattacccttaaagaatctgggtggtatctctgcctttttgtctggcatttgaacttgtccttctatttactcaggagagcaggagctacctgtaagccctggtatctccccatccctactcccagccccttctcccagggtccagagccaggaccccttaatctaggtaaattgacagaaatatcatcttggaaggcaaacaagatattaagcctccaatctttaaaagtatcggtttgcctgttgagcacactcctgcaagccaaacacgtgaactttggtgaactgaggtttaggtgtggtcttaggcaaacccagtggtttcagaaatgtctgggtgttttatttgcagagaacaagatgtgtcttatgagtcttctttctcaatacctgccctgtctcaaatctcacttgacaaatggtctacgatcttgcagttatccaaaagagcctatgaaaaatggacagctgcttttgacaataatgcccctcccaacttcccattcatagaatcataaagcgatatgtttcagaactgagagagaaaagtttaccttttattccaaatgcctcgtactcggtttaagtccagactcaggtcataaatcaaagacagttttgcacgttgctcttcacctaaatctagcagtttccctgaggccctatgagggcatggacagaaaatgaaggatgcaaccacccaggacagctccctggtttgggctggcctggccacgtgtggtcacatgtcctgggatctgtgtttactgtgtccttgctctccttccttgcagaagctgctaagctctgctcctcctaactgcaggtctcaaaccctattgggtcattttgccacactatttctccaaaggcccatagtcattacattttttaccatttcaccaagataacagggggggtctggaattcccctgctaggaagggccccttttcctatatcaccgtgatggtacagatgaactgagatgaaacttttagacttcagcacgtcacacatcctggttgtataaccaggaggtctgcagagctgcaacccctgaagaacatctgtcttaaaagacctcaaatcagaacattctcattggcctcttcagtgatccccatggagctaagagtccgtaacctaaaggccttaccatagccatcttccctccacacctgattgctcaactgccccagaaggggagaatctatctgaaatagaaaagaagcattaaggaccaggtgcggtggctcacacctataatcccagcactttgggaggccaaggcaggtggatcacttaagatcaggagttcaagaccagcctggccaacgtggtgaaaccccatctctactaaaaaaaaaaaatacaaaaattagccaagcatggtgtcgggcacctgtaatcctagctactctggaggctgaggagggagaatcacttgaaccctggaggcggaggctgcagtgagctgagatcgcgccactgcactccagcctgggcaacagagcaaaacttcatctcaaaaaataattttaaaaaagaaacattattcaccagctaagacttttcaatttaaattatttaaagtgacagcaacatagaggagaatttgggctgcctcttaccgacccagtctccatgataatttgagtgtcacaactgttcagcttcacttcatacttgctttgactaagtcactcgggattgtcctcaattttttggccctgccataaataggtgtatgttagtccgttttgcattgctataaaggaataccttaacactgggtaatttataaagaaaagaggtttatttggctcgcagttctgcaggctgtttgagcaaggtatcaacatctgcttggcttctggtgagacctcagaaagctttgacccatggtggaaggtgaagggggagcaggcacgtcacacagcaagaacaggagcaagagagaggagaagaggtgccagtctccttttcttaacaacccgcaattgcatgaactaataaagtaagaattcactcattactacagggagggcaccgagtcattcatgaggaatctgtccctatgacccaaatatctcccagcaggccccacctccagcactggagatcaacatgaaatttggggggaacaaatatccagcctctatgattggtttggagcaatgagatcaattacaccaacaagccaagcatttctcttagtatcctatggtcattgctaatgcatatggtcattttgacagctgtggtttctccttcatattcatttgggactcttcatagggtctcgagagacatgacaatactgttcaaaacgtctccaaggcaaaattaattttattccgttgactggaaatatatcacaaagaatgaggtttttccagtcccacccacaagacagtcctctgaaagtggaaaagcttgcccggccacctgcccctaccctgaccttggggtagttcatcagttgagcacaacccccatgccgggcatagactcacccatctcttttcctcaggtgtgatgggttggctttcaaactagtgtttctcgcactgttagaagttattgtccaagtggaaaggatgcagaggctggaattttccagtgggatagaagagcaggctaattaggaaggaatattccagggaatgcaaggtgcaactgcgatattgctccatccctggacctgagggagacaaagaaagttcttaaagggctgcagatgctgtcctctgaaggtcttctctggatcgctggcctactttggaaacatgcaggccattgagtgccatggggctgcccatcagtctgatccacacgaaaggctctgtgcatttcaagagcaggctggtagctcgccattcctgggaggatgctgacatctgtcaagcccagaatgcctctctcagggctctcagacctgttaaactgaggccaggagagcagaagaaagaactcaaagtgtggacggtactaccagctggagaaagcccaggagccaggactcttccacccactatctaggttatgttgagtgacattcctccctggcttcaggtttctctaaagccagaggaaaagtaaaccagacaagccctcccatctattttgtctgaaacaagatggagtgaatgctccctactgagagggtctggatttcacccatgaattgcactaggaactgggagctcctttttgaacacaagtcccaagaggcagttgtgataaagtctctcttttggtgtccgctgtctgtaaatgaaacaatgcaaattggtgtatgttaaatgtgtcacagcttgcaggcaagaggttttgtttattctctaaggacttgctgactcgagggagcatcaaagatgagctttctgtctgtcttggcaagtgtgaaaataaagggagtcagtcacctccccaaaggtcatgtgaatcagaattcaggagaaagttggaggaaacaatggcagattccaagaagagatgcttgtttctccatttgagaaagccttactgaaagctactgaataaagagcacaatttccagttatttctttctttgcttttttttttttctggccactataacagcacttccagtatatgttgatagtagcttgtaattattcctaataccccagaaagaagagagtcgtgatctttggtgattgtgaggaattagattaacagtcgcgggggaccggctacctgcgacagccctttaaatggctaatgagggatgctgagtgctgagcggtgcctgcttttgatgtggcccacccatgaccagggagagagggcaggaagagagcagctgcaggatccacaagtctctaacccttctgccccaggcaacataaaaccctagattcttgttctttttccctcttcctaaagtagactgacgtcccagtaattgtttttctaacaagccctgttgttctccctgggaaagacctagattggccaagaaaggatcctgtcagctcctggtggagagttgcacaagccagtggctctcaactctctccaaggaaaattaaagcatattttctctttcttagctcaaaatcagctttcaggggtccttattggggtctgattttcttccccagttctgaatccaggaagaagctttttctccaaggaccaaccaaaaacaatgactttggagaaaaattagactcagaaagtctgtccaggcattgggttggtgaactgtcaactgttggatggggaggaggggtcgctgtgatcgtagcggtcattagacttgggacgtgagttgtctctcaaagcacagtagtaaatgactgtattttgtatattgcccccaatatgttgggtgtaaatagaagcacagctggggattgatcatggccaggacgattggagcttggcagctctcatatccagaataagccactaagacggaactcatcaatcaccatcttcccatttacctcattagcatcccattttctctcattcagtattagttgatgatttctgctattaagtgatgagaaagtcagcagactagtcaaaaaagaatctttatataaaatgtacatattaatataaattaacttagcatgcaacttaccgatcaaatgaagtatatattattaatatgttatcttagtgtataaaggaaaactgccatatttaccagatgttttctttaaccgaacttgtctgtaaatatataatctgtataaaaagagtctaatttaccattatttatgcaatagaaaaaataaaagtttttttttcttttga

SEQ ID NO: 113537 - DNA, 8571 bp, Homo sapiens
  Payload ID: 2194
  Gene Symbol: CALN1
  Gene Name: calneuron 1
  ENST ID: ENST00000405452
  CDS Start-End: 1-288
cagtttgacatgcaaaggataactctggaagagttgaagcacattctctatcatgccttccgagaccacctaacgatgaaggacattgagaacatcattatcaatgaggaagagagcctgaatgagacctcggggaactgccaaacagagtttgaaggagtgcattcccagaagcagaacagacagacctgcgtccggaagagcctcatatgcgcctttgctatggccttcatcatcagtgtcatgctgattgcagccaaccagatactccggagcggcatggagtagcagcctcccgccagccacactgtgttgcagctcaccgcgcatgtgcatgccgtgcgggcagactcttcctccacacagcagacacggacctatggactatggatggatgcggacgatggaaccgttcagtaaagaacccaaggttgagtgcaactggggttgcacttcagcttcatctccttggcagggacactaaagggctgtcttcagtgctttaatggttttgttttctaatgcaataaatcgccaggatttccaaattattgcttcaaccatcagtcataactctagagaaaaacttcatcttcatctcggaattccagcagccatccaggtataatggtgagagagcaagagagaggcatgaacacacagtcacctccactccccattctttcaacccaagggtcaacaggagactctctgctgaggtcaaccctcagttccaagaggctgacttcagggttgccacagaagagggggctttccatcccaccctggcttccttcctccacccagtggagacccccccaaggcatgaggggaaagccattaagtggggtgcagccctggcggtcttcagctgcacccctcaccgcttccgttcttactgccttttctagaggactgccattggtagagctggggtgctctcagtttccgtcggcacttggctttctgttcctagagcccatcccgcaccagcattttggaacctgcagagagcctttctcccagctttgccgcctgtgctgccattagagaaaaaaagaagcataatcgtgggcatctctataacatagacagatatatatatttggcttcttcgtgtgtgatgtcattcttccctaatcgcttacacctaatataagcttgtcctccctcccacactcatccctgcttctttggggcaggggtgaggcaggttgaggggggaggggactgggactggcggtgaggttttgatacccacacccagccatctggagtcatggagacccaccacgtctctatgccggatgacctttgtaagttaaggtccttgtgcatcttacctttcccttaccttggagtttgctttgttagtcttccccagctaaaaagagaaatgcaatccaaaatggaaagatggagagatcaaacgactgtattttcacataagatcttctggccttcagattctgcaactgactcattttcaggaggttgggggaaaagatgtttatgagtttagccaacagaacaggtaatttactcctgcctgcagaatacttttcgttggggaagagaactgaatccaaggatctgttttcaacaccattccaagtctgtaatttcctgacttttcctagatgtcagccactactatgaattcaagcttgtgtagtcagattagccagtaatctctagatgtaatagttccctttgtacttttccaagctcaggtctttattttgtaatggaattaccttgctcctacttcttttgattacatcctaaaactacatgcttccccccttccagtagcgagccaccagaagctttcttgtctctatgcagtgggtaggattttttggtgcgttgtgtgttcctgatctccctccctgtcttcctgctcagctttctccctactgccttttcagacttggagcacccaaggtctccaatgaaagttttctcattcacctctgcaagtgctactggcaacagcctgagggcagctgtagaaactttccctctgtgggagactatgaatattcctgatgagcacaagtaaaactaaggcttcagccataatatggaggagggagcagatgtaagctcccaagagcctgggggatcacaggtccctctgcaaaacttcctggagttcagcccagcaaggccagaccaaggaggcagcaacctgcctttcccccttacctgccctgctgcctgcacactgcatgcctgccccttctgctgctcctgttggctgactcaccactgtccccttaggattggaattctcaactagaaccggtccaaatgcagaatattaatacatcgaacaacttcatccttaatctctgccctgggcagtttgccctctcccatctggacttagatgggagggcatagcagatcttgaagggatatactttcctgtttttccctgacccccgaaccacccaaccacatccataggggtgcaggaccctaagtagactgggtagaaaccccagggatgattcttcaaagccccctcctccatgagaggggactgaaatgctgcagctgaggctggtcttcagggcagaaaatgagtacttctttgaaggtggcttttctgcgagttcttctgcctcctgctggagaacagagacccttcaagaggtgagggttagatttcattggcagagagattagccactgtgcaggagtagggaggaaaaggagttctggagaggcgccgccatcctgttttctggaaaggctgcaggattcctttcctaacggtgaccttcttcttgctcccagtgacctggaagcaagcccaccctccccaggggaaaatctaggagaatgcattcctctgcagactgctagagagagatggcaagaaggaagacacagaattctttctgacagcctaggagttatcttcccactgtggtaaccccccatgtggcacccagggactgaaggacacagtgcgtggagacggccctgagctagcggcattccttagacttcaggagctcagagtttgtcccggtgacttgcaccctggctgctttgcttggacagtttgtcttgggtatagggaagccttccttgtcaggcagccaactcccagccctgttcacacaaattttatgctagggccccatgccagtcagtgtccccatcatggtggctatgaagctcacggctgaagattccagaaggtcctggtctcccatgcccaagggatgccatgtagccccagctggaagtgacttccgcaggaattgagagggaatagctcacccctcattctgtcctccggacttaggaaccagtgaccttggctgcccaactgtgtggaggctgagtgattgacaaacacaggttggctcattcttgctgcaagagcaggtaccccccgccgcccccctggaaagcacaagtgatgagcaagaaggcattttccttgggagagaaggggaaatggaccctgacccccttgatccccaaagaagctgcgccccacctttccagatacccacaaagcccccagacagaatctagcatcgggactattagcaatggcttccagaatgtgcttgggtcccacgtgactgatctgacaaaaaaaaaagagggatattaccatggcaacccttgcattccaccctgagtttgccaaggcacacaaaaatagggaacattttcttaaagaacactccaattcagcctgagtgcaacctgactctctgcatctgtatcctgctgggagaggcaattacccttaaagaatctgggtggtatctctgcctttttgtctggcatttgaacttgtccttctatttactcaggagagcaggagctacctgtaagccctggtatctccccatccctactcccagccccttctcccagggtccagagccaggaccccttaatctaggtaaattgacagaaatatcatcttggaaggcaaacaagatattaagcctccaatctttaaaagtatcggtttgcctgttgagcacactcctgcaagccaaacacgtgaactttggtgaactgaggtttaggtgtggtcttaggcaaacccagtggtttcagaaatgtctgggtgttttatttgcagagaacaagatgtgtcttatgagtcttctttctcaatacctgccctgtctcaaatctcacttgacaaatggtctacgatcttgcagttatccaaaagagcctatgaaaaatggacagctgcttttgacaataatgcccctcccaacttcccattcatagaatcataaagcgatatgtttcagaactgagagagaaaagtttaccttttattccaaatgcctcgtactcggtttaagtccagactcaggtcataaatcaaagacagttttgcacgttgctcttcacctaaatctagcagtttccctgaggccctatgagggcatggacagaaaatgaaggatgcaaccacccaggacagctccctggtttgggctggcctggccacgtgtggtcacatgtcctgggatctgtgtttactgtgtccttgctctccttccttgcagaagctgctaagctctgctcctcctaactgcaggtctcaaaccctattgggtcattttgccacactatttctccaaaggcccatagtcattacattttttaccatttcaccaagataacagggggggtctggaattcccctgctaggaagggccccttttcctatatcaccgtgatggtacagatgaactgagatgaaacttttagacttcagcacgtcacacatcctggttgtataaccaggaggtctgcagagctgcaacccctgaagaacatctgtcttaaaagacctcaaatcagaacattctcattggcctcttcagtgatccccatggagctaagagtccgtaacctaaaggccttaccatagccatcttccctccacacctgattgctcaactgccccagaaggggagaatctatctgaaatagaaaagaagcattaaggaccaggtgcggtggctcacacctataatcccagcactttgggaggccaaggcaggtggatcacttaagatcaggagttcaagaccagcctggccaacgtggtgaaaccccatctctactaaaaaaaaaaaatacaaaaattagccaagcatggtgtcgggcacctgtaatcctagctactctggaggctgaggagggagaatcacttgaaccctggaggcggaggctgcagtgagctgagatcgcgccactgcactccagcctgggcaacagagcaaaacttcatctcaaaaaataattttaaaaaagaaacattattcaccagctaagacttttcaatttaaattatttaaagtgacagcaacatagaggagaatttgggctgcctcttaccgacccagtctccatgataatttgagtgtcacaactgttcagcttcacttcatacttgctttgactaagtcactcgggattgtcctcaattttttggccctgccataaataggtgtatgttagtccgttttgcattgctataaaggaataccttaacactgggtaatttataaagaaaagaggtttatttggctcgcagttctgcaggctgtttgagcaaggtatcaacatctgcttggcttctggtgagacctcagaaagctttgacccatggtggaaggtgaagggggagcaggcacgtcacacagcaagaacaggagcaagagagaggagaagaggtgccagtctccttttcttaacaacccgcaattgcatgaactaataaagtaagaattcactcattactacagggagggcaccgagtcattcatgaggaatctgtccctatgacccaaatatctcccagcaggccccacctccagcactggagatcaacatgaaatttggggggaacaaatatccagcctctatgattggtttggagcaatgagatcaattacaccaacaagccaagcatttctcttagtatcctatggtcattgctaatgcatatggtcattttgacagctgtggtttctccttcatattcatttgggactcttcatagggtctcgagagacatgacaatactgttcaaaacgtctccaaggcaaaattaattttattccgttgactggaaatatatcacaaagaatgaggtttttccagtcccacccacaagacagtcctctgaaagtggaaaagcttgcccggccacctgcccctaccctgaccttggggtagttcatcagttgagcacaacccccatgccgggcatagactcacccatctcttttcctcaggtgtgatgggttggctttcaaactagtgtttctcgcactgttagaagttattgtccaagtggaaaggatgcagaggctggaattttccagtgggatagaagagcaggctaattaggaaggaatattccagggaatgcaaggtgcaactgcgatattgctccatccctggacctgagggagacaaagaaagttcttaaagggctgcagatgctgtcctctgaaggtcttctctggatcgctggcctactttggaaacatgcaggccattgagtgccatggggctgcccatcagtctgatccacacgaaaggctctgtgcatttcaagagcaggctggtagctcgccattcctgggaggatgctgacatctgtcaagcccagaatgcctctctcagggctctcagacctgttaaactgaggccaggagagcagaagaaagaactcaaagtgtggacggtactaccagctggagaaagcccaggagccaggactcttccacccactatctaggttatgttgagtgacattcctccctggcttcaggtttctctaaagccagaggaaaagtaaaccagacaagccctcccatctattttgtctgaaacaagatggagtgaatgctccctactgagagggtctggatttcacccatgaattgcactaggaactgggagctcctttttgaacacaagtcccaagaggcagttgtgataaagtctctcttttggtgtccgctgtctgtaaatgaaacaatgcaaattggtgtatgttaaatgtgtcacagcttgcaggcaagaggttttgtttattctctaaggacttgctgactcgagggagcatcaaagatgagctttctgtctgtcttggcaagtgtgaaaataaagggagtcagtcacctccccaaaggtcatgtgaatcagaattcaggagaaagttggaggaaacaatggcagattccaagaagagatgcttgtttctccatttgagaaagccttactgaaagctactgaataaagagcacaatttccagttatttctttctttgcttttttttttttctggccactataacagcacttccagtatatgttgatagtagcttgtaattattcctaataccccagaaagaagagagtcgtgatctttggtgattgtgaggaattagattaacagtcgcgggggaccggctacctgcgacagccctttaaatggctaatgagggatgctgagtgctgagcggtgcctgcttttgatgtggcccacccatgaccagggagagagggcaggaagagagcagctgcaggatccacaagtctctaacccttctgccccaggcaacataaaaccctagattcttgttctttttccctcttcctaaagtagactgacgtcccagtaattgtttttctaacaagccctgttgttctccctgggaaagacctagattggccaagaaaggatcctgtcagctcctggtggagagttgcacaagccagtggctctcaactctctccaaggaaaattaaagcatattttctctttcttagctcaaaatcagctttcaggggtccttattggggtctgattttcttccccagttctgaatccaggaagaagctttttctccaaggaccaaccaaaaacaatgactttggagaaaaattagactcagaaagtctgtccaggcattgggttggtgaactgtcaactgttggatggggaggaggggtcgctgtgatcgtagcggtcattagacttgggacgtgagttgtctctcaaagcacagtagtaaatgactgtattttgtatattgcccccaatatgttgggtgtaaatagaagcacagctggggattgatcatggccaggacgattggagcttggcagctctcatatccagaataagccactaagacggaactcatcaatcaccatcttcccatttacctcattagcatcccattttctctcattcagtattagttgatgatttctgctattaagtgatgagaaagtcagcagactagtcaaaaaagaatctttatataaaatgtacatattaatataaattaacttagcatgcaacttaccgatcaaatgaagtatatattattaatatgttatcttagtgtataaaggaaaactgccatatttaccagatgttttctttaaccgaacttgtctgtaaatatataatctgtataaaaagagtctaatttaccattatttatgcaatagaaaaaataaaagtttttttttcttttg

SEQ ID NO: 113538 - DNA, 777 bp, Homo sapiens
  Payload ID: 2194
  Gene Symbol: CALN1
  Gene Name: calneuron 1
  Uniprot ID: Q9BXU9
  ENST ID: ENST00000431984
  CDS Start-End: 118-777
ggtccatcattctgaggagctgcagtgccctgctccttcctgatggcttagagattctccttaactcccagccatggatcttggagaatttcccccgagatcagcaggagggaaaagatgccgttccaccatgtgaccgccggcttgttgtacaaggggaattacctcaaccgatcgctctctgctggcagtgacagcgaacagctggctaatatctccgtggaggagctcgatgaaatccgagaggcctttcgggttctggaccgggatgggaacggcttcatctccaagcaggagctgggcatggccatgcgctctttggggtacatgccaagcgaggtggagctggccatcatcatgcagcgcttggacatggacggggatggccaggtggattttgatgaattcatgaccattcttggccccaaactggtgtcttcagaaggtcgcgatggttttcttgggaacacgatagacagcatattctggcagtttgacatgcaaaggataactctggaagagttgaagcacattctctatcatgccttccgagaccacctaacgatgaaggacattgagaacatcattatcaatgaggaagagagcctgaatgagacctcggggaactgccaaacagagtttgaaggagtgcattcccagaagcagaacagacagacctgcgtccggaagagcctcatatgcgcctttgctatggccttcatcatcagtgtcatgctgattgcagccaaccagatactccggagcggcatggagtag

SEQ ID NO: 113539 - DNA, 550 bp, Homo sapiens
  Payload ID: 2194
  Gene Symbol: CALN1
  Gene Name: calneuron 1
  ENST ID: ENST00000446128
  CDS Start-End: 176-550
gtgcctccctggacgtctccaggggcggtcacgcggaatgctggtccccgcagtttcggccattggcccctccacttcggcgccccgccttccccctgggctcaggtgtaatcgtggatctagggtgtgggcacctgggatgaagtagtgaaggcggcgggcgctaggggaaaagatgccgttccaccatgtgaccgccggcttgttgtacaaggggaattacctcaaccgatcgctctctgctggcagtgacagcgaacagctggctaatatctccgtggaggagctcgatgaaatccgagaggcctttcgggttctggaccgggatgggaacggcttcatctccaagcaggagctgggcatggccatgcgctctttggggtacatgccaagcgaggtggagctggccatcatcatgcagcgcttggacatggacggggatggccaggtggattttgatgaattcatgaccattcttggccccaaactggtgtcttcagaaggtcgcgatggttttcttgggaacacgatagacagcatattctggcag

SEQ ID NO: 113540 - DNA, 4260 bp, Homo sapiens
  Payload ID: 2195
  Gene Symbol: CANX
  Gene Name: calnexin
  Uniprot ID: P27824
  ENST ID: ENST00000247461
  CDS Start-End: 201-1979
actcaggggccaggggcgggcacagggccgggcttcgtgcggtggggctcgctcgcgcggcagcggtggccgaggcctcttggttctgcggcacgtgacggtcgggccgcctccgcctctctctttactgcggcgcggggcaaggtgtgcgggcgggaaggggcacgggcacccccgcggtccccgggaggctagagatcatggaagggaagtggttgctgtgtatgttactggtgcttggaactgctattgttgaggctcatgatggacatgatgatgatgtgattgatattgaggatgaccttgacgatgtcattgaagaggtagaagactcaaaaccagataccactgctcctccttcatctcccaaggttacttacaaagctccagttccaacaggggaagtatattttgctgattcttttgacagaggaactctgtcagggtggattttatccaaagccaagaaagacgataccgatgatgaaattgccaaatatgatggaaagtgggaggtagaggaaatgaaggagtcaaagcttccaggtgataaaggacttgtgttgatgtctcgggccaagcatcatgccatctctgctaaactgaacaagcccttcctgtttgacaccaagcctctcattgttcagtatgaggttaatttccaaaatggaatagaatgtggtggtgcctatgtgaaactgctttctaaaacaccagaactcaacctggatcagttccatgacaagaccccttatacgattatgtttggtccagataaatgtggagaggactataaactgcacttcatcttccgacacaaaaaccccaaaacgggtatctatgaagaaaaacatgctaagaggccagatgcagatctgaagacctattttactgataagaaaacacatctttacacactaatcttgaatccagataatagttttgaaatactggttgaccaatctgtggtgaatagtggaaatctgctcaatgacatgactcctcctgtaaatccttcacgtgaaattgaggacccagaagaccggaagcccgaggattgggatgaaagaccaaaaatcccagatccagaagctgtcaagccagatgactgggatgaagatgcccctgctaagattccagatgaagaggccacaaaacccgaaggctggttagatgatgagcctgagtacgtacctgatccagacgcagagaaacctgaggattgggatgaagacatggatggagaatgggaggctcctcagattgccaaccctagatgtgagtcagctcctggatgtggtgtctggcagcgacctgtgattgacaaccccaattataaaggcaaatggaagcctcctatgattgacaatcccagttaccagggaatctggaaacccaggaaaataccaaatccagatttctttgaagatctggaacctttcagaatgactccttttagtgctattggtttggagctgtggtccatgacctctgacattttttttgacaactttatcatttgtgctgatcgaagaatagttgatgattgggccaatgatggatggggcctgaagaaagctgctgatggggctgctgagccaggcgttgtggggcagatgatcgaggcagctgaagagcgcccgtggctgtgggtagtctatattctaactgtagcccttcctgtgttcctggttatcctcttctgctgttctggaaagaaacagaccagtggtatggagtataagaaaactgatgcacctcaaccggatgtgaaggaagaggaagaagagaaggaagaggaaaaggacaagggagatgaggaggaggaaggagaagagaaacttgaagagaaacagaaaagtgatgctgaagaagatggtggcactgtcagtcaagaggaggaagacagaaaacctaaagcagaggaggatgaaattttgaacagatcaccaagaaacagaaagccacgaagagagtgaaacaatcttaagagcttgatctgtgatttcttctccctcctcccctgcaagagtggtcctaggagaggacctggcacaccttaggttgacattcagaaaacttcaagacatcaccatcagcaggctccagttgaacactagtctgtgtaactttaaacatctagcagtaaatacttgcagttgtgatataaaggaccctgtttctgtagaaaagaaaacatttaacataatggttgtgaaatgtaacatgaagcaaactaacttttttttttttaacatctttgtttttaaaatagaatgatagaactttgccagtctttaagatcttggcttaatttaatgtattaatctgtttgtgcaaacataataccaccatttaaaaatgttagggagatgagttgcagtttttataatagattttttttaaagtttggtattgtaaaacattcacacctctgtccctcaaaattgataattacgtttaaagtgcagtcatttgtggttagaatcttgttttgtttgcttccattattgagttcctcctaaggaaattgaggagagggactgaatagaagcccaaattcatataaaagttgcgtttaagttgtattaaaaatagatatataagaaaaaattctttcacttgatgtttgttagaccagaaagtgtgtgtgttctgtagctcagttcccagacagctttttaggtagtggaggaggtggcttcatgtggcacttgggcatttatattccacttgggagggtcaggctgtggccttctggagcaggtggcttgttaaggaatgctagcagggcatggcacgtgagctccggaatagatgtcttcatcacttcttccactgtgtgttgacactgttttccttacctatttcctcagatccccagctttctcctctgctatgcattttcttcacagtgcagcttgcagtccgttgctgaaaatgattataagccctgcataatgttaagctttattgtgattacgtgtatgtttcttctttcttttaagcagacccatacctttccagggtcaaagtacagaatagaatacattgatacaaagtacagaaaaatactttgatttttatccatttcttttactctgtgtaaagacttgagaagtctaattcacaggcaaaccaatacagaattgactgcagttgaacagactagaagtatttgtgggaggagtgacatgaagcatgagttatctgattttttttgtagctgctatatattttaagccttcatttgcaattcatgtaacagttgtgtcataaattacacaataaagcagtcctgttcaaatttttttttaacgtggcttgtagaatttttaaaaaagtgatcttaggtttgttttttcatgcgggatgcagatgggtgctatcagagcctctcccacaccactatagtgtaataatgttattattactctacactgaaacgtattcagagttagatattattttagcttcagttgttctttagaggctttcaaatgtaccgatgatactgtttcttgcactgaatatataaacactccacagtgtttatattgggaagatattgggaaggaaatatatttgtaaaagatgaaggctgtatctatttttttttctttttaaagtttgttcacttaaattcttttgaggatgggatgtatttttcttgctgttcagtgctttttccttttcatctgttgttctgtggtcacagtgaccttagctacatagcagactttcccaaatgtattgattacaaataaacagttgttacttagcaagacctgaaaatatgtctgcaggtttctccttgaagcaaatgtgtgggatcattgcatttccagaaatctgcctccttcaccctccgttgacagtatatgtcatgcctcactttcttctagctgagctttaaatcattagagcttaaattgtcagatcgttcattgcctttccagggttatttagtaaagtttgttgaaaacaaaaacgccttttcttggttcttttttcagttattttgaaggtccagcatcctgattaaatgtctgacacattaatgaatgaccagcagcagctttcagctcttaaaaagacacttatattttgattttacatgctggttacctgttccattgttgtcaaatgcccactctccatcagatgtgttcctccattttcttatccacaaagtactcctcacttttcaatttgtcatgttactaaatggtgttacattaaagccctgtgttaagtgtc

SEQ ID NO: 113541 - DNA, 4207 bp, Homo sapiens
  Payload ID: 2195
  Gene Symbol: CANX
  Gene Name: calnexin
  Uniprot ID: P27824
  ENST ID: ENST00000452673
  CDS Start-End: 148-1926
actcaggggccaggggcgggcacagggccgggcttcgtgcggtggggctcgctcgcgcggcagcggtggccgaggcctcttggttctgcggcacgtgacggtcgggccgcctccgcctctctctttactgcggcgcggggcaagatcatggaagggaagtggttgctgtgtatgttactggtgcttggaactgctattgttgaggctcatgatggacatgatgatgatgtgattgatattgaggatgaccttgacgatgtcattgaagaggtagaagactcaaaaccagataccactgctcctccttcatctcccaaggttacttacaaagctccagttccaacaggggaagtatattttgctgattcttttgacagaggaactctgtcagggtggattttatccaaagccaagaaagacgataccgatgatgaaattgccaaatatgatggaaagtgggaggtagaggaaatgaaggagtcaaagcttccaggtgataaaggacttgtgttgatgtctcgggccaagcatcatgccatctctgctaaactgaacaagcccttcctgtttgacaccaagcctctcattgttcagtatgaggttaatttccaaaatggaatagaatgtggtggtgcctatgtgaaactgctttctaaaacaccagaactcaacctggatcagttccatgacaagaccccttatacgattatgtttggtccagataaatgtggagaggactataaactgcacttcatcttccgacacaaaaaccccaaaacgggtatctatgaagaaaaacatgctaagaggccagatgcagatctgaagacctattttactgataagaaaacacatctttacacactaatcttgaatccagataatagttttgaaatactggttgaccaatctgtggtgaatagtggaaatctgctcaatgacatgactcctcctgtaaatccttcacgtgaaattgaggacccagaagaccggaagcccgaggattgggatgaaagaccaaaaatcccagatccagaagctgtcaagccagatgactgggatgaagatgcccctgctaagattccagatgaagaggccacaaaacccgaaggctggttagatgatgagcctgagtacgtacctgatccagacgcagagaaacctgaggattgggatgaagacatggatggagaatgggaggctcctcagattgccaaccctagatgtgagtcagctcctggatgtggtgtctggcagcgacctgtgattgacaaccccaattataaaggcaaatggaagcctcctatgattgacaatcccagttaccagggaatctggaaacccaggaaaataccaaatccagatttctttgaagatctggaacctttcagaatgactccttttagtgctattggtttggagctgtggtccatgacctctgacattttttttgacaactttatcatttgtgctgatcgaagaatagttgatgattgggccaatgatggatggggcctgaagaaagctgctgatggggctgctgagccaggcgttgtggggcagatgatcgaggcagctgaagagcgcccgtggctgtgggtagtctatattctaactgtagcccttcctgtgttcctggttatcctcttctgctgttctggaaagaaacagaccagtggtatggagtataagaaaactgatgcacctcaaccggatgtgaaggaagaggaagaagagaaggaagaggaaaaggacaagggagatgaggaggaggaaggagaagagaaacttgaagagaaacagaaaagtgatgctgaagaagatggtggcactgtcagtcaagaggaggaagacagaaaacctaaagcagaggaggatgaaattttgaacagatcaccaagaaacagaaagccacgaagagagtgaaacaatcttaagagcttgatctgtgatttcttctccctcctcccctgcaagagtggtcctaggagaggacctggcacaccttaggttgacattcagaaaacttcaagacatcaccatcagcaggctccagttgaacactagtctgtgtaactttaaacatctagcagtaaatacttgcagttgtgatataaaggaccctgtttctgtagaaaagaaaacatttaacataatggttgtgaaatgtaacatgaagcaaactaacttttttttttttaacatctttgtttttaaaatagaatgatagaactttgccagtctttaagatcttggcttaatttaatgtattaatctgtttgtgcaaacataataccaccatttaaaaatgttagggagatgagttgcagtttttataatagattttttttaaagtttggtattgtaaaacattcacacctctgtccctcaaaattgataattacgtttaaagtgcagtcatttgtggttagaatcttgttttgtttgcttccattattgagttcctcctaaggaaattgaggagagggactgaatagaagcccaaattcatataaaagttgcgtttaagttgtattaaaaatagatatataagaaaaaattctttcacttgatgtttgttagaccagaaagtgtgtgtgttctgtagctcagttcccagacagctttttaggtagtggaggaggtggcttcatgtggcacttgggcatttatattccacttgggagggtcaggctgtggccttctggagcaggtggcttgttaaggaatgctagcagggcatggcacgtgagctccggaatagatgtcttcatcacttcttccactgtgtgttgacactgttttccttacctatttcctcagatccccagctttctcctctgctatgcattttcttcacagtgcagcttgcagtccgttgctgaaaatgattataagccctgcataatgttaagctttattgtgattacgtgtatgtttcttctttcttttaagcagacccatacctttccagggtcaaagtacagaatagaatacattgatacaaagtacagaaaaatactttgatttttatccatttcttttactctgtgtaaagacttgagaagtctaattcacaggcaaaccaatacagaattgactgcagttgaacagactagaagtatttgtgggaggagtgacatgaagcatgagttatctgattttttttgtagctgctatatattttaagccttcatttgcaattcatgtaacagttgtgtcataaattacacaataaagcagtcctgttcaaatttttttttaacgtggcttgtagaatttttaaaaaagtgatcttaggtttgttttttcatgcgggatgcagatgggtgctatcagagcctctcccacaccactatagtgtaataatgttattattactctacactgaaacgtattcagagttagatattattttagcttcagttgttctttagaggctttcaaatgtaccgatgatactgtttcttgcactgaatatataaacactccacagtgtttatattgggaagatattgggaaggaaatatatttgtaaaagatgaaggctgtatctatttttttttctttttaaagtttgttcacttaaattcttttgaggatgggatgtatttttcttgctgttcagtgctttttccttttcatctgttgttctgtggtcacagtgaccttagctacatagcagactttcccaaatgtattgattacaaataaacagttgttacttagcaagacctgaaaatatgtctgcaggtttctccttgaagcaaatgtgtgggatcattgcatttccagaaatctgcctccttcaccctccgttgacagtatatgtcatgcctcactttcttctagctgagctttaaatcattagagcttaaattgtcagatcgttcattgcctttccagggttatttagtaaagtttgttgaaaacaaaaacgccttttcttggttcttttttcagttattttgaaggtccagcatcctgattaaatgtctgacacattaatgaatgaccagcagcagctttcagctcttaaaaagacacttatattttgattttacatgctggttacctgttccattgttgtcaaatgcccactctccatcagatgtgttcctccattttcttatccacaaagtactcctcacttttcaatttgtcatgttactaaatggtgttacattaaagccctgtgttaagtgtc

SEQ ID NO: 113542 - DNA, 1000 bp, Homo sapiens
  Payload ID: 2195
  Gene Symbol: CANX
  Gene Name: calnexin
  ENST ID: ENST00000502673
  CDS Start-End: 77-1000
gaggcctcttggttctgcggcacgtgacggtcgggccgcctccgcctctctctttactgcggcgcggggcaagatcatggaagggaagtggttgctgtgtatgttactggtgcttggaactgctattgttgaggctcatgatggacatgatgatgatgtgattgatattgaggatgaccttgacgatgtcattgaagaggtagaggaaatgaaggagtcaaagcttccaggtgataaaggacttgtgttgatgtctcgggccaagcatcatgccatctctgctaaactgaacaagcccttcctgtttgacaccaagcctctcattgttcagtatgaggttaatttccaaaatggaatagaatgtggtggtgcctatgtgaaactgctttctaaaacaccagaactcaacctggatcagttccatgacaagaccccttatacgattatgtttggtccagataaatgtggagaggactataaactgcacttcatcttccgacacaaaaaccccaaaacgggtatctatgaagaaaaacatgctaagaggccagatgcagatctgaagacctattttactgataagaaaacacatctttacacactaatcttgaatccagataatagttttgaaatactggttgaccaatctgtggtgaatagtggaaatctgctcaatgacatgactcctcctgtaaatccttcacgtgaaattgaggacccagaagaccggaagcccgaggattgggatgaaagaccaaaaatcccagatccagaagctgtcaagccagatgactgggatgaagatgcccctgctaagattccagatgaagaggccacaaaacccgaaggctggttagatgatgagcctgagtacgtacctgatccagacgcagagaaacctgaggattgggatgaagacatggatggagaatgggaggctcctcagattgccaaccctagatgtgagtcagctcctggatgtggtgtctggcagcgacct

SEQ ID NO: 113543 - DNA, 569 bp, Homo sapiens
  Payload ID: 2195
  Gene Symbol: CANX
  Gene Name: calnexin
  ENST ID: ENST00000509563
  CDS Start-End: 474-569
gggcatgacacaagtgattgctggttgagggaagttaaactgagcttaatattaaaagattgagaggacaagattaaccatagttaagtctttttacctctgatttaggaaatggaagattttgcttaattttttaataagtagatttttttaagggggaagaattttattgatctttaaaatcattctgtatctcagtcttttcccaacattgtttgagggtcatgaatagaagcaactgccatatggatcaactgttgtacatttggtataattatacttagagcagaggtaaaggactatgtgggagttctcctgtgcatcagccagggtgcacacacaagccagacggagtctcgctctgtcactcaggctggagtgcagtggcgcgatctcggctcactgcaagctccgcctcccgggttcacgccattctcctgcctcagcctcccttgtagctgggactacagatcatggaagggaagtggttgctgtgtatgttactggtgcttggaactgctattgttgaggctcatgatggacatgatgatgatgtgattgatattgag

SEQ ID NO: 113544 - DNA, 727 bp, Homo sapiens
  Payload ID: 2195
  Gene Symbol: CANX
  Gene Name: calnexin
  ENST ID: ENST00000513246
  CDS Start-End: 406-727
gaggcctcttggttctgcggcacgtgacggtcgggccgcctccgcctctctctttactgcggcgcggggcaaggtgtgcgggcgggaaggggcacgggcacccccgcggtccccgggaggctagagatctgtggtcctccgtggaaagagagccactaccccaagacacatctaatataatacacagggcgcttacgtggttagaaaagaagagataagccgggtgcggtggctcactcctgtaatcccagcactttggaaggccgaggcgggcagatcacgacgtcaagagattgagactatcctggccaacacggtgaaaccctgtctctattaaaaataacaaaaattagctggatgtggtggtgcacacctgtcatcccacctacttgggaggctgagatcatggaagggaagtggttgctgtgtatgttactggtgcttggaactgctattgttgaggctcatgatggacatgatgatgatgtgattgatattgaggatgaccttgacgatgtcattgaagaggtagaagactcaaaaccagataccactgctcctccttcatctcccaaggttacttacaaagctccagttccaacaggggaagtatattttgctgattcttttgacagaggaactctgtcagggtggattttatccaaagccaagaaagacgataccgatgatgaaattgccaaatatgatggaaagtgggaggtagagg
